United States Patent Application Publication US 2026/0092266 A1 - sequence listing, part 9

SEQ ID NO: 1426 - DNA, 11974 bp, synthetic construct
  variation 1130..1474: note = n is a, c, g, or t
  misc_feature 1..11974: note = Synthetic
  variation 8546..8691: note = n is a, c, g, or t
  source 1..11974: mol_type = other DNA
attccgggcgtacaggttgtggccgggagtgatgtgtatggcatcaagagagaacgttttctgaaaagggtcaccgattattacgcaacggcagagcaggaagtgagtgtggagctgtacgaagactacaaagatctgattgcccgcacagacatcgatgctgtggtgattgccacgcccgatcactggcacgcattcatggcgattgacgcagccaaggccaagaaaaacatctatctggagaaacccctcacctttaccattaaggagggacagatgctggtgaaggcggtgcgcgataacggagttattttgggcgttggcagtcagcaacgttccgatgttaatttccagcatgccgtgaagatggtgcaggaagggaagattggcaagattgagcgggtgaatgcctatgtaggtgggcctcccacaccgtatgacctgccggaagaacccgtgccggccgatttgaactggccgttgtggctgggcccttcggagtatgttcactacaactcacagctgaatcctcctatctccctcaatcccgagcagaacgagcagttctggggtgggtggcgctggtacaaggagctgggcggcggtttcaccaccgactggggagcccacatgttcgatattgcccagtggggactggggatggacgagagcggcccggtcgaggtcattcctgccggtttcgaagatacgcaatttctcacctataaatatgcgagcggtgtggtcatgaccgaggagccgttcaacgagaagaagaccaagggcgtgaagttctggggcgataaaggatggattgaagtgtcgagggaacatttccttgcttccgacgagagcctgcttcctcccacggtagaagtcgctgagggcgcttacgaaactaaaattccgcatctggagaacttcgtcaacgcattgaagacaaagaccgatccggtggtgcctgtggagatcgggcatcgttcctgcacggtatgtacgctgggtaacattgcctacgacctgggccgccccatcaagtgggatcctgctgccgagaagtttgtggacgatcccgaagcagatgcacaccggttattcaacaagacctacagcgaagggtatacgctctnnnnnnnnnnnnnnnnnnnnnnnnnnnnnnnnnnnnnnnnnnnnnnnnnnnnnnnnnnnnnnnnnnnnnnnnnnnnnnnnnnnnnnnnnnnnnnnnnnnnnnnnnnnnnnnnnnnnnnnnnnnnnnnnnnnnnnnnnnnnnnnnnnnnnnnnnnnnnnnnnnnnnnnnnnnnnnnnnnnnnnnnnnnnnnnnnnnnnnnnnnnnnnnnnnnnnnnnnnnnnnnnnnnnnnnnnnnnnnnnnnnnnnnnnnnnnnnnnnnnnnnnnnnnnnnnnnnnnnnnnnnnnnnnnnnnnnnnnnnnnnnnnnnnnnnnnnnnnnnnnnnnnnnnnnnnnnnnnnnnnnnnnatgctgtcgagtcccgcaaagatggagacgaagcggtccagtccgaaggctattcccccgtggggaggagcgccgtacttaaaggcattcatcagaaacccgaactgttcctgtgccctttcttcggtgaagcccagcacggagaacatcttcttttgcagggcgctgtcgtggatacggatcgacccgccaccaatttccacgccgttgatcaccatgtcataggcattggcccgcactgcccccggatccgaatcgagcaaggagatatcctccggtttgggagaggtgaacgggtgatgtttcgcgaagtagcggttcagctcctcgtccttctccaggagggggaagtccaccacccagaggcatttgtagttgtttttgtctctcagtccgaggcgcgatcccatctccaggcgcagttcggagagttgtttctgtgttttctccgtctcccccgccagcatcaggatcaggtctcccggtttggcgttgcacttttcggcccactttttcagggcctcttcgttgtagaacttatccaccgacgacttgagtgttccgtccccgttgtagcggaggtatatgagtcctttggcaccaatttgtggccgtttcacgaagtcggtcagctcgtccagctgtttgcgtgtataggaggcacacccttcggcacagatggcacccacatattcggcggtgtcgaacaccccaaagtcgtgccccgtggtcagctccttcatttcggtgaaggtcatcccgaagcgcgtatccggcttgtccgacccgtagaggcgcatggcatcggcgtagctgatgcggggaaagtccgggatctcgattccctttattgttttgaagagatgctttgtgagcccttcaaaggtattcagcacatcctcctgttccacgaacgacatttcgcagtcaatctgcgtgaactccggctggcggtcggccctcaggtcctcgtcgcgaaaacacttcacgatctggaagtatcggtcgaaacccgataccatcagcagctgtttgaagagctggggcgactgtggcagggcgtagaactcgccctggttcatgcgtgatgggacaatgaagtcgcgtgccccttcgggcgtggagccgatcagcaccggcgtctccacctccaggaaagcccgctcgtcgaggtatcgtcgagtctcgaacgccatccggtgacgcagctccaggttctggcgcaccacgttgcgtcgcaggtccaggtatcggtatttcattcgcagctcgtcgcctccgtccgtttccgtttcgatggtgaagggcggtgtttgggatgcattcagtacagtcagtttggcgacgatgatttcgatgtcgccggtagggatgtgcgaattcttgctggagcgttccttcacggttcccgagacctgtatcacccactcgcggcccagtttgttagcctgttcgcaaagctcgtgatccacctcctggttgaacgacagctgtgtgatgccatagcggtctcgcaggtcgatgaacgtcatgccgcccatcttcctgattttggatacccagccggccagggtcacctctctgtttgcatcggccagcctcagttcgccgcacgtactgtttctatacatatgatatctgtttattttgcgtttttagtagtgcaaatgtacataattcttgcgttatacggatgtttacacaaaaaaaggcaggaagatttgagattgtcagaataaaaacgtacttttgcacccacattttgcaaatatctttgagggatgcagcgtacgtatgttcgctcctcccttgaaaaagagagttcggaaacgtttatatatattttcggggtgtagcacagtccggttagtgtacctgctttgggagcagggggtcgcgagttcgaatcccgccaccccgacttaataatcaaggagttatattgagaaatgtaactctttttatttttggtttaaacattttgatccgtataccgctatactattgataacttttcttcatcattcaaaaaaacacaatatcaggagtatcacagctcccttacatgtcaccattgctcaccaatgattgaaatgcacattaattaatttgttgaatgttgtaggaataaatgcacgtttagcagtgccgtaatagttgcctgtggactgctaaacaggtataaaaacaaagaaatatgtaatgttttgtaatgtgtttctcaccaacaacctataaaatatttttttttctattatatatttgtgacattagttaaagacgattgagaaattgtaaaatatttaattttaccatgtttctctttgtcaatcatctgagggaaacgtgagtgatcgttaccatttgtcttttgcatagccgtaggcatagggtttgtttagtaataatcattttaaaaatcatggtttatgagaaaaattgttctgtttttcgcagttattgccatgtcggcaattaccatcactatctcttcctgttccaatgatttgagccttattgaggaagaaagttccaatgatttggacctagttgaggaagaaagtgctgttgcccttactgccggtacgcgcgcagtagaagtccccatatgcttagatccctgtcgcgatgtacaagaggttcgccttatggctggacaatactatgaagccggaaaagtttacgttgtcaacaacagagaaaatttgtacgtggcttacgaaactaccggggaatggaaaatgaaagcaatccacctttatgtgggagcctgcgacaagttaccggtgaataaatcaggcaatcttgttccgggacaattcccttataaggtggaatttgacgggttaaaaaccttttattatgttgaaattccgcttgaaacacttcccgaaggatgcgtgtgtgtggccgctcatgccgaggtggtaaaagtggttaacggtgaaattgtacgaagcgaaacagcctttggagaaggcgaaaaagtgggcaaaaactggtttatgaaatttcaatattgcatagccctttgcgaaccgccggctgaggtatgttaccaggacgaaacagcctgggctgcaggctcccggtacgtaacacaaggcaattgggcaacctatactccttatgttgccaatactcccattaatgtttatgccggtcagacctacctggtgggaaccgtaactttttccgaagtggtgaatggtaaagtaaccattactctcgccgcgctcaacggagcccggttgcagaatgttgccgagtcggtaaaaattcaagggtacgaaacaccacccagtgggaacccgtcgcctggcctgtttactacctacaaaggcaaccagtcaaccgtaatagttgatgcatacgcttattatggtatccatttagatgtacagcgtgttgtggattgtcctgattaatagtataaacggtaaaaaaaggcggtacggctccgcctttttttgtttgtcagcgattaacggcaaatcattacacttgtgctcaacacaaatattcggagaaacgtatgagtccttgtcagacagaatattgcacttgtcgattcattttgataggtgttttttgtgacctgtggtgcttaccccaattgaagaccaggtcctctttttcgtataatattcctcttattccggtctaatgtaaaccggatcaactccatttctatttgaagtatattagagcgatattaggagtcgcatcagtttaggtatagtcgatgatcatcggaagacacggtataacttgtccttttctaaaatatgtttatatgcactgaaaattgaaaacagggtgagacagatcgtggccacttaacccaatgttatctccccattttggtttttttaccgggataaaaattttcatcaattcaataggctaggcactttttcttctgtgaccacacaattttagactgatggttatttaagcaaaacgacccaataaatgggccgttttaaatgttttcacaacggaataatccttattgtgaattgctttcagataatttcacaaatatataacattttaaatactttgaaaattgttttaagttaataattgtttatctttgaggggttgaatggaattatctctttcttaatacaatacatatggaaaaaagaatcttaggtcttgatttgggtacgaactcgataggatgggcacttattaaacacagttttgacgagaaaaaaggtgaaattttgggaatgggaagtcgtattatacccatggatgctgcaaaagtgggtgaatttgaaagaggtaatcccgtttcagctacagcagatagaacaaaatttagaagtgtacgcagactctatgaaagagatgtgcttcgtcgtgaaaggcttcatcgtgttctgcatattcttgattttttgccgacacactatgctgaaaatattgattttgaaaatcggccgggtcagttcatgaaaaataaagaacctaagctgccttatcaggaaatatctaataagaaatatgattttatctttaaagatagtttccaagaaatggtggatgattttagaataacccaaccgcaattattttatttgaaagccaatggttccgagagcaaaataccgtatgactggaccatatattacctgagaaagaaagccttaagcgaaaaaataaaaaaagaggaactagcttggatattgttgaatttcaatcaaaaacgtggatattatcagttgcgcggcgaagatgaagaattagaagataacaaagaaataacttttgaaattctgaaagttgataaagttattgattccggggaaaaaataaaaaattctggagccatactttacgatgtatattttgaaaatgggtggaagtatgataaacgggtgacaaaaacggaggattgggctggtaagacaaaagaattcatcgtgactacctctgttttggcttccggtgaaattagtcgtagttataaagctgttaattcagaagaagattggattgctattaaacaaaaaacggaacaagacattgagagtacaaataaaacggtgggcgagtatatctatgacactcttctaaaaaatcccagtcaaaaaatcaggggcagattgatacgaacgattgagcgtaagttttataaaaaggagttaaagctgatacttgaaaaacaaaaagagtttcatccggaattaagaaacagagatttatacaaaagcagtattgaagaattatatacaaataatgaagcacatcgaaataatatagccaaccgggattttacctatctttttcttgacgatattattttttatcaacgccctctaaaaagtaaaaaatcgcttgttagtaactgtcctttcgaattcagatatttcaagaaagaagatggtactgttgaaaaaacaggtgtgaagtgtattgcaaaaagtcatcctttgtatcaagaattccggttattgcaatggttaaaaaacttgcgaattttcagtaaggaggacataaacgaggttgatatcacaaatgaactcttaccgacaacaactgacagagagaagctcttcgaatggttaaatgataagaccgaaattgatcaaaaatcatttttgaaatatgtcccatttaatctggaggaaagaattaaaatgagattgggagaaagacaatttcaactctttaagaaggacaaggagcaaggattggatacatattatcgctggaattatgtagaagataaaaaatatcctcttaatgaaacacgcggtgaaattctgaaaagattaaaaaaaacagggattgacgtcaacgtgttggacaaagatacagagacacatctctggcacatattatattctgtagaagataaagctgagattgagagtgctttaaattcatttgcaaagaaacacaatcttccagaagggttcgttaatgaattcaagaaatatccaagacttgacaaagaatatgggtcgtattcagccaaagcaattaaaaaagtattaccattgatgcgttttggcaaatggtgggatggagaggcgattgatgaattcacaagacaaaagatcgataagatattaaccggtgaatatgatgaaaaaataaaaaatcgcgtacgggaaaaagcagtcgacctaaaggaagaacaagatttccagaatcttcccttatggttagtgagttatattgtttataatcgccattccgaaacttctgatgttcaatattggaagaccgcacaagacattgaacttctaaaacaacattctttacggaatccaatagtagaacaaataatcaacgaaacattgcaaaccgttagggaaatttgggaatattatggagagggaaaagaaaagttttttgatgaaattcatgttgaactgggacgaagtctaaaagaaccagctgagaaacggaagaaggtttccgaaagaatcactgaaaatgaaaacaccaatattcggattaaatcgctactcgttgaattgtttaacgacgatgaaattgaaaatgttcgtccctactcacctatgcaacaagagatattgaaaatttacgaagaaggtgtttatcaaaatcctgatgtcacgtactcaatggtgagtgaatccgaaataaataaaatccgtaagaaaaaccagcccagttcttctgacataaaaaaatacaagttgtggcttgaacagggatatagatcaccctacaccggagtaataatacccttgtcaaaattattcactccagcctacgagattgagcatattataccaaaagctaaattttttgatgatagcctgagtaataagattatttgtgaatcggaagtaaactccctcaaagacaatcagcttgcttattcatttataaaaaataacagagaactaaagattgaattaagtcatgggaggtttgtaaccctgctctctccggaagcatatgaagcaaatgtaaagcgctattttggaaacaacagatccaaactaaggaaacttttactggaggagattcctgaagattttactgaaagacagctgaacgatacgagatatataagtannnnnnnnnnnnnnnnnnnnnnnnnnnnnnnnnnnnnnnnnnnnnnnnnnnnnnnnnnnnnnnnnnnnnnnnnnnnnnnnnnnnnnnnnnnnnnnnnnnnnnnnnnnnnnnnnnnnnnnnnnnnnnnnnnnnnnnnnnnnnnnnnntaagtaaagtagtaaaaacgctcttgtcgaatattgtacgcgaagaggacgaggaagaagctatcgccaagaatgttgttgcatctacgggtggagttactgccctgctaaaacaagattggggattaaatgatgtttggaatagccttataactcctcgttttgagcgattaaacagaatggcaggttgtgaaaagtatggttcctgggaaaataaaaatgggaaagtggtctttcaaattaacacaatagagcctgatttattgaagttaaacagaaagcgtatcgatcatcgacatcatgctctggacgcattggtggttgcatgtagtagccgcaaccacattaattatatcaataacgacaatgcaaacggaaaagataaatcaaagcccagacgttttgatttacggaatcaattaaggataattgaagaggaggaggtaaattcggtagtgaatggtgagctgcaaagaaaaagaataaaagtagcaaaagaatttcttaaaccttgggaatcattcactcaggacgcaaaagaggagctaaaccgtattgttgtcacttttaaaaagaataatcgtgtcattaacaaaacagtaaactattatcagaagtgggtaaaacaacctgatggaacaatgaaaaaagcttacgtcgaacaaacgaaaggtgaccactgggctattcgaaaacccttacataaagaaactgtttcagcgcttgtaaatcttcaaatgaaaaaaacagtaaatctatctgtagctttggacaattcaaaggatatcgttaacaaattattacgtaaaaaaattgacgaacttatatccgaaggattcgaaaaaaaacaaattcaaaaatactttaaagggttagataatagatgggcgggagaggatatatcgaaggttgatgtctataacttcaccaacgataaggagagtaccatgatcgctgcttccagggtaaaattagatgaaagtttcagtgagaaaaatatagaaagcattacggatacaggaatcagaaagatattgctcgcacatctcgaaaaatataaaggtttgttggatgaaaacggaaaccctgtcgctccggagacattggctttctcaccaaccgggattgaggagcttaataagaatattctcaatttaaacggagggaaaaaacatgctccaatatacaaagtaaggaaatttgaaaaatttggtgaaaaattcaatgtcggagtatctggaaacaaaaaacaaaaatttgttgaagcagctaagggtactaatctttttttcgcagtctatatcgatgaggatggtaaacggaactatgagacgataccattgaatgaagttgttgaacatcaaaaatggagagcaaccttaacaagacaagagaaagatattacgcccataattcctgtaaatagagagaaaggaaaattccttttctcactttctcctaatgatttggtttatatcccatctgttgaagaacttgcgaatccaggggaagtagattttaataatctagacaaaaatcaggtaaaaaggatttataaattcgtaagttgtacaggcaatcaagctttttttatacaaagccatgttgcatcaaatattgtgaacaattttgaattttctgcactcaataaaatggaaaaatcgattgaagatattatgataaaatcagtttgttggaagcttgaaacagatcgccttggaaacataattaaaatagttggggagggaataaaccggatgagttttcctgaccgaaatattctcgaagaatcgattgcatattcatattcaaatgaattacaggcattcatagatcaaaatgaggtgaatgagatagatgcagaaaaaattagtaagttatcgccaaaggagatcatttaagaaatgtagccaagctaagtaaacagattcaggaacgataataattgagtcaatgatcaaaaaaactctatatttcggtaatccggcttacctgagcctgcgaaacaaacagctaatagtaaaactaccggaggtcgaaaaaaatgattctattccagatgatttaaaaaaacaagctgagagatcgatccccgtggaggatattggcattataatccttgacaataagcggattacaataactcaaggtgtcattgaagcattgctggataacaattctgcactaattacttgtaatagtgaacgaatgccggtgggtttaatgttaccgctatcgggaaacaaaactcaaaccgagcgattccgagatcagattaacgcttctctacctttgaaaaaacagttatggcagcagacagtgcaggcgaaaatcagaaatcaagcttacgtattatcaagtaaaaataacgccattattgaaaatatgaaggtttgggctactgatgtaaagagtggcgatccagataattatgaagcacgggcagccgtatactattgggcaaatttattcaccgaaattgaaggtttctctcgtaatcgagagggaataccgccaaataatttgctaaactacggttatgcgattttgcgagctattgtcgcacgatctttggtcgcaagtggattactgcctacatttggtattcatcaccgaaataaatataatgcctattgtctggcagatgatatcatggagccatatcgtccttttgtggataaacttgtttgtaatattatggcagaagagacaaatattgaagaactatctcaggaaataaaattcagactgctcaacatcccggttcttgatgtaattattgatgatcaacgaagtccgttaatgattgccgttggacagacagctgcctctctctacaagtgtttttcagggactctccgaaaaataaaatatcctacattcgaataaactgcaaaatgaatcggtttagtgaatatagaattatgtggattttagttttttttgatttacctactgaaacaaaaaaagatagaaaaatctatgcgactttccgtaaaaaacttattcaggacggttttaccatgtttcaattttcaatttatcttcgacattgtgcaagtcgagaaaatgctgaagtgcatataaagcgcgtaaaaagttttttaccacctgcaggagagattggcattctttgtataactgacaaacaatttgccaatattgagttgtttgttggaaaaaaagaaaaagaggttcatacaccctatcagcaattagaattattttagggtaagcattcggtgtagaccgtcaaattttaatttttgaacatttctatatt

SEQ ID NO: 1427 - DNA, 11649 bp, synthetic construct
  source 1..11649: mol_type = other DNA
  misc_feature 1..11649: note = Synthetic
gatgctggctgaattccagcaatcttgtccggatttgttgaaagatggaaaaaagattccttacgactggaccttatattatctgcgtaagaaagcactctcggctccggtcggaaaagaagagttggcttggatcctgttgaacttcaatcagaagcgtggatattatcagttacggagtgaagaagaggtagaagatacaaagaagcaagtggaataccatgctttgcgcgtggtttcggtggaagctacgggtgaatcaaaaggcaaggataaatggtataatgtttatctggagaacggatggatataccgcagagcaggcagtatgcctttagactgggcagggaaagtgaaagagtttgtggtcactactgaactggatgatcagggaaatcctaaactgaataaggatggagaagtgaagcgctctttccgggctcctaaagaggatgactggggattgctgaaagcccgtactcagaacctgatagatagtagtggaaaaacagtgggaacttatatatatgattccctgttgaccaatcctggtctgaaggtaagaggaaaactggttagtaccattgaacggaaatattataaggatgagttgtatcagattcttgacaagcaggcagagtttcatccggaattgaaggactccgctctgttgacagagtgtctgttagaactttatccccaaaatgaaccccacaggaatgtacgctcttcttctgattttgtgcattttctgattgaagatatcttattttatcagcgaccgctcaagagtcagaaatcgcagatagaagactgtccttatgaatcaagagtttatcggaaagctgatggaactttgtgtcgtattcctttgaaatgcgtatcaaaatcccatcctttatttcaagagttccgtttatggcagttcatcgcaaatcttcgtatttacgaacgtgaaaaatcgtaaacggttctttgaaaacagacgtagatgtgacttctgaatttttaaaggatgaagcggactatgcggcactgtttgacagcctgagtaaaaaagcggaaattacgcagaaaaccttcttggcagagccggtgctgaatttggataaaaaaagacgggatgcttaccggtggaattacgtggaagataaaacttatccgtgtaatacaactcatgccgatatggttgcccgtttaagaaaagcaggaatcagtgaagatgtactgacggctgatatggagttgagtttgtggcatattttatactctatatcagataaaaaagaactgaccaaagcgctgaccaagtttgcttcccaacgacacttgggagacgcctttgttgctgagtttgagaaaatgcctccgtatgcgagtgattacgcctcatattcgttgaaagcaatccggaaattacttccacttatgcgtatggggcattattggcaggaagaggcaatagatcctctcactcggaaccgtatcgagaaactgctgacgggagaatgggatgagaaaatccatcttcgggtacgtgagaaatccatgcatctgacggaactgtcttcattccgggggctaccgctctggctggcctgttacatcgtttacgaccgtcatgcagaagcaagggaaataacaagatgggaaaatccaggagcaatagatgatttcttggctgaattcagacaacattccttgcgtaatccgattgtcgaacaggtaattatggagacattgcgtgtagtgcgtgatgtctggaagcaggaaggaagaattgatgagattcatgtagagatggggcgtgaaatgaaaaatcctgcggataagcggaaaaaaatgacggcacaagctctggaaaatgaatataccaatctccgtattaaagccctgcttactgagttcctgaatcctgagttcggaatagaaaatgtacgtccgtattcaccggcacagcaggaaattctcagaatatatgaagaaggggttctggctgagacttcagataaggatcttccttctgatatagctgacatcttgaagaaattcaaggaagagcggattgagaaacgtccttcccgttcggaggtgcaacgttataagatgtggttggagcaaaagtatcgttcgccttatacaggcaaaccgatacctttgggaaaactgtttactcctgcttatgaaatagagcacgtaataccgcaatcccgttattttgacgattcgtacaccaataaagtgatttgtgaggctgcggtaaataagctgaaaggaaatctgctgggctatgagtttatcaagcgccatcatggtgaagtagtggaactcgggggaggtgaatcggtctcaattttctcggtggcggcttacgagcagttcgtgaaagaacattatgccaataatcggataaagaaggaaaaattattgatggaagatatccctgacggtttcattgagcgtcagttgaatgacagccgttatataagtcgtgtagtcaaatccttgctttccaatatcgtaagggaagaaggtgaacaggaaagcacatccaaaaatgtcatcgtctgtacgggcggtgttactgacagattgaaaaaggattggggaatgggggatgtgtggaatcagattattcttcctcgtttccggcgtatgaataaactgacggactcgaaggattatactgcaatttctcttaatggtaatttgataccagccgttcctttagcactccagaaagggtttagcaaaaaacgcattgaccatcgtcatcatgcaatggatgcgattgtgattgcttgtgcaaaccgtaatattgtcaattatctgaataatgcgtcggctttgtcagaggctcgtacagcgcggactgacttgcagcgcctgctgtgcgacaaaaagaagacagatgcgaacggcaactaccagtggctgattcgtaagccatgggatacttttacgcaggatgcttatcaggtcttgcaagatattgttgtcagctttaagcagaatttgcgtgtgataaaccgtacgaccaattattatcagcgttatgatgagagtggcaagaaagtatatgttccacagactggaggagacagttgggctatccgtaaaccgcttcataaggatactgtttacggtgaggtcaatttgagaagagaaaaaacggttgctctaaaagatgtattgaaaatgccggaaaggattgtagataagtcttttaaatataagttgaaagaattgcttgcacaacagtatggtgtaaaggaaatttcggcatattttgagaaaaataagtcagactggcctgatattgacctaaagaaaataaaagtgtattattttaccggtgagacgaaagaccgtttctttgctacccgaaagcctttagaggattcttttgaccaaaagaaaattgagaatggggttacggacacgggaattcagaagattctggtcaatcatttgctgcagaatggcaataatgcggagttagctttttctccagatggaatagaagccatgaatttgcatattgcctcgttgaacggaggtaagccgcatcagccgatttataaggtccgtgtatatgaaaagggagataaatttgctgtaggagataaaggcaataaatacaaaaaatttgtagaagcggctaaaggaaccaatttgttttttgcggtttatgaatatccccagatagataaggagacagggcaggtgagccgtaaaaggtcctttgcctcagttccgttgaaccaggtgattgaccgtctgaaacggggattgtctcctgcacctgaagacgaaaagggaaatgctccagcgtttgtgttgtctcccaatgatttggtttatttgcctacaaaagaggaacgtgaaaaaggtgtaatagaatcagtcttggataagagccggatttataagatggttagttgtacaggaaatgaaggctattttataccttgcaatatatcttctccgatagctcctgttatagaattgggtagcaataataaggcacaacggtcttggacagatgatatgattaaagaggtttgtattcctataggggttgatcggttggggaacatcttgttgcataaataatttgtgatactatgattaaaaaaacactgtattttggaaatcctgcttatttgtcactccagaataaccagttagtaataaaacttccggaagtggagcgtaatgcttcactcccggatagcttcaaaaagcagacggtagtcactaaacccatagaggacatcggactcgtagtattggataataatcagattaccattacctcaggagttttagaagctttattggaaaacaattgcagtataattacttgtgacagtaaaagtatgcctgttggattaatgcttcctctatatgggaatacggttcaaaatgaacggttcagggaacaactttcagcttctctccctttaaaaaaacaattgtggcagcagacgattaaagctaagattgaaaatcagtctgctgtgctgataaactgtttaggagaggaaagcagatgtatgaaggtctgggctgatgatgtaaaaagcggagattcggaaaatctggaggctagggcggctgcgtattattggaaaactttgtttgctgatattgatgggtttactcgtgatagggaaggaatatctcctaataatctattgaattatggatatgctgtgttacgtgcaatcatagcacgggcacttgtatccagtggcttacttcctactttaggcattcatcatcataatcggtataatgcatattgtctggccgatgacataatggagccgtatcgtccttatgtagatgagttggtttttggcttggtacaacaatatggaaagaatcttgaactgacaagagatattaaagcgaaacttttgacgattcctacgttagatgtcataataagtgggaaaagaagtcctttgatgattgccgcaagtcagacaactgcttcgctgtataaatgttttagtggggagttgcgcagaattgtttacccggaaaaataatttatggacaggtttagtgaatatcgtattatgtgggttcttgtattcttcgatttgccaacggatactaaaaaagataggaaggctcatgcactctttcgtaagaatctgcaaaaggatggctttaccatgtttcagttttcaatatatattcgtcattgtgcgagtatggaaaatgcttcagtgcatattaaaagagtgaaatcgtttttgcctgaatatgggcaagtaggtattatgtgtattactgataaacagtttggtcaaatagaactgttttatgggaagaaaatacaggaacctaatgctccagggcaacaacttgaattgttttaaatataaaaaatcccattcgatgtgagtgggatttttttataggaaacgtttttttatttctatgttataatgtaatattttggaaatcagtggaaaataacgagtctgctgtttcctatattacaaaggtactaaaatgagagcaaatcacaacgaagttaataaatcaattttacggtacaagaccgtcttttactattgaaggtacaaccaagaatgcataggagttaatctactttcttggttgtacaaaaggtcctgtttctggtattgtcaacgaatcagcttactccttcagcttatacattttcacccagtcaacctccatcttgacaggatattctttcgggtcggctttacctacccacgtaccttctatctgcatgtcaataagcaggtagtaaggagttccaaacgggtattgtcctttcttgtcggtttcaatcttgggataagtaaaggtatgattcccatttatggagaacaccagactgtcgggaagtatctccacggcatatacattatatccgtcgggatcaatcttaccgattccaccttgtttgggattatctttgtgcttcagtacaaatgtgtaatatgaatgaactgtctgataggcaatcgagtcatggttcagacgttccataatatcgatttctcctccatccggccatttgccttcgttcggaagcatccagatggccggccaggcccctttagccccttgaagccgggcttttacttccaccttgccgtatgtgatggttttcttgtctttagtatatactccgccggttatgtagcgtgccgtgtcttccggtgctattccgtcatttaccaccccgtgcaggatcatattgcttttgttcacctcatataggctggggtgtgaagacatgtggcggtcccagtcagacccgccgcgcggtattttggtccagtatttgtcatttatcttttttccacggaaattttctttccagacaagtttgtactgcggttgctgtgcaaaaagatctgctgttgaggctacggcaaacagcaacatagccgccaatgtgattttgctaaaatgtctcatatgatccaatgtattttaaatgtatgttttaaagtaatccaactccctcaggtaatgaggcaataaaaatctttccatatgattcagatatggccagtatggaaagcgaagataaagatactaaaatggaagtaaactgcaatacgtttccttgcactttaaaactatggggcaatgtgcgaggagagaatgaccggatgtaaatgaaaaaagacctttttcggaacaaaattggtatattttttagggatgtgtgaatgcccgtaaaataatattctaaaattgaaatctttttgtcaacttatttgttattatagtgtaaggggataaaaaccagtgagatatggctggagtctttcgggtaagcttcttcccgaaaggtgatatagaagatggtgcatagaacctgacaaaaagcagaataaaagaagttgacgtctcagaatttacctgcaaagagtgaaatcttaatttaacagtttaatcaatcaaaattaatcaatcaaacaatttaaggacttagtgtaaagtaggggaaaggtatgttaataaagagtaaaatgtgaatttaaacccttttgcttatagtctgttaacacgattttttttctcttattattagtaaactacgaacagaatagttatggaaatagataaagaaacattcaataatagcttccgttactattaccgtccgttgtgtatgtatgccttgcattacataaaagacgtggatagtgcagaagatattgtacaagattgcttcgccgaggtttgggaaagaaaagacaatttggaagaagtttccaatatgagagcttatctgtacgccatggttcggaataaatgcagtcattttctcaaggaaaaatcaaaattggaaacgacaggtgacgatatcgtggacttggagggtgagattagtgatgaggactacgaagaacgttcttttatcgaagccaggatgcttacagccattgattcgcttccggaaagatgcaaggaggcacttttgttgtcaagaagagacggactgaaacacgaggaaattgcgaaatgcatgtcggtttcggtcaacacagtaaagaatcatataaacaaagcattgaagattataaaggaaagtagatataaaatgtatttctttgtcctgggataagatttcgggacaatgtgtggacggaagaataaatattcttgtaactttaagataattatagtataaacgaaatatgtggtaatgatgaaggatttggaagataaaagtttgcagtttgttttggataattacaaaaaaggaatgtttgacacccgtaaggctttggagaagattaccaaagaaaagccagttaagcagtcaagaaatttgtttatgtattatgcatcggggcttgtagcttctgtattgatattggtgggaggatatgtgttcttcaggacctccgaagaactggctaccaatatcgtatcgagcaatgaggtggtgcgatgcatacttcccgacagtacggtagtgatattggctcccggctctacgctgagttatctgcccgaagatttcgaagagaaaaaccggaatgtgaagatgaagggcaaggcttatttttctgtgaccagagacaagaaatctcctttcctggtatacggacagcattcggctaccaaagtgctgggaaccaagttccagatcaatgaacagcgccctgactccattacggaaatctatgtggtatcgggacaggtatatttctcgtctttgctgaaagaaggcgaaggacttgtcctgaccaagggcatggaggctgcgctggcattcaatgaaagcaagccccggattaccgaaccttctactttgaacccctcggcctgggcagagaatgtatttgtgtacaacgatgctccggtgatggatgtactgaaagaattgtccgacttttttggagtgaagcttgccacttcggaaacggacaagaaaataaccgctgaattcagagcagatgatttggacaatattctggaaattatggaaaaaacattggaagtaaaaataaaaaaagaataaagaggaacttatgaatgggaatatgggtgtgtagactccttgtgctgatgacattgttctcaaagatataccaactccccgcccaacagagcgggaccacaatcaggacggctatcgaaatgctgaagaagaaatattcggtaatgttcgtatacgattcttcgattgatttggatatagcgtatgaagaaaaggatctggcagggaaggatttaaaaggggtactgaaagagatattttccaaaacagacataaaatatgagataaaagacagttatgtgctgctcaataagatcaagaaatatacgttgagcggctatgtgtatcaggacagtggtgagaccgtaatcaatgcaactgtatttgatgtcaataccaagaccggaacgctgacgaacgaacacggcttctacagcatgatgctgcgggaggggatacatcggatcagggtttcgtatatcggtacgggtgagactacgctggatatcgacctgagaggaaaccgggtggaaacgttctttctgaagtcgggatataagttgggagaagtggtggttaccaccgacctgaattctcccctgaatgtagcccagaccggaaaggtctccattaaggccgaggattttgaacggggagtatattttatgaattctcccgatgtggtgagtacgctgcataatatgtcgggtattgcttccggtgccgaaccggtatcgggactctatgtacacggaggagaccatgacgagaacctggttctgttggacggggcaccgttgtatcatgtgaaccatatgggaggactgttttcggcattcaatacggatgtggtgaaaaacgtggatttctataaaagtgctttcccggccagatacggaggacggttgtcttcggtactggatgtgcgtacgcgcgacggaagcatgcatgagtttcgtggcaaactgtctctgggactgatggacggaaggttgcagctggaaggaccgattgtgaaaaatacgacttccttcaatatcgggatacggcgtacctggctggaaattgtgaagatgccctggctggagatgattaataccaaacaggagggagatacggagacaaagtatctgtttcatgatatcaacgcaaaggtttcgcacattttttcagagaaaagcagagccaatatctgtttttactccggccatgattacgcaagtatagatggaggatgagacagaaacgagggtagagtatgataagtttcatgtaagatgggggagtgttacggcatcggccaactgggaatatatttattcacagaaactgttcgtcaatctgaccggggtgtatacgcacaattcttcaaagttttatcatcggaaccagctttattttactggcagtggggcagcgcagcagagggcggaggaagtgaaaaataatttctctaccattgatgacctgggatacagactggaatttgactacagtccgaatacccggaaccgcttgcgattcggctccaattacatgaaccattgtctgcgtccgcaggattttaccgtaactgtttcggggaatgagagctccggacagaaagggggagaacagcctgaaacgagggtcgcatacagaggcaatgagtttacgctgtttgtagaagatgaaatcatgctggaccggaaggtgaaaatgaatgccggaatgtactacagcctgtttgtaatagacgggaagaacttccgttcgctggaaccccgtctgtcattgaattaccggatagactgttcgacttcattcaaggcttctgtcacgaagatgagtcagtatatgcaccgtttgtcgagtacttacctgaatatgccgaccgattgctggataccttctaccgccaggaccggatattcttactcctggcagttggctgcaggcctgtatcacaggtttccagcacacgtaagcatgaaactggaaggtttttacaagatcatgaacaacctgattgagtacagtggcaccaaccggctgaacccttcggctgtcgactgggaagacaatatcagccggggccagggaaagtcgtatggcattgagtatgacgtggtatatgataataagcgggcttacctgaatctgtcgtatacactttcgtggaacagacgtttttttccggattttcatgaaacatggttttatgaccgttttgacaaccggcacaaactgaatgtttccctcaattacaaactgggaaaatacctggatctgtatgctttgtggcgcttccatagcggaaaccgatttacgcttccgcagcaggtgattgatgcaccggtgattccgggaagcactgccgataatacagcactgctggtgtatgatgtacccaacaatgcgctgctgccggcatatcataaactggactgcggagtacgctttaaggtgcagttgaaaaacggggtggaacagacttgggacctggcagtctataatgcctacggcagacggaatgccttttatgcagagcaggtccgcaaagaggacggaagcatggcgtggagaaccgtaggagcctttcctcttcttccgtcattttgttataccgtaaaattttagtcacgtaaaaaatgaaaaaactgtgggccggctacttgctggcagcttgtgtagtggggagctcctgtgatggagaagttaccatcaaggggactgaaggtgagcagaaacctgtgctgtattgtttcccttctaatctgagtgatacgacatttatccgtttctcatggagtaagtcggtcaatgggaacgaagggatcaatagaggcagggaaggggtcggcatttctttctggctgaatggtgaggagaggaaggtgacgtctgtcgtatctgatacacagtccggaggttctttttttgtattgggaagactggaggagggagatgatatctcggtcagggtaaagcttccggatggaaaaacggtgtctgccgctacggaggttccttcgccttttcctttagaaaaggtaagaatcaaagaggtggaagcttatgggaccagggcggtcaggtttgaggttaccttgcaggaccgccgtactacggaagattattacggggtaaag

SEQ ID NO: 1428 - DNA, 11449 bp, synthetic construct
  source 1..11449: mol_type = other DNA
  misc_feature 1..11449: note = Synthetic
caatgaacaagcgtgaagtagttgtgaacatcggttacaaatcagacggtatcattcctctgaatgaattccgttacaatcctgacttgaaagtaggtgataccgtagaagtatacatcgaaaatcaggaggacaaaaaaggacagttggttctgtctcaccgtaaagctcgtgctacccgttcttgggaccgtgtcaacacagctttggaaaacgaagaaattatcaagggattcatcaagtgccgcacaaagggtggtatgattgtagacgtattcggtatcgaagctttcttgccgggttcgcaaatcgacgtgaagcctatccgcgactacgatgtattcgttggcaaaacaatggaattcaaggttgttaaaatcaatcaggaattcaagaatgtggttgtttctcacaaggctcttatcgaagccgaactggaacaacagaagaaagaaattatcagcaaactcgaaaagggacaagtgctcgaaggtactgtcaagaatatcacttcctatggtgtatttatcgacttgggcggcgtagacggtttgattcacatcaccgacctttcttggggccgtgtcagcgatccgaaagaagtggtggaactggatcagaaactcaacgttgttatcctggactttgatgatgagaagaagcgtatcgctctcggtctgaagcaactcactccgcatccttgggacgctcttgatcctaacttgaaggtaggcgatcacgtaaacggtaaggtagtcgttatggctgactacggtgcgtttatcgaaatcgctccgggcgttgagggattgattcacgtatctgaaatgtcttggagccagcacttgcgttctgcacaagacttcatgaaggtgggtgacgaagttgaggctgttgtcctgactctggaccgcgaagaacgtaagatgtctttgggtatcaaacaactgaaggctgatccgtgggaaactatcgaagagaaatatcctctcggttctaagcatacggctaaggttcgcaacttcactaacttcggtgtattcgttgaaatcgaagaaggtgttgacggcttgattcacatctccgacctgtcttggacgaagaaagtgaaacatccttcagagttcactcagattggtgccgacatcgacgtacaggtattggaaatcgacaaggaaaaccgtcgcttgagcctgggtcacaagcaacttgaagaaaatccttgggatgtattcgaaactgtattcacagtaggttctgtacacgaaggtactatcatcgaaatgctggataagggtgctgttgttgctctgccttatggtgtagaaggtttcgctactccgaaacacctagttaaggaagacggttcacaagctcagttggatgagaaactggaattcaaggttatcgagttcaacaaggacgctaagcgcatcatcctttctcacagccgtatcttcgaagatgctgccaaggcagaagaaagagcagagaagaaggcttctaagaagtctgccggaaagaaagaagaaactgcttctatccagaatcaggctgcttctactactctgggcgatatcgacgctctggctgctctgaaagaacagatggaagccggaaagaagtaattaattgctttccctatataaataaggaagggcgcttgtgtggacaggcgccctttcttatttctttttgttgatagattttgacggaataagaggcggttcttcattttatgcttatctttgcaccgcgggaaagggtaatgggaatttctgttactattcttgcagaatatgagtcaataacttaattaaaatgcactatgcaaaatttcatcaaaacctcaggtaaagttatgctgttagcttgtatggcactaatgttgcttaccgcttgcagccaaaaatccaaacttaaattagcgattgaagcagcaagtaagcaatgtcctatgagcatgggaacggccggtgaggtcaccgacattgacttcgatggtaaggacgtgatttattcgttgtcaatgaatgaagattatgtcaacctggatgcgttggaaaagaaccctgctgccatgaagtcgggtgtgactgccatgttcaataatccgaaaggtgaaatcaaaacattgctggagttgatggtggcatccgaagcgggtgtgaagtatcgctataaagggcaaacttcgggaaaagaaatagaattctatctgagtacggaagatttgaaagatcttctgaataaggatatgagtcaggaagagagcgaccggaagaaactggaagaactggtgaacgtgacgaacgtttcctgtccgacgagagtggatgaaactacggttctcgacaacttgactatcgaatcggataatgtggtttataactatacggttgatgaaaaggctgtcgatatggatactatggaagagaacctggaagcgatgaagcagagcataaaaggggctttgaatgtaggtgatcccgctatcaagacgttcttgcaagcctgtgcagcggataataagaatttagtctaccgatacaaaggtgatacttccggtaaaacagtggactgtgtattggaggtttccgagataaaggaaatgttgtaaaacgacagtaggattatcctgttttcattcatggataaatttgagttgcacatactgggttgtgggtcggcgttgcccacaacccgtcattttcctacctcgcaaatcgtgaacgtgcgcgataaactgtttatgattgactgtggggaaggggcgcaattgcaattccgcaaatcacgcctgaagttttcgcggctgaacactattttcatttcccacctgcatggcgaccactgtttcggactgctgggactgatatccacactcaacctgctggggcgtacggcagagctgcacatttactctccgaaagggctggaagaactgatgactcccatgctggatttcttcaatcatcagatgacgtataaagtgcttttccatgagtttgaaaccaaagagcagtcgttgatttatgaggaccgctccattaccgtaaccaccattccccttcgccaccggatgccttgctgcggcttcttgtttgccgagaagcaacgccccaaccatatcttgcgcgacatggtagacttctatcaagtacccgtctacgagttgaaccgcataaagaacggagccgattatgtaacgcctgaaggtgaagtaatccccaacaaccgtctgacacgtccttccaatccgccccgccgttacgcctattgttccgataccctgtatctgccttccattgtggaacaaataaaaggtgtcgacctgctgttccatgaagcgacctttgccgaagaagatgcgccgcgtgccaaagaaacattccataccaccgcctctcaagccgcgcaaatagcccgggatgcggaagtaaaaaaactgctgataggccatttctctgcccgttatgatgacgaaaccctcttgctggaagaagcgcgggctatctttacggctacgcaacttgctaaagaaacgctttgcgtatcggtatgaattaaacttttcctatctttgcctgtctaaagaaacaaacatgaacagatatttatgaacccttcttataacgaacgcgaggtgttggcacttttgcaggatcaaagtacgcagaagcggggattcgaattgattgtgggacagtatagcgaacagctttactggcaaatccgccgtatggtactctcccacgaagatgcaaacgacctgcttcagaacacttttatcaaagcatggatgaacatcggatatttccgggcggaggcgaggctctccacctggctgtatcgaatcgccttgaacgaatgccttactttcctgaacaagcagcgggctacgtcgaccgtctcgctggatgaccccgaagccgatgcgcttcagaagctggagagcgacccctatttctctggcgataaagcgcagatggcgttgcagaaagccttgctcagtttgcccgaaaagcagcggatggtcttcaacctgaaatactatcaggagatgaaatacgagcagatgtccgatatcttcgggacaacggtaggagcgctgaaagcatcctatcatcatgcggtgaagaaaatcgaaaagattttgggcgaagaagattaaaccattaacctgaaaaagtgtctaactaaacagagaggagagcagaacttatgaaagaagaagataatatactcaagaaagtgggaacggaaaatgctttccgcgtgcccgacggatattttgagaatctgacttcggagattatgaatcggctgcccgagaaagaggacccggttctcgaaaagaaagaatctacgatgtgggatcgcgtcaaaccgtgggtatacatggccgccatgtttgtcggtgcggctttgattatccgggttgcttcttcagaccgtacgcctgccgcggatcgcatggctaccgacgatacggatacggagatagaatatatcagtacggttttagacaactcgatgatggatgattattccttatatgtctaccttgcagatgctgaagcagagtgagacaagaacttaacagaatgaaaagaacaatgaaaaagctaatcattttattttttatggtttgtggcgtgatgcctttacttcaagctgccgatggttgtgaccaacgcttgactcaagaagaattccgcgctaaacagaaagtctatatcacggaaaaagccggcttgaccaaagaggaagctgcgaaattctttcccctgtattttgatttgcaggataagaagaagcaactgaatgacgaagcgtggggcttgattcggaaaggcaagaacgaaaacactaccgaagctcagtacgaagaaattatggaaggtgtttatgatgcccgcatcgcttccgaccgtttggaaaagacttactttgataaattcaagaaaatattgtcttgtaagaagctttatctgatacagagggcagaaatgagatttcatagggaattattgaagggtatgaataagaaaggggatgcgcctgcaaggaaaccgcaacaagggcggaaataaatagagaatgaattacagataaaggaaggttgccacaggaatgtgagcagcctttttttgttataggtaaatggaatggttctgatggataactcccgaaatctcttgcagtaataagaaataaaaaatcccccgttataggacgagggaacctaatgttttcacaacggaataatccttattgtgatttgcttacattttagttctgcaaaggtaatgaataattttggaaaaaagaatgatgaaagaaaaataaatgttacatttggaagaaatacacaaatagaataaatcataatacgcatgaaaacaatattaggattggacttaggaacgaatagcattggttgggccgtaataaattcgacaattgaagaagaagtaaagaaggtttggatatcattggtgggaagtagaattataccgatggacgctgccatattaggagattttgataagggaaactccatctcgcagactgcggaaagaacccgttttagaggagtgcgtcgattgcgagaacgccaattgctacgccgtgaacgcttgcataaagtcttgaaggttttaggttttttaccgtcacattatttaaaagaaattgattttgagaaacatccggggaaattccaggcaaatgcagaaccaaagttagcatggataaagaatgaacaggggaagtctgtatttttgtttcaagcgtcctttaatgaaatgttgacggattttgcaaagtatcaacctgcgttagtctctgaaggtaaaaaagttccctatgactggacgatttattacctccgtaagaaagctttaaccgaaatgataagtaaagaagaattggcttggattcttttaaactttaatcagaagcgtggatattatcagctcagaggagaagaagaggaagatagcgcgggaaagttggttgaatatcacgaattgaaagtcgtatcagtagaagctaccggtgaaaagaaaggtcaggatatgtggtataatgttcatttggagaatggatggatatatcgcagaagcagtaatataccattgaattgggagggtcagacaaaagagtttatcgtgactacggatatcaatgcggatggctctcctaaacttgataaattcggggaagtgaaacgttctttcagagctccgaaagaagatgactggatgctgatgaaaaaacgcacagaagcagacattgcgaattcccgtaaaacggtcggaagctatatttatgataccttgttgcagaaaccgcaacaaaaaataataggaaaactggtgagaacagtggaacgtaagttttacgaggaagaattacgtttgattttgcagaaacaatgtgcatttcatgccgagttgcaggataggaatttgtataagacatgtgttgaagcgctgtatcctgccaatgaagtacatcgtaagaatatagctaaccgggattttgtctatttactgatgaatgatatattgttttatcaaagacctttgaaaagcaaaaagtcgttgattgataactgtccttatgaagagaatgaatatacagacagagaaacgggggaaattaaaaaggctcctttgaaatgtatagccaagtcgcatcctctttttcaggagtttaggttatggcatttcctttcctctctccgaatatatcaaaaggaaaaagaggtgaatgggagcttgcatacagatgtggatgtgacggcggaatttttgaaaacagagaatgactataccgctttatttgattggctgaattcccgaaaagaaatagatcaaaaagcttttctgaagtatccggagtttggattgaaaaagattgcggataattaccggtggaattatgttgaagataaagcctatccttgcaatgagacccgaaatgcgattcttacccgtttggcaaaagcgggtgttagtgccgagttcttgtcttttgagaaagaagtcgctttgtggcatattttatattctgtaagtgataagcaggaaatagagaaagcactaaaaacctttgcagacaagaatggattggatgaagcttttgtagaggcatttaaaaagtttccgccttttaaagcagaatacggggcttattccgccaaggctataaaaaaattattgcctttgatgaggtgtggtaagtattgggatgcggatctgattgatgataaaacaaaaaagagaatcgaaaaaatactcgcaggtgagtttgatgaaaaaataagtgtcagggttagagagaaggcaataagtctttcggatatatcatgctttaaagggcttccgttatggttggcttgttatatagtgtatgaccggcattctgaagtgaaagacataacaaaatgggaaactccggctgacatagatgcttatttgaagacctttaagcaacattcgttacgcaatcctattgtggaacaggtaataactgaaacattgagagttgttcgggacatctggaagcgtgtcgggaaaataggtgagattcacattgaactgggacgtgagatgaaaaatccggcagataaacggaaaaggatgacggcacaaatcttggaaaatgaaaatgccaatttgcgtataaaagcgttgcttgcggaatttataaatccggagtatgaagtggagaatgttcgtccttattcacccagtcagcaagaaatactccggatttatgaggatacagttttgaaggcagaagaacagataccggattatattgatgatatattgaagaaattcaatactagcaatttgccttctaaatcagaaatattacgctataaattatggttggaacaaaaatatcgttcaccttatacgggagagatgatacctttggggaaattgtttacttctgcctatgaaatcgagcatattattcctcaatcccgttattttgacgattcattctctaataaggtgatatgtgagtcagctgtaaataagttgaaagataatcaactggggcatgagtttattaaagaacatcatggtgagattgtggatgttggttttggaaaaaaggtagaaatattttctttagagaaatatgaaaagtttgtgaaagatcactattccaaatctgtcatgaaaatgaagaaattgctgatggatgatattcctgaacaattcatagaacgtcagttgaatgatagtcgctacataagtaaggttattaaagggcttttatcgaatattgtgcgtgaaaaaaatgagaatggcgaatatgaacaggaacctgtttccaagaatatagtggtttgtacgggaagtgtaacggatagactgaaaaaggattggggaatgaatgatgtgtggaatagcattgtatatcctcgttttgaacgtctgaatactttaaccggtactcaacgttttggacattgggagaataaagagggtaagaaagtctttcagacggaactgcctcttgaatatcaaaaaggatttagcaagaaacgcattgaccaccggcaccatgccatggatgccatcgtaatagcttgtgctacccgcaatcatgtaaactacttgaataatgaatcagcgagccggaacgctaaaatctctcgttatgatttgcagagacgattatgcgataagagtagaatagatgagaatggtaactatagatggattataaagaaaccatgggatacttttactcaagatgcaaaggatgcattaagtggaatagtggtcagcttaaaaccgaatttgcgcgttataaataagacaactaacgtttatcagcattttgataatgacggcaatcgtgtttatgagaagcaaaaagtgggtgacagttgggcgattcgtaaaccgatgcacaaagatacagtctttggagcggtaaatttgagaaagataaaaacggtacgattatctgctgccttggatattcccacgatgattgtagataagaaactaaaaagtaaagttttggagttgctatcatataaatatgataagaagagaattgataggtattttaaagaaaatgcgcacttgtggaaagatttggatatggctaaagttgtggtctattatttcaccgaaaactcttctgaacctttagttgctgtacgcaagccgcttgatactagtttcaatgagaagaagataaaggaatcggtaacggatacaggtatacagaaaatacttctgaatcatttgaattctaaaaacggaaaggctgacttggctttttcggcggaaggcatagacgaaatgaatcgtaatcttatacaactgaatgatggcaagaaacatcagccaatatataaggtaagagtgtctgagccgcggggcaataaatttagtgtcggagcatccggaaataaaaaggataaatttgttgaggctgctaaaggtactaatttgttttttgctatctatttagcggaagctggaaaacgaacttatgaaactattcctttaaatattgctattgagcgggagaaacaaggactgactcctgttccagacaaaaatgaaaatggagataagttattgttttggttatcacctaatgatttggtctatttaccaactgaggaagaacgggaatttggaaggataaatgaaccgatagataggacgagaatttataagatggtatcatcctctggtaaccaatgtttcttcattccccaaagtatttcaaacgtgattattcctactgtggaattgggggctaataacaaagctgaaaagtcgtggaatggtgaaatgataaagagtatttgtatacctattaaggttgatcggttaggaaatatagtggaaataaagatgttacagtgaactataaaggctctttataactaacttttaaggaaaaagagaaagataataaaatttgaatgccatgattaagaaaacactttattttggaaatcccgtttatttgtctttgaagaacgctcagttagtgattaaatttcctgaggtggtcaagagctctgttttgcctgaaagttttaagcaaagttctgaaataagcaagccgattgaggatattggagtgctggtattggataatagacagattactatcacttcaggagtattggaggctttacttgaaaacaattgtgcaatcataacgtgtgacagtaaaagtatgccggttggtttgatgcttcctttatatggaaatactacgcaaaatgagagattcaggcagcagctaaatgcttctttgcctttgatgaagcagctttggcagcaaacgataaaagcaaagatagaaaaccaagccgtggtattgaaagagtgtgccggagaagaagtaagatgtatgaaggcatgggccgctgatgtgaaaagcggagattcggataatttagaggcccgtgctgccgcctattattggaaaaatctgtttaagatagaaggattcacaagggatagggaggggataccgcctaataatttgttgaattatggctatgctattctacgtgctgttgttgcccgtggattggtaacaagcggacttttacctactctcgggattcatcatcataatcgttataacgcttattgtctggcagatgatataatggagccatatcgtccttatgtcgaccgattggtgtatggaatcgtccaaaatggttatgattatactgaattgactaaagaattgaaagcacagttgctggctattcctacattggaaacaaacatttcaggaaagcgtagtccattaatggtagctgttggacaaactacagcttccctatataaatgttttagtggtgagttgcgtaaaatatcttatccggagatgtaatggaccgattcagtgaatatcgtattatgtgggtacttgtattgtttgatttgcctaccgagacgaagaaagagaaaaaggcgtatgtggactttaggaagaatcttcaaagagatggattcacaatgttccaattctctatatatgtgcgtcattgtgctagcagtgagaatgcagaggtgcacataaaaagggtcaaatcgtttcttcctgaacatggaaatgttgggattatgtgcatcacagataaacagttcggaagtattgagcttttttatgggaaaaagacaatggatgtgagtactccggggcagcagctagagttattctaaaagaaaatcccactaaaacagtgggattttcttttagaaccaacgtctttttttagggatattcagtaaattccgtatttaaccattctttgaagagcaaatttctttttccaatagagcttgctcttcattttttatcaatttcctatttcttgagtaaaaagtaaaaaattagggtataaagagtgggagaagattaa

SEQ ID NO: 1429 - DNA, 11443 bp, synthetic construct
  source 1..11443: mol_type = other DNA
  misc_feature 1..11443: note = Synthetic
aacagggtttcaaaccctgttaggggttctgtttcaaccatgagcaacttctgcaaatttgtcggggaatgattgtgcatgatatattaatgtatatttttggggcatttttgtagggggattctgtttctttcatacacaatcatttaatcctgaatatcgcaatgacgtaccttaaattcgacaagaatctaatgaccaacctggaagagtcgctcacgcgggaagtgcttcgcacgaaccggaagggggcgtatcacaataccacggtggtcggctgtaatacacggaaatatcacgggttgcttgtcatgcctattccttcgctgggggaggacaactatgtgatgctgtcttcgtttgacgagacggtgattcagcataaggcggagtttaacctggggctgcacaagtacgaggggaaacatttcagtcccaacgggcataagtatgtgcgggaatatacgtcggagactataccgcgcacgatgtaccgcgtcggcggggtgattctgtcgaaagagaagaccttctgctcctttgagaacaggattatgattaaatatacgctggacgaggcacattcggcgactacgctgcgcttccgcccgttccttgcctttcgcaatgcacggcagctgacgtatgaaaacaacggtgtcgatcattcctataccgagattgagaacgggatcaagacgcgcatgtatccgggctatcccgaactgttcatgcagttcagccaaaaagcgacgtttgtgtatgatccgcactggtatcacggcatagattatccgaaggagcaggagagggggtatgttcaccatgaagacctctacgtgccgggttactttgaggtggctatcgagaagggtgagtctgtttatttcagtgcgggagacgagccggtggatacggcacggctgggagagatttaccggactgaagtagaatcgcgcacgccgcgcgacagcttctttaacagtttgaaaaactcggtgcagcagttttatttccgcccgaatgagacggatgcctatctgctggcgggttacccttggtttaaggtgcgtgcgcgggacttgttcgtttctctgcccggcagtacgctttccattcaagaccctgtgcggtttgagaaaatcatgcacactgccatgccggcagtgcggacttttatggagacgggggcgcaggatgcggtgattacggagattgatcgtccggacattatgctttgggcaatttgggcaattcagcaatatgcgcaatatacgggcttggaacaggctcgcacgctttatgcggactttgtcggcgaaatgattgagtatctgctggcacagaagcatccggacatgcaggtgcaggagaacggactgctgtatgccgacgggagggacagggctattacgtggatgaactcgacgattaacggcaagccggtcgttcagcgttccggttatattgtggagtttaatgctctttggtacaatgccctttgcttctatcgcgaattgagggagggtttgctgcatgaagaggctgaccgtgtgataaaggcggttgagcagtcgtttcctgaaatctttgtgaacgggtataactatctgtttgattccgtatcaagcgcgggggtggattggagtgtacgcccgaatatgattattgccgtagctctgccttattctccgcttacgaggatgcaaaagcgttccgtgctggattatgtgacgaaggagctgctgataccgaaagggctgcgttcgttaagccccaaaagcgagggctatcatccttattatgtaggaccgccatacgaccgcgacatggcttatcatcagggggcggcatggccctggctgctgggcttctatctggaagcctatctccgtgtgttcggaaaggggggcgtttctttcgtggaacgcatgatgataagcatggaagaggaaatgtcgcttcactgcatcggcactatctcggaactgttcgacggcaatccgccgtttaccggacggggagccatctcctttgccatgagcgtttcggctatcctgcgcgtggtggaactgctgaaaaagtataatgccgactgagaatctatacatataattaacaattaactatcgacttgtgaaagcattgatgttcgggtgggaatttccgccgcatattttgggaggcttgggcacggcgagttacggactgacacggggcatgtccatgcaaccggatatggagattgtattttgcataccgaagccttggggcgatgaagaccagagctttctccgtatagtgggcatgtgcaatgtcccgattgtatggcgcgatgtggatatggggtatgtgagccaccgcttggcaccgtttaataccaacccgcagcagtactacgattacagaaaccatctgtatgccgatttcaattacaggtatgtgaacgacttgggctgctttgagttttcagggcgttatcccgataaccttttggaggaaataaacaactattccattgtagccggagtggtagcccgtgccgaacagttcgatgttatccatgcccacgactggctgacgtatcccgcaggactccatgccaaggcggtaagcggcaagccgctcgtcatacacgtacatgccaccgactacgaccgcagtcgcggcaatgtaaaccccgatgtgtacggcattgaaaagaacggcatggacaatgccgaccatatcattacggtaagcaacctgacccgacagacggttattgaaaagtatcatcaaaaccctgccaaagtaactaccgtccacaatgccgtagaacctctcagcccggaaatacttgccatacaggacaagaaaggggtcaaagacaaggtcattactttcttggggcgcatcaccatgcaaaaggggcccgaatacttcgtggaagctgctgccaaagtattggctaaagctcctcacgcacgtttcgtcatggcgggcagcggcgatatgatggacaagatgatacgcttggcagcttctcgcaacatagcggacagatttcacttcaccggatttatgaagggcaaacaggtgtacgaaatattgaaggcgagcgatgtatatgttatgccctccgtatcggaacctttcggcatttcccccttggaagccatgcaatgcggcgtaccgactatcatatccaaacagtccggctgcgccgaaatattggactatgccgtcaaagtggactattgggacatcgaagctatggcggatgccatgtattccatcatttcctacccctccatgcaccaattcctgaaagaagaaggaaaggatgaggtggacaacatcaaatgggaatatgccggacagaaagtgagaaacatttatgaacaggtaatggggtctaactactaattcctaaaaaaagagatatgaaaactatttgcttttactttcagatacatcagccgtttcgcttgaagagataccgtttctttgacatcgggaacgaccattattattatgatgacttccaaaacgaggaaatcatgcaccgcatagctgaacgctgctacctgcctgccaataaaacaatattggaaatgattaaggcaaacgggggcaagttcaaggttgccttctccatctccggcgttgcactcgaacaattggaaatctattcgcccgaagtcatagacagcttcaaggaattggcggcaacaggcaatgtagaatttcttaccgaaacatacgctcattccctttcttccctcggcgatgcggaagagttcaaggaacaagtggaaaagcataaagagaaactgcattccgtcttcggtatcgaacccaaagtgttccgcaataccgaactcatttattccgacgatatagccgaccttgtcgccgacatgggcttcaaaggcatggtcaccgaaggtgccaagcatattatgggatggaaaagcccgaactacatttacacctccgccgtacagcccaaattgaaacttctgctgagaaacggtcgtttcagcgaagacatcgctttgcgcttcaacaactacagctggaacgaatacccgctgacagccgacaaatacatctcatggatagccgacacccccgcttcggagcagattatcaacctctttatgaactatgaagtgctgggtctccacaatcccgccgaatccggcatcttcgacttcctcaaagctcttccccgttttgctgccgaacggggcatctctttctctaccccctcggaagcattcaagttgctcaaacccgtggataccatttccgtcacgcaccctatctcatgggcggacgaagaacgcgactgcggctcttggttgggcaacgtcctccaacaggaatcattccgtaaaatcaacgacataagcgaacgggtacgccttgctgaagaccgccgtatccgtcaggactggaactatctgcaaagcagcgatcacttccactacatgaacactcgccatcgtcacggcagtttcttcagtccctacgacaacccctacgatgctttcaacaactacatgaatgtcctgtccgacttcatcgtccgtgtcaacgcccaattccccgaaaccatcgaaaatgaggaactcaacgcgcttctcaccactatccacaaccaagaggaagagatagagacgctgcaaaaggaactgggcaaacagaagaagaaggcgaagtaatcttacttcgtattgtattgaaagtttaagataatatggattgcggcttaatctgatgaggattgagccgcaatttgtgttttgtgctttcagcacacaaaaaaagagggcgagtttccccgccctaaatgttttcacaacggaataatccttattgtgaattgctttcaatcggatgcaaatgtagagtattttttgaataaacaaatgaaaaacagaaaaagtgacattctcatgccgctttaaatgttttcacaacggaatgatccttattgtgaattctttatactttttatagtttgaattacatataaggaaaggaatgaaatagcagtgattcattgcttctaatcgaaacaggagtttaatagtttatctatttcatagcccagaaacccaatatacttgaaaatcaggttgtaaatagattgggcataaataactgaaggtgattatatataactttacagtttgaatgacggctattctgctgttcttcttgaatttctgctattctttttgaatggctgccagactttttgaatagcgtctaaactattattgacggaaatggttaaaatcaggggctttcacggtaagggagattcgtaaagttagatatagtcaccaaaataattatagttttgcggagaatcatggaacatggtaaaataagcaatatgaacaaaattttagggttggatctggggacaaacagtattggatgggcgttggtaggtaccgatgaggaaggaaatcctatccgtatttataagtcgggaagcagaattattcccatgagtcaggatgtattgggcaattttgaccgtggaaattctatttctcagacggcagaacggacaagctatcgcggagttcgccgattgcgtgaacggcatttactgcgacgtgaacgactacatcgtgtactacatctgatgggttttttaccttctcattatgaagaagcaatcggttgggataaaggtgacaacaaaacttttgcgaaattttattcagatacggaaccgaaattgccttggcgtaaaaatgccgaaagggaacatgaatttttattcaacactccctataatgaaatgctggtagatttcaggaagaaccagccacaattgttcaagataaaaaagaacggacaggaatcgttgattccatacgattggacgatctattatttacgcaaaaaggcattatccaagcctataagcaaaaaagagttggcgtggataatactgaattttaatcagaaacggggatattatcagttgcgcggagaagaggaggaagagaattcaaacaaattaatagaataccatgctttaactgttgttaaggtgattgccgatgagcctcaaaaagggaaaagcgatatttggtataatgcagaattagaaaatggttgggtgtacaggcgttcaagcaaaactccgttattcgattgggaaagcaaagtgaaagaatttgttgttactactgatttgaatgcggacggaagtcttaaagttgataaagaagggggtgtaaaacgctctttccgggttccgtcagaggatgactggatgcttgtgaagaaaaaaacggagtctgatattgaaaagagtgataaaacagtcggttgttatatctatgatacaatattgcaaaatccaagccagaagatacgcggtaagttggtacggacaatcgaacggaaattctataaaaaggaattgacagagattctgaataaacaaaaggaatttcattccgaactgcagaacaaagaattgtatcaagaatgtattaaggaattgtatccgcataatgaagctcattacgatagtcttttggtcaaagattatacggatcttttcgtgaatgatataattttttatcaacgtccgttgaaaagcaagaagtcgttgattagtaattgtccgtatgaatatagggtatataggaatgattctggaattgttgaaagagtaccaattaaatgtattgcgaaatcacacccgttatatcaagaatttcgtttgtggcaatttattcataatctgagaatttatgaacgtcaaagagaagttaacgggaaaccggaaacagatgttgatattactgctgaatttattccgacaacagaagatagagtaaaactatttgattggctgaataataaaaaagaaataaaacaagatactttactgcaatcgtactttaaaattaagaagaaaaaaggagatgataagtttccctatcgttggaattatgtagaagacaaagaatatccgtgtaatgaaacacgtgcattgattttaagtcgcttaacaaaactcaatctttctgaagattttcttaccaaagaaatggaacttgccttatggcatatcctttactcggtagaagataaggaagagataaaaaaagcattcaaatcctttgctcaaaaacataatttggatgatagctttgttgatcagtttataaaatttccgcctttcaaaaaagattatggttcctattcggcaaaagcgatcaaaaagttattgcctttaatgagaataggaaaatactgggatgaaaaagctatttcgggaaatacacgtagccgtattctttctattaatgaacggttggaagacatgcgtagtagcggaaagaaaatagaagatgtttcagatgatgacatcccaaaacaagtgctgaaaagttttgataaagtaaatggggtttattcgggattaaatacttatcaggcttgttatgccgtttatggtcgccattcggaagcaagtgaaataaccaaatggaaaacgccacaggatattgatgattatttaaacgaattcaagcaacattcattacgtaatccgattgttgaacaagtaattacggaaacgctacgggttgttcgggatatttggaaaaaatatggcgatttctctgaaattcatattgaattagggcgggaaatgaaaaaccctgctgataaacgagcaaaaatgacaactcaaatatcagaaaatgagaatacaaatcttcgaatgaaatctctgttagctgagcttaaaaaccataatgatgttgaaaatgtacgtccctattcaccaagccaacaagaaatattaaagatatatgaagaaggagtattaaattctgtttcggaaatacccgaagaaattattaaaatcacaaagtcaagccaaccgtctcaaactgaattggtacgttataagctttggttggaacaaaaatatcgttcgccttatactggagaaattattccgttggggaaattatttacttcagcttatgagatagagcatgtcattccacaatctcgatattttgatgattcattgagtaataaagtaatttgtgagtcagaagtaaacaagttgaaaggaaatttgcttggatatgaatttgttaaaaatcatcatggagtaaaagtcgaattaaatttcaacaaaacagttgaaattttctccataaatgaatacgaagaatttgttaaaggcaattatggaaagaacagagggaaaatgaaaaaacttctcctcgaagatattcctaaatcgtttattgaacgacaactcaatgatactcgatatattagcaaggttgtgaaaggtttgttgtcaaatattgtcagggaggacggagaacaggaggcgacttcaaaacatgtaataccttgcaccggaggggttactactattttaaagcaggattggggattaaatgatgtttggaataaaatcgttacgcctcgtttcgaacgaatgaatgaattgacaaataccagcctttttggacaatgggagaataaagagggcaagcgtatttttcgaaccgaagtccctttagaattacaaaaaggattcaataaaaaacgaattgatcatcgccaccacgctatggatgccatagtaattgcatgtgcaacacgcagccacgttacttacttaaataacgaatcgtcaaaagcaaatgcaaaagagattcgcgatggcttgaagcataaattgtgttttaaatccaaaactgatgaaaccggtaattataaatggcaattccataaaccttgggatacttttacgcaagatgtacaagatacgttagaaaatattgtaatcagttttaaacaaaatttgcgagttataaataaaactactaatagatatcagaagtatgaggaagaaaagaagattctaaaatcacaggagaaaggggatagttgggcaattcgtaaacctctgcataaagatactgtatttgctaaagtatcgctccagaagattaaatgtgtaaaattagctatggcattaaaagactggaaaaatattgttgataaacaattaaaaaaagaaattcgaagacttattctatcgtatggaaaatttgacgcagagatactaaacaaatattttaaagataggaaatatattttcaaagatgtcgatatttcaaaggttgatgtttattatttcgagacagaatatgttgcaacacgtaaaaatttagacacatcatttgatagaaaatcaatagaatcaattactgataccgggatacagaaaatattgttgaatcatttaggtgttaaaaataataatcctgagttggctttttcggcggaagggatagatgagatgaatcaaaggattgttgaattgaatggaggtaaacaacatcaacctatttataaagtaagaatgtatgaaccgttaggtaataagttccaagtaggtcgtattggaaataaaaaagataaatatgtagaagcggcaccaggtaccaatttgttttatgcgatatatcaatcggaagacaagaaacgtatttatgatacaattcctttaaatataattattgaacgacaaaaaaaagagttatttcctgttccagaaaacaaagaagataaagataatttgtataaattattattttggttatctcctaatgatatggtttatctcccgacggaaaaagaatgggcaaatcctgatttatttaattttaataatatgacaaaaaaccaaagaaaaaaactctataaatttattgatggaagtggaacgactgcaaattttattccgaatacagttgctaatatcattttttccattcctaaaaaagattctggtaaatattctatgggaaatagaattgtccaaaatgaatttggaataggaagccctcaatctaaaaatcaaaaagcatttactggtgagatgattaaagaaagatgttggaagttgaaaataaatagattaggtgacattattgaatgtataaaatagcagatgataaagaagaccttgtattttgggagcggggtttatttgagtgtgaggaatgggctgttggttatcaggttgccagaggtggagaggaatgatactctgccgaaggattttaagcaacaatcggttatcacgaaacctatagaggatattgggataattgtccttgataacagacagattacaataactcatggggtgttggagaaattgctggagaatgatgtggctttgattacttgtgacagtcggagcttgcctgtcggtttgatgttgcctctttacgggaatacgacacaaagtgagcggttcagggaccaaattgacgcttcgcttcctttgaaaaagcaattgtggcagcagaccattcaatataaaatcaagaatcaggcagcggctttaaaccaattgcgcggggagacggtgaaaaatatgttggtgtgggcaaatgatgtcaggagcggagaccctgataatttggaagcgcgggcggctgcatattattggaagaatctttttccgtctgtttcagattttacgagggacagggaaggggtagcacctaataatttgttgaattacggatatgccattttgagggcggttgttgcgcggggattggttgtaagcggaatgttaccaaccttaggtattcatcatcataatcgttataatgcttattgtctggcagatgatattatggaaccttaccggccgtttgtggacgaactcgtagtcggtatagttgacggcggacaagactatacgcagattacaaaagaattgaaagcaaaactgttgaccattccgacattggatgttgtaatcggcggacagcgtagccctttgatggtagcggtaagccaaacgacagcatccctttataaatgcttcaaaggagaaatccggagaatcagctatccggaaaaataagtgtggaacggtttagtgaatatcgcattatgtgggtgcttgtttttttcgaccttccgacggaaacaaagaaagagaaaaaagtatatacggattttcggaaaagactgcaaggtgacggttttacaatgttccaattctccatttatttgaggcattgcccaagccgtgaaaatgcagatgtgcatataaagcgggtgaaatcctttttgccggacaagggtcatatcggaattttatgtataactgacaaacaattcgggaacatggaactgttcttcggtaaaaaagaagcaaatccctctacacccggacaacaattggaacttttttgaagcaacaaaaaaagaaaagcctactgctacggtaggcttttcttctctaaaacaacctcatttttccaccctaaatcttcgcttaccaatctgatactcaaacaaaagcagataatatgttgtttatggtagcaaaggtaataataattgaaagcaa

SEQ ID NO: 1430 - DNA, 11036 bp, synthetic construct
  misc_feature 1..11036: note = Synthetic
  source 1..11036: mol_type = other DNA
ttaccgaacactatataacaacgtataatgccaatgaagggcaaatcttcgtattcgacagaaaagggaaaatatgccatacatttaatcataaaggagggagtggggaagaatacaactatcctttgcagttacgcttggacgaaaaggctaaagagttgtttctgcttgacatatctaataaaatacaggtctattcgatagagggaaaatacaagcgttctttgtctattcccaaagatgtacggattgaaattatgtacaattgtgatgagcaacatttgttgggttacgatagttatatgttggatagaaaagataaacagcccaatagtcgtccctatttactgatttcgaaaaagaacggagttgtttcccgccttccggtaactatccacaaacgtgtgggaaaacgcatttatattactcaagggggacagacggctaccgtttcaatgtctctctatccgttagcaaatagtggttcggagtttatctttgcagatttggcaggtgatactgtttattcttattgtaatcataagttgaccccgttgtttgtacgtactccgaaagcagatgcttccgagccaagactcgttatgcaatgttatgccaagattgggaactatctgttaatgtcgactgcattgaaaaagtatgaaccggggaaaacttcgtttgataccaaagaatttgtttatgatacggttgagaagaaagtatatgatttggaatttgagaatcaagactattcgcccgcccgttcaatgcgaatgggaggcgtattatcggcattacctgaaaaatgtgttttcgattcgtgggatactgaccgtttattggatatgttggagaaaggaaagttgacgggaaacttgaagaaggtggcggagaagatgacagtagatgataatcctttactcatattgtacaaattcaaatgaaacgtagatgaagattatatggttctttttctccttgtgtctgctggtaggatgtaaacgttcggatgtggcggtatcggtggaacaaacgttaccggtgatagatttgaatgctgcttatcctgaaaagaaactggatttggcagaggtggcgagtcctgaatatattcctttgtatacagtcggggcggattcattagatagatatagtctgacttcagcgagtgtttcgccccattgggtagtagcttataattggcagcagacaattatggtttttgaacgggcaaccggaaaacttcgttatcgttttaatcatcagggacagcaaaaagaacaatattattatatattctcggtgtttgtagatgaagaacgtgaagaaatatatgtagtcggttcagttttcaaaatccaggtttatagcctgtccggcaactataagcgtacgttgaatcttccctatgatatgtctttcgaacaggtgtttgattatgataaagattcattgatatttaacgacggaagggaagatgtagataatcctgtccaaaaagggacttattattatttaatgtcgaaaactgacggaggaatgcgtcctttgccttttcatgtaaagtatcgtattacgaaccgctttcgcatccgactaaggaatggagacaggcaaggggtaatttcctgtatgttttccgtaaagccattgttgaagaatggtgatgaagtgatattatccgaattttccaatgacaccgttttctcttatgggaaagaaggagcgaaacctttgttggtacgtactccggctccccgttctacttttcctttgaagttaatgtcagtttcagcttgtagcaggcgttttctgtttttggatgtgatagagaaagtgtatagacggaatatcaagaagttggacggagactcgtttgtctacgattaccgcgaaaaggagatctttactccggtgttggtcaatagtgattttatccctgaactgccggttgagatagataatatgaacggaagttttccgaaatatgccggtgcgtcttctattcattcccgggagtttatgcagtactatcggagaggaaatttacaggggcgggcatgtgaagcggcctcttgcttgacaagagatgatatttatgttttagtgctgtatcattttaactgaatagagccggtaaatgtattcttacggttattattttgaggaaaaatgtaggatttataaacttattattttacatttgtgtgctcaagaaatagatagtaataattcattaaccaataaacaataatcgaaatggaaaatcaggaacttattaaacaggtcactgaaaaagccgaaaaatggttgaccccggcatacgatgctgaaactcaggctgaagtgaagcgaatgttggaaaacgatgataaaaccgaattaatagaagcattctacaaagacctcgaatttggtaccggtggtttacgcggtatcatgggcgtaggtagcaaccgtatgaacatctatacggtaggtgccgctacacaaggtctttctaattatttgaagaagaactttaaagatctgccgcagatttctgttgtggttggtcatgactgccgtaacaacagccgtttgtttgcggagacctctgccaatattttctctgccaacggtatcaaagtatatctgttcgacgatatgcgtcctactcccgaaatgtcttttgctatccgtcacctcggttgccagagcggtatcatcctgactgcttctcacaacccgaaggaatataatggttacaaagcatactgggatgacggtgcgcaagtactggctccgcacgataaaggtatcatcgacgaagtaaacgctattgcctctgctgctgatatcaaattccaaggcaatccggatttgattcagattatcggtgaagatatagacaaagtttatctggacatggtgaagacagtttctattgatccggaagcaatcgcccgccacaaagacatgaagattgtttatactccgattcacggtacaggtatgatgttgattccgcgtgctttgaagatgtggggatttgaaaatgtgtttactgttcccgaacagatgattaaggacggtaacttcccgactgtcatctctccgaacccggaaaatgccgaagctctttctatggctgtgaatctggctaaagaaattgatgcagacctcgttatggcttccgacccggatgcagaccgtgtaggtatcgcttgtaaggatgataaaggtgaatgggtgctgattaacggtaatcagacttgtatgatgtatctttactatattctcactcaatacaaacaactaggtaagattaaaggtaatgagttctgtgtgaagacaatcgtaactacggaacttatcaagaagattgctgataagaataacattgaaatgctcgactgctacaccggattcaaatggattgcacgtgaaatccgtctgcgtgaaggtaagaagaaatacattggaggcggtgaagagagctatggtttccttgccgaagacttcgttcgtgacaaagacgcggtatcagcctgctgcttgattgcagaagttgctgcatgggcaaaagataacggtaagtcattgtatcaattgttgctggatatctacgtagaatacggattctctaaagaatttactgtgaatgtagtgaaaccgggcaagagtggtgctgaagaaatcaaagctatgatggaaaacttccgtgctaatcctccgaaagaattgggtggttcgaaagtgattctgagtaaagactataagactttgaaacaaacagacgataaaggtaatgtaactgctattgatatgccggaaccgtctaatgtcctgcaatatttcacagaagacggcagcaaagtttctgttcgtccttcaggtacagaaccgaagatcaaattctatatggaagtacaaggtgaaatgggttgccgtaactgttatgcttctgccgagtctgctgcaatggaaaagattgaagcagtgaagaagtcattgggtatctgatcctatttcttctgatagttcagaataaataataaatagcgcctccatagtcttttcgaagattgtggaggcgcttctttatatctgtcctgcatctgtttcccactattcaagccggtttagtacagttctttcatttcctttgcattctttaagtcccctttctaatcattcttccgggaatcttgttgtattggcatcatctcaatttaagcacgcaggctacggatatacacacttttgttgatgctttagagtgatacgctaagtttcattttcgtaagttgttcgtttgtagtttgtgtgtatttcgtggcctgctttttggtatccctatagtacaactttggggtcataaagatataaaaaagcccccgtaaaaggacgagggcaacctaatgttttcacaacggaataatccttattgtgatttgcttcaaattagtttagcaaagataatgaaataatttggtatatcacttttttttgtaggaaaaaagtgatatatttgatggaaattgtaaaaacacacaaatatgaaaaaaatattaggattggatttgggaaccaatagtatcggatgggctgtcgtctgtcatagcgatacggacggacaaactgaacgtaaatggattgaaatggctggtagtagaataattccgatggatgctgctattctcggtgattttgacaaagggaattccaaatctcaaacttcagagagaacaggctttcgtggaatacgtcgattgcgagaacgtgttctgttgcgtagggaaagattgcataaggtattaaaacttataggatttttgccacaacactatatcgatagtcttgattttagtaatcattcgggcaagtttcaattaggtactgaggttaaacttccttggaggaaaaatgaaataggaaaatatgaatttctttttcagaattcttttaatgaaatgctggcagattttgctaaaaaacaacctgagttagttgcaatggggcgaaaggttccttatgattggacaatttattatttgcgaaaaaaggctttgagtgagaaaattactaaagaagaactggcatggattcttttaaactttaatcaaaagcgaggatattatcaattgcgtggtgaagaggaagaagaaaaaaagaatagattggaggatttttatgcgttgaaagttgtagaagtagaacaaacagacgataagaaagggaaggatatttggtataatgttcatttagagaatgggtggatatatcgtcgaagtagtaacgttccattggattggaaagataaaattaaagaatttatcgtaacgacggaactaaatgaagatggtaccccaaaagtggacaaagatggttgtgtgaaacgttcttttcggatgcctaaagaagatgactggaagttgcttaaaaaaaaaatgactggaatttgtaaaaaaaaaaacccgaagcagatattgaaagaagccataagacaataggatgctatatttacgatactttgcttcaaagcccccagcaaaaaataaaaggaaaattagtccgaacaattgaacgtaagttttataaagacgagttgaggttaattttggataaacagcaagcttttcacccggagttgcaagatagagaattatataaagcctgtcttgatgtactttacccaatgaatgtggctcacaaaaacaatgtggctaatcggggatttgtttatttgttcatggaagatatccttttttaccagcgaccgctgaaaagtaaaaagtcactgattgataactgcccttatgaagaaaatcaatatatagatgtgactacaggtgagattaagaaggcgccaattaagtgtattgcaaaatcgcatcctctctatcaggaatttcggttgtggcaatttattgacaatatccgtatttatcaaaaagagaaaaaggtggatggcaaattattgacggatattgatgtcactacagaatatttaagttcgaaagatgattatgtagcgttgtatgaatggctttgcgttcgaaaggaaatagagcaaaagacttttcttaagtatcccgcatttggcttgaaaaaggagattgaaaattataggtggaattatatagaagggaaatcatacccttgtaatgaaacccggagtttgattttacattatttggagaaagcaggtatttcttcaacttttttatcaacaaagatcgaagaatcgctgtggcatatactatattctgtagaggataggattgaattagaaacggcattacgaacatttgcttctaaatatcagctatcatgtaactttgtggaagtatttaagaagtttccaccttttaagaaagagtatggtgcgtactctgcaaaggcaataaagaggcttttgccattgatgcgaatgggaaaatattggaaagtggatgctattgatggaaatacggcagaacgtatagagaaaatactttctggagaatgtgatgagaaaatacttaataaagtctgggagaaaactatccatttatctgaaacttctgattttcaaggattgccattgtggttggcttgctacgttgtttataacagacattcggaggtgaaagaagttgcgaaatggaaatctccggaagatattgatatttatttgaaatcatttaaacaacattccttgcgcaatcctattgttgagcaagttattactgaaacattgagagtcgttcgtgatatttggaaacgagtggagcagatagatgaaattcatgtggagttaggacgagaaatgaaaaacccgtccgagaagcgcaggcagatgactgaacggatgcttgagaacgaaaatgctaatatacgtattaaggctctgcttacagaatttatgaatcctgaatatgagatggaaaatgtcaggccttactctcctagccagcaagaaatacttcgtatttatgaagatactgttttgaatggggcaggagacatacctgaggatattgagattatattgaaaaagttcaaggagaatgacataaagaagcgtccgggaaagtccgatttcttgcgatataaattatggttggagcaacagtatcgctcaccctatacaggagaaattatacctttaggaaaactgtttactacggcttatgagatagagcacgtaatacctcaatcccggtattttgatgattccttcagtaataaagttatctgtgaatcggaagttaacaaactgaaagacaatatgcttggatatgaatttataaagaagcatgctggtgaaatagtagagctgggttttgggaaatcagtgaagattttttcagttgaagcatatgagcggtttgttggagagaattattataaagcagggagtaagaagagtaaattactgatggatgatattcctgagaaatttatagagcgccaattgaatgatagtcgttatatcagtcgggttgttaaaggattgttgtcgaatgttgtgagagaggaggatgcgaatggcgaatatgaatcagaggctatttccaaaaatgtgattgtatgttctggtagtgtgacagataggcttaaaaaagattggggagtaaatgatgtttggaataacattgtgtattctcgttttgaacgtttgaatcgtttgacagaaagccagcaattcggacattgggaaaatcgggaaggaaagcgcttttttcaaaccgaactacctttggaatatcaaaaagggtttagtaagaaacgtatcgatcatcgtcatcatgcaatggatgctatcataatagcctgtgctacccgtaatcatgttaattatttaagtaatgaatcggcttctaaacatgcccggatcgctcgttatgatttgcagcgtatgttgtgtgataaatctaaggcagatagaggaggtaattataagtggattatacagaaaccttgggcgacgtttacgcaagatgtttatcgtacattacttgatataatcgtcagttttaaacaaaatctgcgggtaataaacaaaatgacaaactattatcaagcttatgatgatgctggtaaaaaggttttcaaaaagcagaagaaaggagatagttgggcaattcgtaaatcaatgcataaagacacggtgtttggtcaggtaaatttgcgaaagataaaagaagtaagactttctgttgctttggaaagtccagaaaaaatagtagataagaagattaaagagaaagtattacagttatttgcatatcaatatgataagaaaaagattgaaaaatattttaaggaaaatgcttccttgtggaaagaggtgaatcttgctaagattcccgtttattattttacagatgaatcttctgaattattggtagctgttcgcaaaaatttggatactggttttacagaaaagaaaataagagaatctgttacagatactgggatacagaaaatattattgaatcatttgagtaataaaggagataagcccgaattggcattttcgccggatggcattgatgaaatgaatcggaatttagtaatattgaatggtgcaaagccacaacaaccaatatataaagtccgcgtatgtgaacccttaggcaataaatttaaagtggggacaaatgggaataaatcggctaaatatgtagaggctgctaaaggtacgaacttgttttttgcgatttatgtaactgatgatggaaaacgtacttatgaaactattcctttgaatgtggttattgaaagagaaaaattgggttggcttccagttccggagaagaatgataaggggggaaatttattgttctggctgtctccgaatgatttggtttatttgcctacagaagaagaattgatgaatggaattatttcagatagtattgataggaataggatatataagatggtaagttgtactggtaatgagggacattttatacccgaaaatatatctaaccctattattcccacattagaattaggaagtaataataaggcacaaagggcttggactgatgagatgataaaggagacatttatacctattaaagtagatagattggggcagataactgaaataattaataaaataagatgagtaatataaagctatttcaagataggaaaattcgttctgtatgggatgaaacggaacagcagtggtatttttcggttgtagatgtagtagccgctttaactgatagtgttaatcctacagactatttgaagaaaatgagaaaaagagatgaatcattagctgcctacctggggacaaattgtccccaggtagaaatgatgacagaaagtggtaagagaagaaaagtattggctgctaacataaaagggttatttcgtattattcaatctatcccttcttccaaagctgaaccatttaaactttggctggcacaggtagggtatgatcgtatacaggaaatagaaaaccctgaattggctcaagaacgaatgaaagaactatatgaacaaaaaggctatcctaaagattggattgataagcgtctaaggggaattgctattcgacaaaatttgactgacgaatggaaggaaagaggtattactgaaaagagtgattacgcaatacttacagctgagatatctaatgcaacttttggcttaactccttctgaatataaaaagtataagggattgatgaagaagaatcagaatttgcgtgatcatatgtctgatttagaacttatttttacgatgttgggtgagcgtgtaacaactgaaatatctcaaaaggaaaaaccggatacgtttattgagaataagcaggttgcacaaagaggaggaaatgtagctggagttgctcgtgaacaagcggaaaaagaattagggagaagtattgtatctaatcagaattttttgcttgattctgaattggatacaagtgaacctcaattgcctttcgatactgatgacgaataggggatagatgcttaattagaatttactatgattaaaaagacgctttattttggaaatccagtgtatctttcattaaagaatgcacagttagtaattaaacttccggagattgtgaaaagtgagtcattgccggagacatttaaacagcaatcggaagtaactaagccaatagaagatattggaattgttgttttggatcataagcaaattactataacttcgggagtattagaagcgttattagagaataattgtgctgtaataacctgtgatagtaaaagtatgcctgtaggtttaatgcttcctttatatggaaattcaacccaaaatgaaaggtttaggatgcagttggatgcttctcttcctttaaaaaaacagctatggcagcaaacaatgaaagcaaagatagaaaatcaggcttcagtgctatatacttgtaaaaaagaggaagtaaagtgtatgaaagtttgggcgaatgatgtgaaaagtggtgatcctgataatttggaagctcgtgctgccgcttattactggaagtgtatgttttcggacattgaagggttcacacgggaaagagaagggataccacctaataatttattaaattatggctatgcaattcttcgggcaatagtagctcgtgctttggtaacgagtggacttttacctactttgggaattcatcatcataatcgttataatgcttactgcttggcggatgatataatggaaccttaccgaccatatgtagatgaacttgtgtattctattgtaaaagggtatgaaaactatgatgagttaacaaaagaattaaaaacgattttattgaatattccaacgttagaagtgataataaatggaaaaagaagtccgttgatggttgctgtagcacaaacgacagcttcactttataaatgttttactggagagcttcgtcgtattatttatcctgagaagtaatggatcgttttagtgaatatcgtattatgtggatattagtgctttttgacttgccaacagaaactaaaaaagataaaaaggcttatatcgattttagaaagaatttacagaaa

SEQ ID NO: 1431 - DNA, 10948 bp, synthetic construct
  misc_feature 1..10948: note = Synthetic
  source 1..10948: mol_type = other DNA
ccacagccagcggaggaagcggaagctacacctacgagtggtacgttaacaacacgttgatcgccaacgcgagcggcagcacctacgttacccatgcgacaggatcctataccgtgaaggttaaggatggtaacaactgtccggctaccagtaacgccgtgagcttaagcaatccagaacaacttaacattacagcaaatccaggtatcattagttgttcggcttcaacaacaagtgtaacatttaccccatctggcggaaccgcaccatacagtatatatatggatggaaatttaattgcgactgtcaatggtgtttatgttcaaaataatgttgcaggtggaacccacacttattatgtgaaagatgcaaatggatgtcaaacagctcagcaatctttcgtagttaatacggcattgccgatagctgttacagttaatgcaccagatgtactttgctacggaggaacatccctggtaactttgactatcactggaggaacatcaccatacaccgtggtgtggttccaaaatggagtccaagtagctacaggtaaccctgttaatttaggtgtaggaagttacactgcaatagtaacagattcagtaggttgtgataaaacagttgctgtcactgtgaagctgaaatcttgccaaggtaagaccattacccaaggaggatggggcgcaccagcaaatggtggaaataacggtatgtacttgaacaataactttgcttctgtatttaccagcccagactatctgaccattggcgatggaagcagaaaagttagactgacttcaccggatgcgatccgaacctacatcaaaaatggaggaacagccgctattctgggaacaggtttagccgttaacccaccatgtccgaaaaatacgctttcgagccaaacagtggcattgacactcaacgttcgatttgatgcggccaatccggattgggcaccaaacacagataccgcattaggagatatgatagtgcttcaaggacctttagctggatacaccgtaaatcaagtcttgacacttgccaatcaaattcttggaggtacttcaacacaaatgacgccatcagcaataaatagtgtggtgacaagtatcaatgagaatttcgacaatggtactaccaataacggttatttggcttgtccatgtgtaaattatgcaaaacctattgccacaacacctgaaaaagtgaattccacagtgcaggaagctaaaatcaccttatatccaaatcctacaagaggggagatcaacctgaaattcgatacggatcaaggaaaaaccatttctgctcagctttataattattcaggaaaaatgttggatgatttgtcaagattggccagttggaatggtaataccgttacgttcaactacaataatccgaatctgacagatggggtttatttgttgaaagtgaaaacttcaacgattgaaaaaatgattaagctaatcattaaaaagtaaatgaaatttataaatagaactgggctgcctttgtgcagccctttttttatgtacaaatatatcaactcacctttgttcagcgtttgaagattttgtaaatttgtgatactcattttaattaaatgaaggagtgtaattaatgatgaagccaaaaggtttcatgatacctttaataacaataaaaaatatattatgaaagttaccgtagttggtgcaggagcagttggcgcgagttgcgccgagtacatcgcgatgaaaaatttcgcttccgaagttgttttggtggacatcaaagaaggctttgcagaaggaaaggcaatggacttgatgcaaaccgcatctttaaatggttttgataccaaaatcaccggaacaacaggtgattacagcaaaactgcaggttctaaagttgcggtgatcacttccggaattcctagaaaaccggggatgaccagagaagaactcatcggaatcaatgccggaatcgtaaaagaagtttccgcgaatttggtaaaacattcaccggaggtcatcatcatcgtggtttctaatccaatggataccatggcttacctggttcataaaacttcgggacttccaaaaaataaaattatcggaatgggtggggcactggattctgcacgttttaaatatagattggcggaagctttggagtgtccgatctctgatgttgacggaatggtgatcgcagcacacagcgacaccggtatgttgcctttggtaagtaaagccacaagaaatggcgttccggtaacagagtttttgaaggatgagcaaattgcttatgtaaccgaagaaactaaagtggggggcgctacattaaccaagctattaggaacttctgcatggtatgcacccggtgctgccgtatctgtaatggtgcagtcaatcctttgcgatcaaaagaaaatgattccttgctcactgtttttagatggagaatacggtcagtccgatatctgtctgggtgtgcctgcaattataggcgcaaacggtgttgaaaaaatcgtagatattacattgacagacgctgaaaaggataaatttgcgcaagcagcaaatgctgtaagagaagtgaatggcgacttgaaattctaagaaataaatcttattgatgatagaaccttccgagttttcgggaggttttttttgtggattttgtcctgaaaattctgcaaaaacgtaagtacaaaataaaatttcataagtacgaaaataaattctgtcagtacggaacaaaaatttcgtaaggataaaataataaacgcgttaattgaatgaaaaaacctcttggaccatctaaaaaatgccgtaaaatcatagagatccatcccgtatttgaaataatcggcagtaaaagttcaagaaagcagtcttttttttaccgaaattcttcagtttttaggaggattttgcgtcaaaaaagccaattttttcttgtaattaatctaaaaacggtgcgcacccaagacacaacataatgtcatccctttagctgtaaaaaatgctgttgtattatcaattatatttgtatagttatatcatgatttaattattaacctgtatagttattttaggacgggtcacctctatagatacttcatggatagttcatggatatttcataaatgaagcatgagtggagtagcttgcaagaaaagaatggggagttttttgtcttcgtattgatcttttccttacgtcatctcatcattagtttcatcatttttgttgtgataaggtgtattactggataatttactaactttacattttaagtgaaaaaaaaactggaatcatggaaaagagaatacatcaaggacggaatgttaaaaggttcagggaaatgctggggataaaacaggaagcattggctttcgatttaggcgaagactggaaccaaaagaaaatctcactgctcgagcagaaagacgaagtcgacgtcgctctgctgcagaaaatttcagaagcattgaaaatcccggtagaagcttttcagaacttcgatgaggagcaggctgtgaatttaatttcttgcaccttttctgataatgccatgtttaataataaaattgaaatccagaacattcatcctgttgatcaattgatgaaaattcatgaagaaaaaatcgctttgtacgaaagaatgctgaaagagaaagatgaaatgatggcccgcttggaagccctggtaaaaaagtaagatttaaacaattaatggaatacgagcttaacctaaaggttaagctttttctatgcggaacagatttattttttaacaaataaaaaaggcgagttgccccgccttgaatgttttatttcgtaatcttctttattttttattaggaactcatgaaacatttgggcataaaaaagcctcctgattatggacaagaggcgacccaaatgttttcacaacggaataatccttattgtgaattgctttcatgtcaaagatataaaatgttttttttattgaaatacggaaaaccataatttccgtattgtttttatttctaattttatagacaatcaaaaaactcttcatgatgactaaaaatatactgggattagacttgggaacaaactctataggatgggcgttaatcaaacaagactttgaaaataaacaaggagagattctcgggatgggaagcagaatcattccgatgtcgcaggatattttaggcgatttcgggaaaggaaattctgtttcgcaaaccgctgatcgtaccaaatacagaagtgtgagaagattacgtgaacgatttctattaaggagagaacgtcttcacagggttttagatgttttaaattttcttccaaaacactatgcttcacagatagattttgaaaaacgattcgggaagtttaaatttgaaaccgaaccaaaattggcgtgggaaaattcggatggaaagttttcttttctttttcaaaactctttcaatgaaatgcttgaagattttaaagcagctggacaagatttgaaaattccttatgattggacgatctactatctccgcaaaaaagcactttctcataaaatcgaaaaagaagaattggcttggattcttttgaattttaatcagaaacgggggtattatcaattgagaggagaggaggaggaagagaaccctaataaacgaatggaattttattctttaaagattgtagatgttgttgcggacgaaccgcagaaagggaaatctgatatctggtattcaatgattttagaaaatggttgggtttatagaagatctagcaaaattccattgtttgattggaaagataagacacgggattttattgtgactacggatttgaatgatgatggtacaataaaaaccgataaggaagggaatgaaaaaagaagtttccgcgcaccaagtgaaaatgattggacattggtgaaaacgaaaaccgaaaatgaaatcgaccaatctcacaaaaccgttgggacttatatctacgagactctgcttcaaaatccgaaacaaaaggtcaaaggaaaattagttcggacgattgaaagaaaattctataaagatgagctaagacaaattttagaaaagcaaaaagaatttcattcggaatttcaaaatgatgatttgtacaacgactgcgttcgtgaattgtaccgaaacaacgaagcgcatcaactgactttgagcaagaaagattttgtgcatcttttgatggatgatcttattttttaccaaagacctttgagaagtcagaaatcttctatctcaaactgtacgttggaatttagaaaatataaagatgaaaatggaatagagcatacacaatatttaaaagccattccaaaatccaatccttattatcaggaatttcgtctttggcaatggatctacaatttgaacatttatagaaaagatgatgaagcgaatgttaccaatgattttttaaacaatatagaagattttgaaaatctgtttgaatttctcaataacagaaaagaagttgaccaaaaagctttactaaagcattttaaactcaatgaaaaaacgcatcgctggaattttgtagaggataaaaaatatccatgcaatgaaacgagagcgatgatttcttcgagattggaaaaggtagagaatagtcctgttgattttctaacaagggaaattgagcaaaaaatttggcacatcatctattccgtcaatgataaaattgaatatgaaaaagccttgaaatcttttgcaaataaaaacgatttggatgaaaattcttttgtcgaagcgtttaggaaattcccgccttttaaaagtgaatacggctccttttcggaaaaagcgattaaaaaactgttgcctttgatgcgattggggaaatattgggatgaaaatgaaattgtaaagcacagtgatacttatttcaaaaatattgagaatcttttgggtaatctatcaatgagagaccaaaatatttcggaggaggatagagagaaatggaataaatccataaatctaaaattacaggaagagctaaaagattttcaaaccgctgaaatagatttatttcagggattacgattgcatattgctcaatatctcgtttatggaagacattccgaagcttcgttgattggaaaatggaattctgctgatgatttggaagcgtttttaaaagattttaaacaacattcgctccgcaacccgattgttgaacaggtaattacagaaacattacgtgtagttaaagacatctggttaaaatatggaaatggggcaaaaggtttctttgatgaaatccatattgagctgggaagagaaatgaaacttccggcaaaagaaagagaagaccttacccgtaagattactgaaaacgaaaataccaatcttcgaattaaagccttattggctgaaatgatgaatgacagttcggttgaaaatgttcgtccgttttcgccgatgcagcaagaaattttaaaaatttatgaagatggggttctgaattctgatattgaaattgaggacgatattttgaaaatcagtaaaactgctcaaccttctccgtccgatctgaaacgatacaagctttggttggaacagaaatacagatcgccttataccggacaaatcattccattaaataaattgttcactgcagaatatgaaattgaacatatcattcctcaaagccgatattttgatgacagttttagtaataaagtgatatgcgaggcggcggttaattctttaaaaggaaataaactatcctttgaatttattaaagatcccgtgtttcaaactgttgaaataggttttggaagaacggtttctattttgaaacccgatgaatacgaagattttgtaaagaaacattatgcgaataatagagggaaaagaaacaaactccttttagaagaaattcctgagaaaatgatcgaacgtcaaatgaatgatacgcggtatatcagtaagtatatttcgggtgttctttccaatattgtgagagttgaagatggttcagatgaaggcgttaattctaaaaatattgttccaggaaatggaaaaatcacaacacaattgaaacaagattggggattaaatgatgtttggaatgatcttattcttccacgttttgaaagaatgaatcagcttaccaattcaacagatttcactgcctggaatgaaacccatcaaaagtttttacctactgttccaattgagttttcaaaagggttttcgaaaaaaagaattgaccatcgacaccatgcaatggacgctttggtaattgcctgtgctacaaaagaccatgtgaatttgcttaataaccaatctgcaaaatcggatactaaaaggtatgatttgaaaatgaaattgatgaagtttgagaaagtagcttacaatcatccacaaactggagagagaattgaaagagaagttccgaaacaatttttaaaaccatggaataattttacagtggatgccaaagattccttagaaaaaataatcgtcagctttaagcaaaaccttcgtgtcattaataaggcgactaattattacgaaaagtacgttgagaaagacggtgtaaaaactaagcaaagagtagaccagaaaggaacaaattgggcgattagaaaatctttacacgaagaaacagtttcagggaaaatagatttaccttgggttgagactagtaaaggagagtttattactgctacaagaaaacctttggatacaagttttaatattgataaaattaagaaaataacagacacgggaattcaaaaaattcttaaaaactatcttgaagcaaaagataataatcctgaattagctttttcaccagaaggaattgaagatttgaataaaaatattgaaaaatacaatgatggaaaaccacatcaacccattatcaaagtccgtgtttatgaaaaaggaaaagggagatttgctctaggacaaacaggcaataaagttgacaaatatgttcaaggctctcctaacttattttttgcaatatataaagatgagaacgggaagaaaagttttgaaagcattcgattggatattgtaattgaaagaatgaaacaaatgttaagccctgttccagaaataaatagcaatggagatgaattacatgaaacgatttccccacttgatttggtttatataccaacagaagaagaatcagagaatataaatgctattgattttgatactattgataagtccaaattagaaaggatttataatgtcaatgatttttctggatacacggtgtactttagtcaaaattcctttgcaaaaaatatatatccaaaagaaatggatatgagctggaatgaaaagaaacaaaaatcctctggttcatttgattcaaaaacagcctcatttagtggaaaatcgataaaggaaagttttgtcaaacttaaaatcgaccgtttaggcaacatctcaaaagcataattttatgatcactcgttccatctacatcggcagtcctgcttacctcaagctcaaagacgagcagatgtatattgtggagccggagagtggccaaatgaaaggcaaaatccctgtcgaagacttgggtttgctgatgctcgatcattttcagattaccatttcccatcagctcatccagaaaatgatgggaaataacgtagttgtgataagttgcgatgcgcatcaccttccgcacggaatcatgctgccgcttcatggacataccgaacattcccatagaatcaaaggccaactggaggcgagcgaacccctcaagaaacagctttggaaacagacggtagagtgtaaaattgagaatcagaaagaagtcctccgaagattggggaactattatgaaccgatgtccgattatcaggcaaacgtaaaaagtggcgacagtaccaatatggaagggatcgctgcccagcattactggaagtatctcatcagtctcgattttctccggcaaagatttggcgattctcccaatgagtttttcaattttggatattctgttttaagaagtattgttgcaagagcgattgtagaaacgggtttgcttccggtattgggaatttttcataaaaacaaatacaatccttattgtctggcggatgatctgatggagccttaccggccctttgtagactggctggtcatggattggctcccacgcaatccggaaacggaagaattaaccaaagaattcaaagcgcatatcctccaaattgccaccaaagatgtgaagattgatgacaaaacaagacctttaatggtagcggtgaaaacaacggtttcgtctttgtacaaatgctacgctggtgaaaagcgacaaatttcttatcctgaactagtatgacaaatgaaaagacattttatttttcacatggtatattttacaaattaagttatgaatgccgaaaggtttaatgcataccgaatcatgtgggttttagttttatacgatttgcctaccgaaaccaaaaccaatatgagggatgccaatcttttcagaaaaaggttactggacgatggttttgccttgtttcagttttcaatgtacatgcgccactgtccaagtagggaaaatgcagaggtgcatataaaaagagtaaaatccatcttgcccaaagccggaaaagttgccattatgtgcattacggataaacaatttggggatattgaaatattttttgcccgaaataaagaggagccaccaccaacatatcagcaattagaacttttttagaatatatttcgtgagaaatattataaaaatagcatttcaaaaacagacctattgtgaaaagaaatcgaactgaaatctaccaatttaaaatcctgaaaaaacatcaaaaacctcctgaagcagaaggtttttttgattgaggttgtgtcgtatcccaaagatacctaaaaatgaaagcaattcacaactatttcgtgattttatatttgaaaaataaagttgtgtcgtatcccaaagatacctaaaaatgaaagcaattcacaacgtgcgccctccactccgttccgggctgtttgttgtgtcgtatcccaaagatacctaaaaatgaaagcaattcacaacttttatttactattggttttcactttggttgttgtgtcgtatcccaaagatacctaaaaatgaaagcaattcacaacctatttcgagggctagcttgacccatgggtgttgtgtcgtatcccaaagatacctaaaaatgaaagcaattcacaactgaatgatatcagcatcaaatatattgatggttgtgtcgtatcccaaagatacctaaaaatgaaagcaattcacaactaccagcgtcatttgattcatccgatttttgttgtgtcgtatcccaaagatacctaaaaatgaaagcaattcacaactatcgcatttggctggtttgcctagaaaaagttgtgtcgtatcccaaagatacctaaaaatgaaagcaattcacaaccaatctaaactaaaataatactctcaataagttgtgtcgtatcccaaagatacctaaaaatgaaagcaattcacaaccaacgatagcaaccatagcctatatattaatgttgtgtcgtatcccaaagatacctaaaaatgaaagcaattcacaacatttttacttttcaattttcattttcaattgttgtgtcgtatcccaaagatacctaaaaatgaaagcaattcacaacggttcctacctgtgtttttgaatatttgttgttgtgtcgtatcccaaagatacctaaaaatgaaagcaattcacaacagccacacggtaaaacaacattatcctaacgttgtgtcgtatcccaaagatacctaaaaatgaaagcaattcacaacaaccgatcccaacaataagatgaagtgggtgttgtgtcgtatcccaaagatacctaaaaatgaaagcaattcacaaccaaccgatgcagcgtttaaaa

SEQ ID NO: 1432 - DNA, 10925 bp, synthetic construct
  misc_feature 1..10925: note = Synthetic
  source 1..10925: mol_type = other DNA
atacctcaaatgccaggagtttatttagttctacggttatcagaatcagagccacaatttctagaaacaggaactggaggtttctataagcaaagaaatcctaacgtttcaatagaaacgctgaaaaacaaatggttaaaaggtgaatcattgttatatataggtaaggcgacaaatcttaatacccgtttaagttcatatttaaggtttggacaacatcaaaatgtaggacattggggtggtcgttttatttggcaattggcagatgctaacgatttgataatttgctggaaagttttagaagatatcattccacgagattatgaaaaagcttttctgcaaaagttttatgaagctaatggaaatttaccattcgcaaatttacaaaaataaaagaaaacagaatatgaaagataacataaagaaagtactattattaggttccggagctttgaaaatcggtgaagctggtgagttcgactattcaggttcgcaggcactcaaggcgttgaaggaagaaggtatcgaaactatcctgataaatccgaacattgctaccgtacaaacttcggaaggcgtggcagacaaaatctatttcttgcctgttactccgtatttcgtagagaaagttattgctaaagaacgtccggatggcgtattattgtcattcggtggccagacagccttgaactgcggtgttgctctttacaaggcaggaatattcgagaaatacaatgcacgtgtactcggtactccggtacaggctatcatggatacagaagaccgtgaactgttcgttcagaagctggatgaaatcaatgtaaagaccatcaagagtgaagctgttgaaaacatcgaagacgctcgccgtgctgccaaggaactgggttatccggttatcatccgtgcggcatatgcactgggaggtctgggatctggtttctgcgataacgaagaagagctgaacgtactggctgaaaaggcattctctttctctccgcaggttttggtagaaaagagcttgaaaggctggaaggaagtagaatacgaagtagtgcgcgaccgtttcgacaactgtattacagtatgtaacatggaaaacttcgacccgctgggtattcataccggtgagtctatcgtaatagctccttcacagacactgacaaacagtgaatatcacaaacttcgtgaacttgcaatccgtattatccgtcacatcggtatcgtaggagaatgtaacgtacagtatgcgttcgaccccgaatcggaagattatcgtgtaatcgaagtaaacgctcgtctgagccgttcttcagctttggcttctaaagcaaccggttatccgttggctttcgttgctgccaagttgggtctgggttacggtttgttcgatttgaagaactcggttactaaaacaacttctgcattcttcgagccggcactggactatgtagtatgtaaaatccctcgctgggacttaggtaagttccacggagttgaccgtgagctgggctcaagcatgaagtctgtcggcgaagtgatggctatcggccgtacattcgaagaagctatccagaaaggtcttcgtatgattggtcaaggcatgcacggatttgtagaaaacaaagaattgcagattgccgatatcgacaaggcattgcgtgaaccgaccgacaagcgtatcttcgttatctcgaaggcaatgcgtgctggatataccgtagatcagattcatgaactgacaaagatagacaagtggttcctcgacaagttgatgaacatcatgcagacttcgaaggaacttcacgaatggggcaacaaccacaagttgctgtcacagcttccaaacgatttgctgtacaaggcaaaacgtcagggattctccgatttccaggttgcacgtgctatcggttacgaaggagaaatggaagatgctatcatcgatgtccgtaaccaccgtaagagcgtaggtatcgtaccggtcgttaaacagattgatacgctggctgccgaatatccggcacagaccaactacctgtatctgacttatagcggtgtggcaaacgatgtacactatttgggcgaccataagagtatcgttgttcttggttcgggtgcttaccgtatcggatcgtcagtagaatttgactggtgcggtgttcaggcgctgaatactatccgcaaagaaggataccgttcggttatgatcaactataaccctgaaacagtatcaaccgattacgatatgtgcgaccgtctgtacttcgacgaattgacattcgaacatgtaatggatatcctcgatttggaaaatcctcatggcgttatcgtgtcaactggaggacagattccaaacaacctggcacttcgtctggatgctcagaaagtaaatatcctgggaacttctgccaagagcatcgacaatgctgaagaccgcgacaagttctcggctatgctcgaccgcatcggtgtagaccagcctgaatggagcgcgctgacttcaatggaagatatcaacgcctttatacagaaagttggattccctgtattggttcgtccgtcgtacgtgctttcaggagcagccatgaacgtatgttctaatcaggaagagctggaacgcttcttgcaactggcagccaatgtttcgaaaaaacatccggttgttgtaagccagttcatcgaacatgccaaagaagtagaaatggacgctgtagcacaaaacggagaaatcgtagcatatgctatcagcgaacacattgagtttgccggagttcactcaggagatgcaactatccagttcccgccacagaaactgtatgtagaaacagttcgccgtatcaagcgcatttctcgtcagattgctaaagaactgaatatatctggtccgttcaacattcagttccttgcccgtgaaaacgatatcaaggtaatcgaatgtaacctgcgtgccagccgttcgttcccgtttgtgagcaaggtattgaagataaacttcattgaacttgcaacaaaggttatgcttggtttgccggtagaaaaaccagaaaagaacttgttcgaactcgattacgttggaatcaaggcaagtcagttctcattcaaccgtttgcagaaagcagaccctgtattgggagttgatatggcttcaaccggagaagtaggatgtatcggtgaagatacttcgtgtgcagtactgaaatcaatgctttcagtaggttaccgcattccggaaaagaatatcctgatgtcaaccggtacaccaaagcagaaagtagaaatgctgaaagccgctcaggaactgaaggcaaaaggttacaatatctttgcaacaggcggaacatcaaaattccttgccgaaaacggaatagagaatactcgcgtatactggccgagcgaagaaggacatccgcaggcattggaaatgctgcataagaaagagatcgacatggtagtaaatattccgcgtgacctttctgccggagaactcgataacggttataagattcgccgtgcagcagtcgacctgaatattcctctggtaacaaatgcacgtctggcaagtgcctttatccatgcattctgcacgatgactatcgacgatatcgctatcaagagctgggacgaatataaataatcctgcctcttgataaaataaatattacttaagcgccacttcggaaagggaaagtttctgggtggcgctttttctttaaaaaggctgtttcctcgtggcaggattcagccttttgttgttcctttacgcatttttttatgatatcgatgtaagtatattcccgaacgagcgactaaatagagtaaaaaacatgtagaaaccagatgctgtatgaataaaaccctacaacaagaaaaagactttctcctgctgattgagtcgcacaaacgagtcatttataaagtctgttacatgtatgcaaccgatgatgaattgttgaacgacttgtatcaggaaatagtaatgaacctttggcgcgcctatcccagttttcgtggcgaaagctctccagccacgtggatataccgcatcagcctgaacacatgcatttcgtaccggcggaaatcaaaacatcagattcaggctgtaaccttaccggtcaatttcgaagcttttgccgaagacgacggaaacaaatcgtcgcaattgcgtgagctttaccggctgatacacgcactcaatccactggaacgggcacttatcctgctttggttggaagaaagaagttacgatgaaatagcccggatagtgggaatatcgaaaaacaatgtcggtgtccgtctgaaccgtatccgtgaaaaactgaaaaatatgtcgaaccaataaatgtctgctttatggaacttgaagaactgaaaaatcaatggaacttgcttagtgaacaactgaagaagaatgaaatcatcaatcatgaagcgataaaaggaatgatagaaaaacgtaccctgagtgcccgcgaccgtctgataggggccaatgtgattaccgtttttgtacttacaggcatgctgtttctgtttccgctagcagctactcgagtaattatcagacaagaacttctctggatgttctacatcgtgtttccactcctcattctatattcactatggaacatacatgtattgtataaattcaatctggctacccgtaccttactcgaactccaccgttggatattatcctataagcgcaggcttcgcatagaaatttggtgtactcccttccttacactgggactttttatctctgttttccttattcatcaccactaccgcaatctgcttatgattgttttcgatatcctgatgctgtctgtggggatgatggcaggatatatatgttatcgctatgtagataaacgttcggtagatgaaatagagcaaggaatgaaagacttacaggacctggagtaggttaaatacatcagaaaaataggatagttggcagtgttgtcagattgctgggcaacattgccaaaaccattgctgaagttttatgaaaaacatgctgaattcttgctaaaactttgtacaaactttttggaaatttgtacgaaagataaaataatttgtacaaataaatgacataatttgtacatcttttccgaaacacatgctgaagactttgggaaatgatggacggaagattgtgcccttattatcaaaaagaaagcgaccttcgaaaaaagaccgctttaaatgttttcacaacggaataatccttattgtgatttgcttcaatttagatattacaaatatagcagatataattcatatcaagaagattttttatatcttttttctatctttgagaaaatgaataaagaaaatcggttatgaaaaagatattgggtttagatcttggaacaaacagcattggctgggcagtgataaattctttagttgacgatgaaggaaaagagaagttgacaagtatatcttcttgtggcagtagaattattccgatggatgctgcaacattaggagattttgataaaggaaatgctaaatcttcagtcgcagaacggacacgactccgtggaatacgtcgtttgctggagcgtagtttattacgcagagagcgcttgcatcgggttttatctgttatgggatttttgcccgaacattatgcttctcaattagatcgatatggcaaattcttaccggaaacagagcccaaactggcttggtataaagataatacaggtagctatagatttttatttcaggattctttcaatgaaatgttggaggatttccgcttgtaccatcccgagctggtagcagaaggaaaaaagataccttatgactggactatctattatcttcggaaaaaagctctttctcagaaaatagccaaagaagaattagcctggatacttcttaacttcaatcaaaaaagaggatattatcagttaagaggagaagaagaacaggaagataataagaaatcggtagaatattatgcactgaaggtagttgcggtagaagattccggtgagcgtaaggggaaagatatttggtataatgttaagttggaaaacggctggattgaccgtcgggccagtagtgttcctttagattggacaggcaaggtaaaagaatttgtggtaacaacagatttagatgatgcgggaaatcctaaaaaagataaagacggcaatgtgaagcgtttttttcgggctcctaaagaaaacgactggggattattgaaaacaaagacccaaacacagatcgatgaaagcggtcagactgttggagcctatatttatgattcattgctccgtatgcctgatcagaaaataagggggaaacttgtgcgcacgatagaacgtaaatattataaagatgaacttcgtaagattttgctcaagcagaccgagtttcatgcagctttgcaggatcataatctgttgctttcttgcatagaagaattatatccaaacaatgaagcacatcgcaggctgctatcttcttctagttttacttattttttgctggaagatattttgttttatcagcgtccacttaaaagtcagaaagggctgatagatgattgtccgtatgaatcgcatgtatatcgggataaaaaggatggtagtttgcaccgtactcctttaaaatgtatatccaaatcacatccgttgtttcaggaattccgtttgtggcacttcctttctttcctgcgtatttatcagcgtgaaagaatgatagatggttctcttaaactggatgtagatgtgactaatgaatttttgcagaacgaagatgattatgtgaaattattcgactggctgaatggacgaaaagaaatagatcaaaaaacgattctggcatacaaacctttcggattaaagaaaaatgaacaacctaaatatcgttggaattacgtagaagacaaaagctatccatgcaatgaaacaagagcagatatgatatcccgattaagtaaggctggagtttcagaggggttcttaacagaagaaagggaggaggccttatggcatattttatattctatatctgataaaaaggagttgacaaaagctttaggtacttttgctgagaagaatgggctgaatgaagcttttgttgagcagttttcccaaatgccaccttttgaaagtaactatgctgcttattctcttaaagcaatccgtaaattgcttgcactcatgcgtatgggtaaatattggaatgagcaggatattgataagcaaacgcgtagtcgaatagaaaaaattctgacaggagaatatgatgaaactattcgtactcgtgtacgtgaaaaggctatacatttaacggatatatcttctttccgtgggcttcctttatggttggcatgctatgtcgtttataatcgtcattctgaagcaaaagaacttgtaaaatgggaaactcctgctgatatagatcacttcttgagtaaatttagacagcattcgttacgcaatcctattgtagagcaggttcttatggaaacattgcgtacggtacgcgatatttggaaacaggaaggacagattgatgaaattcatgtagaattaggtcgtgaaatgaaaaatccggctaaagaacgtgcccgtataacagcgcaagcattggaaaacgaaaataccaatttgcgtataaaggcgttgcttacagagttcatgaatcctgaatttgagatagagaacgtccgtccttattcaccaggtcagcaggaaattttacgaatctatgaagaaggagttttgtcgggtgttgcagaaaaagatttgcctgaagatattatttcgatattgaagaagttcaaagaaaatgatgtaaagaagcgtcctactacctcagaagtcttgcggtataaactatggctagaacaacggtaccgttcgccttataccggcaggattattccacttggcaaattgtttactcctgcttatgagatagagcatgtaatacctcagtcacgctattttgatgattctatttccaataaagtaatttgcgaatcagctgtaaataagttgaaagataactgcttgggatatgaattcattaaaaaacactcaggtgagattgtggaattgggcaatggtgagaaagctactgtttttacatcagaagaatatgaacattttgtgaaagagtcttaccttggtaatggtaagaagatgaagaaactgctgttggaagatatacctgataactttatcgaacgtcagttgaatgatagccgatatattagtaaagtcgtaaaatctttgctttcgaacattgtatgtgaagagggcgagcaggagggtatgtcgaaaaatgttatcgtttgtacaggtggagtaacggaccgcttgaagaaagattggggagtgcaggatgtatggaaccggattattcttccacgttttctgcgtttgaataaaatgacggacagcacggatttcacttctgtaagtacgaatggacatttattacctgccttgcctttacatttacagaaaggttttaacaagaaaagaatagaccatcgtcatcatgcgatggatgccattgtgatagcgtgtgccgatagaaacatagtaaattacttgaataatgcttctgcacggaaaggttctgaaatctctcgttatgacttacagcatttattatgcgataaagtaaagacagactcgaatggcaattataaatggatgttacgtaaaccttgggatacgtttacgcaggatgtgtatacagcattgacaaatattgtagtcagctttaagcaaaaccttcgggtaataaatcgtactacgaattattatcagcattataatgaatcaggagaaaagaaaatgattccgcaggttaaaggtgatcgttgggcgattcgtaaaccgatgcacaaagatacggtatatggtgaggttaatttacgtagggagaaaacacttcctttgaaagatgtgctcaataatccatcgattgttgtggataagtcattgaaaagcaaattgcatgagttgttaaaagctcaatatgatttgaaggcaataacaaagtattttgaggcacaccaagatgtctgggccgatattaatttgaagaaaataaaagtctattattttacgaaggaaacaaatgagcgttttttgcaacacgtaagtcattggattcaagctttaatcagaaaaagattcaagaggaagttacagatacaggtatacaaaggattttgctacgtcatttgcagctaaatgataacaatccggatattgctttttctccagatggaatagaacgtatgaatcagaatatgaatattttgaatgatggtaagggacatcaacctatttataaggtacggacttatgaaaaagctgagaaatttgctgttggagaacatggtaataaggttaaaaagtttgtagaagcagctaaaggaaccaatttgttttttgctgtatatgaatctatacaagaagatgaggctacaggaaagcaagtacgtaaacgtacttttgcgactatacctctaaatgaagtcatcaagcgtaaaaaacaaggactatctgttgctccggaagattcgaatggaaatctgccaatatttgttttatctcctaatgatttggtttatttacctacggaagaagaacgtaatagtggtaaggtaactcaacctctggatagagagagaatttataaaatggtatcctcttctggaaatcaatgtttttttataaaatcatctgttgcaacttctatttgggataagagagaatattcttctttgaataaaatggagcgtgctataacagaagaaatgataaaagagatttgtgtacctattaagatagatagattaggtaatgtttctttgatataaatattgtggtactatgattaagaaaacactgtattttggtaatcctgcttatctatcactgcaaaataatcagttggttataaaactaccggaagtggagcgtaatgcttcacttccagaaaattttaaaagccgatcggttataaccagaccggtagaagatattggtttggtgatattagatcataagcagataacgattacctcaggagtgcttgaggcacttttagaaaataactgtagcgtcattacttgtgattataaaagtatgcctgtagggctattattgcccttgtatggaaatactcttcaaaatgagcgatttagagaacaattaacggctagtattccattgaagaaacaattgtggcaacaaacgataaaagttaaaatacagaatcaggcaaatgttctacaagattgcttgcaggaaaatcataaatgtatgagagtgtgggctgaagaggtgaaaagtggtgatcctgataatttggaagctagagctgcggcttactattggaaaacactttatgctcatattccagaatttacacgtgatcgtgatgggatacctcctaataatttattaaattatggatatgcaattttgcgtgctattatagctcgtgccttagtttccagcgggttgttacctactttaggaatacatcatcataatcgctataatgcttattgtttggctgacgatataatggagccttaccgtccttatgtcgataagcttgtatttcagcttgttaaggattatggtgaaaatgtagagttaacaaaagaaattaaatctgttcttttaacgattcctacgcttgatgtcgtcataggtaaaaagcggagtccattaatgatagccgccactcagacaacagcttctttatataaatgctttagcggagaacttcgtaaaattgcttatcctgaaatgtgatggatagatacagtgaatatcgtgttatgtggatacttgtattttttgatttgcctacggaaactcagaaggacaagaaagcctatgcattatttcgtaagaatttac

SEQ ID NO: 1433 - DNA, 10911 bp, synthetic construct
  misc_feature 1..10911: note = Synthetic
  source 1..10911: mol_type = other DNA
gcctgtaggagccgaaatcaatatggttatttcctgcggaatcagagatgaacgcggcgtttggggtgaaagaatgagaattcctttcgacgaagtgtatcaacgattttgaaatccgtttttgctcacatttccaaaatagcgagacgaagcgaagcgcactgctaatcgataatgagaaagcatctgaagaagtgtgtaatcgttctttttagttaaatccacattaagcaataggaaaataataaagttcaaattgttaatatagaatgttttaatctccgagtcatctccgttgtgatttgctttactcccttcggtcgtgaccgttggttcagaattgtatctttgatctattgataacagctgacctgaagtttttgatgacagcaacttcgttgtgatttgctttactcccttcggtcgtgaccgttggttcagaattgtatctttgatctattgataacagcggtcgcaaatggaaaatatttccacatgctgttgtgatttgctttcagaattgtatctttgatctattgataacagccatcagatccaatccacaaaccgtcgttgtgttgtgatttgctttcagaattgtatctttgatctattgataacagcatagcaagtgataataaattaaccccatctgttgtgatttgctttcagaattgtatctttgatctattgataacagcaagttctccggagagctttcattaatggcagttgtgatttgctttcagaattgtatctttgatctattgataacagctgcattattgtcgccaccacgatattgcgcgttgtgatttgctttcagaattgtatctttgatctattgataacagcgacggtatcctttgccaactcacggctccagttgtgatttgctttcagaattgtatctttgatctattgataacagcaaatttgctgccgtcgatacagcaaccttgttgtgatttgctttcagaattgtatctttgatctattgataacagaaaaagacctaccttgtaaaatcattccaccgttgtgatttgctttcagaattgtatctttgatctattgataacagccagttccagttagcaaccattaacatgcgagttgtgatttgctttcagaattgtatctttgatctattgataacagcaacatgaaaaagaaagtatttatatcagggttgtgatttgctttcagaattgtatctttgatctattgataacagccattgaatagcggcgttgtaacgactccgcgttgtgatttgctttcagaattgtatctttgatctattgataacagccccgccaaatggctgccagggccaagaacggttgtgatttgctttcagaattgtatctttgatctattgataacagccgtttctgcttccacattttcaaatgtcgggttgtgatttgctttcagaattgtatctttgatctattgataacagcaaatctctttatagccctttttgttcagtcgttgtgatttgctttcagaattgtatctttgatctattgataacagctaacataagcatctgcatattgcagtctgtgttgtgatttgctttcagaattgtatctttgatctattgataacagcccggcgaatgtcgttgcgctgccatacgtgttgtgatttgctttcagaattgtatctttgatctattgataacagcagctctccggagaacttagccaaatataatgttgtgatttgctttcagaattgtatctttgatctattgataacagccaagggaaagacaaagtacatgccttatcagttgtgatttgctttcagaattgtatctttgatctattgataacagcctccaccatatcgtcctacagggaacgccgttgtgatttgctttcagaattgtatctttgatctattgataacagctgggtatatcccaatatcacaccaaccaaagttgtgatttgctttcagaattgtatctttgatctattgataacagccattgttcagaaagtgcccgtggaggtacgttgtgatttgctttcagaattgtatctttgatctattgataacagctacttctttgcatacacggccaatcaaagcgttgtgatttgctttcagaattgtatctttgatctattgataacagcggtacaccggcggtttaaacgacacaatatgttgtgatttgctttcagaattgtatctttgatctattgataacagcccgactaacaaatagggatcaatggaagctgttgtgatttgctttcagaattgtatctttgatctattgataacagccaaatcattgcctacatgatacgcgatcaagttgtgatttgctttcagaattgtatctttgatctattgataacagcgaagaaaagagtgatcacttttgcttcaagttgtgatttgctttcagaattgtatctttgatctattgataacagcataagattcattgatttgatacctattcttgttgtgatttgctttcagaattgtatctttgatctattgataacagcactttcgatgctatcaacgaaagcaaccccgttgtgatttgctttcagaattgtatctttgatctattgataacagctataattttagacaacatgcaaaattacatgttgtgatttgctttcagaattgtatctttgatctattgataacagctttttgcaccgtgaatggtacttcacgggcgttgtgatttgctttcagaattgtatctttgatctattgataacagcaaaaaaaattatcatagaaccaggagattagttgtgatttgctttcagaattgtatctttgatctattgataacagcgttgtatctttacatcagcataaaggactagttgtgatttgctttcagaattgtatctttgatctattgataacagcagcctaatcataaggtttccattagcgtcgttgtgatttgctttcagaattgtatctttgatctattgataacagctaatcttttgcaaaccgtttacaagaaatcgttgtgatttgctttcagaattgtatctttgatctattgataacagccaattgatagagaggaacaagatctattaggttgtgatttgctttcagaattgtatctttgatctattgataacagcaccaatctaatcggtataaattcaaacactgttgtgatttgctttcagaattgtatctttgatctattgataacagcacacctgcattcaatagtcaaacattcaaataattacagctaaaatcaggattaaaaaatcggcgacttttcagtactgttatcacaaaaaacctgcaattttcttattgcaggtttttttatatccttcactttatgcttcaggtatcattcccaaactctaatattatcaataaaaaaacgaccccgcacgaatgcgagaccgctttgcatgttttcacaacggaataatccttattgtgatttgctttagaattatggagcaaaaatatacaaaaaaatcatacaaaaaaactttgttgatcaaaatattattttttaactttatgcctgttttaaagcacttaaaatatagcattatgaagaaaattttaggattagatttaggtacaaatagcattgggtgggcattgatacaacaagattttgatactaagaaaggtgaaattcttggaatgggaagtagaataattcctatgacacaggatgtgttagatacatttagtggtgggaaaccgcttgaaacgcaaactgccgcccgaacaagctatcggggaattcgtcgcattcgagaaagacatttgctccgtcgcgaaagattacaccgtgtattaaatatattgggattcttacccgatcattatgcaaatcaaattgattttgaaaaacgattaggccaattcttagacgaaaaggagccaaaacttgtttataaaaataaagaatttatttttaaagaatcttttgaagaaatgctgaatgatttcaaacaatcgcagccttcattattttataaaaaatcaaacggcaaagaaactaaaattccgtacgattggacgatttattacttacgaaaaaaagcattgactcaaaaaatagaaaaagaggaactggcttggataattctaaacttcaaccaaaagcgagggtattatcaattgcgtggtgaagaagaagaggagaatctgaataaattggttgagtttcactcgctaaaaattgtggacgtaatagcagaagaaaagccgaacaacaaaggagacctttggtattcactttatttggagaatgggtggatctatcgtcgttcgagcaaaatacctttatatgattggaaagacaaggttcgcgattttattgttactaccgacttaaatgatgacggaactataaagaaggacaaagaaggaaatgaaagacgaagttttagagccccaagtgaggacgactggacattgctgaaaaagaaaacagaacaggaaattgaaaaatcaaataaaacagtgggaacttacatttatgaaaacatagtacaaaacccttctcaaaaaatacggggcaaattggtacgcaccattgaacgaaaattttataaagaagaattgatagccattctcaaaaagcaaatagaactacaacctgagttatttacagatgatttgtataatgattgtgtacgcgaactttatcgtaacaatgaagctcaacaactcgtattgagcaaacgagattttgtgcatttgtttgttgacgacattattttttatcaacgaccgctccgaagccagaaatcgtccattggcaattgttcgttggaataccgggtttataaagacaaagacggtaatcaggtgaaggaatatctgaaggctattcctaaatcgcacccgttttatcaagaatttcgtgtgtggcaatggttgtccaatctcaaaatttaccgtaaagaagatgatagtgatgttacaaatcattttataaagaacgatgaagacaaagtagctctttttgaatttttgatggagcaaaaagaagttgggcataaagacattttaaaacatttactgacgccagttttgaaagaacaatatccaagcgcaaaaacagcagcatttaacaaagaagtagataaagaaattgcaaaatatcgctggaactatgtttttgacgattctaaagaaaaagaagaagataaatcaaaaaaatatccctgcaatacaaccggatacgaaatcagacgaagattggttaaggtttcaaatgttccaatcaactttcttactcctcaaatagaacagcatttgtggcacattatctattcggtaaccgacaagaaggagtatgaagcagctttaaaatcatttgctaacaaatatcatttggaagaaaattcatttgttgaagaatttaggcattttcctccttttaaaagtgaatatggagcatattcagaaaaggccatcaaaaagcttctgccattaatgagactcggtaagtattggtgttgggatgctattgatagtaaaacgcaaggccgaattgataagataatttcaggcgaatacgatgaaactataaaaaaccgtgtcagagaaaaggctataaatcttactgacaatactcattttcaaggattaccaatttggttagcaagttatatagtttatgatcgccattccgaagctgatattgcaggcaaatggaattcggtaaccgatttagaacaataccttgaagatttcaaacaacactcgttgcgtaatccaattgttgaacaaatcgttaccgaaacattgcgggtggttcgagatatttggaaatattatggacaaggggcaaaggatttcttcaacgaaattcacgttgaattgggtcgtgatatgaaaaataatgctgatgaccgtaaatggctgactaagcaagttactaataacgaagcaacaaatctaagaataaaagcattgctaacagaattgaaagaaaattcagatgggaaattggcagttgagaatgttcgcccttactctttaatgcaacaagatgcgttgagaatatacgaagatggtgtgataaactccaagattgaattgcccgaagatattattagaatcagcaaatcagctcagcccagcaaaacggaattacagcgttataagttgtggcttgaacaaaagtatcgttctccctacaccgggcaaatgataccgctgggacgcttgtttacggaagattatcaaatagaacacatcattcccaaatctcgctattttgacgacagctttaacaacaaagtgatttgtgaatctgccgtaaatcagttgaaggacaatcaacttggtttggagtttatcaaaaaccaccaaggcgagaaggtggaatgcggaatgggcaaagtagtggaaattttaaaagaggaagcctatcaaacgtttgtaaaagagcattattcaaaaaataaaactaagcgtcaaaatcttttattggatgaaattcccgagggaatgatttcccgacaaatgaacgacacccgctatataagtaaatttatttcaggacttttatcgaatcttgttcgtgccgaaaaagatgacgatggaattaattctaaaaatcttattcccggaaatgggaacattaccactgttttgaaaaaagattggggaatggatgccgtttggaatgatttgattttacctcgttttgaacgaatgaatcaattgactaacactacagcgtttacttattggaacgaacaatatcaaaagtatttgcccgtggattattcgccaatagattcaaagcgaatcgacaagaaacgaatcgaccaccgacatcacgcaatggatgcgttagtaattgcttgtatgacaagagaccacgtaaatctgctcaacaatcaatcagcaaagtctgaaactacacgatatgatttacaaaacaagttaagaaacaaaagcaaagaaacgtggattgataaaaagacgaacaagcaagttgaacgagatgttttcaaagaattcaaaaagccttgggataactttacaatggatgcaaaaatcgcattggaaaatattatagtcagtttcaaacaaaatctgcgagttatcaataaagccacaaactattatgaaaaatgggttgaaaaagaaggcaagaaagtgaaagctaaagtaaagcaggaaggaacgaactgggcaatcagaaaaccattacatactccaatgccctacggaaaaaagtcctacttctttgatttattaaaaatagctgaatcagtaggtaaaagagaatacattattgatgatgaaattaaaactaaagttgaaaaagtactagttgaatgcaatggaaaaattactgaagcgcagaaaaaattgaaacaatttccattaatagataataacgggaatcccattattcaaacgacatttcgaattaatacagaaaaatttagaaggcgacagccaatttctttgctctcaaatcgaggacaaggaggaataaaaactattgaggatgcaaaaaaaatcatatataaaattgtcgacttcaaaattcagaaagatttgttaaagcatatcgaagagtgcgacgacgatttagataaggcatttagcccagaaggcattgaaaactttaattcaaaaagaaagattccaatctacaaaatcccaattggagaaagtggaagcggacggttttgtgtcgggactaaaatttcaacgaaacataaatgggtagaggcagataaagggacaaacctatattttgcaatttacgaatcaaatgacggaaaacggagttacgattcaattcccctaaatattgtcattgaaagattaaaacaaggtttgcctcccgtggatttcagaagtgaaaacgacttctatctaacacccaacgatttgatatatgtaccgaatgaagacgaaaaaataaacatcaagaatcttaaaccaagtgaatttggcgaagagcaaaagaaaaatatctataaagtggtaagttttactggcaatcgactctcttgcattccctattccgttgcatcacccattgttaataaagtggaatttactcagcttaataaaatagaattcacaaaagaaaaagaatcacttatcaaactcaaaatcgaccgtctcggtaatatctctttatagataacctatatgcaactccttattcccgatgccacctaccatattatcaaccacgccaatgggttcgaaaatatcttcaacaaagaacggaatgatcgtttctttttagaaaaatatcagttttatatctcgcccattgcagatacgctcgcatattgcctgatgccaaatcattttcatctcgttattcgtattcgaaagcgcgaagttattgaaaaacaaatccaatctaaatctaccaaattcaacgacaacgaaatagctaaatatctttctaaccaaatcctgtccatcacggattttgttccatttattcagattgaggatatagctcgtacaacgaaatcaggcagcaaaaaagtgaagtggtggacgtggaaaaattgctcaaatcgtttggaggagtgaagggttttgaagaaatacatcataagcatcttgagaaatggaatcagatcgtcaaacttgaaacaccttaacccatgattaagagaaccctctattttggcaatccggcttacttatcgaaacgggatgaacaattggttgttaaactgccggagattgtaaaaaacgatacattacccgactcctttaagcaaaaaagtgaagtgacaatccccatcgaagacattggcgtgatggtaatcgatcatcagcaaatcaccattacgcatggactgcttgaaagccttttgaacaataatacggcagtgattacgtgcgatagccatagaatgccggcagggttactgttgccgctttcgggtaacactacacaacgggaacgttggaatgatcagatagccgcatcagtaccacttaaaaagcaattatggcaacaaaccattaaagcaaagatcgccaatcaagcaaccctcttgcagcgtcgcaccaacgtcaacatcaaaaacatgctttattgggctgatgaagtgaaaagcggcgacagcgaaaatcatgaggcacgggcggctgcttactattggggcaatcttttccctaccgttcctgattttcgacgaggacgggaagaagcgcctcccaaccatcttttgaattacggatatgccatcttaagagcggttgttgcacgtgccctggtaagttccggcctattgcccacctttggaatccatcatcgtaaccgttacaatgcctattgtttggctgatgatgtgatggaaccctaccgtccttacgtggatgacgtcgtatgcagcatagtagcgagcggttgttcttatcaggaattgacaaagacatggaaggaaaaattattgcaaatacccacatgtgatgtggttattgaaggagaacgcagcccgttaatggtaggggtgcaacacacaaccgcttcgctgtataaatgttttagcggtgagggaagaaaaataagctatccaacgatggattaaaaacacgaataccttggatagatttaacgaatatagaatcatgtgggtgatggtttttttcgatttgccgacagagacaaaaaaagaccgcaaaatttatacggattttcgaaagaagatgatgaaagacggctttgccatgtttcagttttccatctatctacgccattgtccaagccgtgagaatgcagatgttcacataaaaagggtcaaggcctcattgcctgaaaaaggaaatattggtatcctgacaattaccgataaacagtttggaatgatggagctgtttcaggggaaagcagtgaaagatgttgatgtgccctaccaacaattagagttgttttgaacccaaacaatcccgatatatccaatgccttgtttcgtggccgttacattgatttctatgcatttttgtgccgcaagttttccggtttattagttcagctctcatcgtggcagaaacccttactgaaaataaaatcaatcttaccccaaaatggagaaatggagttttaacccaactttccaaacatcaagctgaatttattgctatacagtttaatatactctctggcagatgcgtttgggtactacaaatttttcgtcgcttaacccaactttccatccaccaagctgaacttattgctatacagtttaatacactctctggaggatgcgtttgggtactaccaatttttcgtcgcttcaagggttgatggttgtattttagggcatcgtatatttcaatcacgttggtttgtggcgtggtacaatttctgaaagccaccgtttcacccagtttattttcggccgtagttgtgaatcctttttgcgttgacatcatgcggatgatttctgtccaatggggtttgatgccctgttttttgagctgataccgaatggtgtttaccaaccagtaagccaataatccaaggagtaaatgtaccttcgatgctccttccagtaagttaacaattgagccacctgcttgcgttgctcagcatctaattcgggaataaaacctgaaagcaacaaaatacgactgcaaacaacttccacaatgtcgcggtagttctccttgatgcgtatataactctcaggctttttcgtaataggacatggccgaactgataagtcgaaatgcatgacacaaaggtctgtatttcaatttaaaatcccaaatttttggggtagtacaaaacaatcttcaaaaaatatggaacttgattttcaaactattataatgcaacaggatttaaatggactgtgattttagataaaatcccgttgtatttaactattatttaacgctttt

SEQ ID NO: 1434 - DNA, 10768 bp, synthetic construct
  source 1..10768: mol_type = other DNA
  misc_feature 1..10768: note = Synthetic
atcctcgacgacgggagccgctttcatggcaagtcgttcggctatgagaaaccggtagccggtgaagtggtgttcaacacggcaatgaccggataccctgaaagcttgaccgacccttcgtatgccggtcagttgatgacactgacctatccgctggtcggtaactacggcgtgcctccgttcacgttcgaagcaaacggactgcccactttcatggaaagcgaaaaaatccatgccgaagcgattatcgtgagcgactacagcgaaaagtattcccactggaatgcagtagaaagcctggccgactggctgaagcgtgaacagattccaggtatcacgggcatcgacacacgcgaactgaccaaggtgctgcgtgaacatggtgtgatgatgggaaaaatcgtgttcgacgatgaaccggacaacatccctgaagccacttatgctggcgtaaactacgtagacaaagtttcctgcaaagaaatcatccgctacaatgaaggcgaaggcaagaaaaaagtagtgctcgtagactgcggcgtgaaatcaaacatcatccgttgcctgctcaagcgcgacgtagaagtgattcgcgtgccttgggactacgacttcaactccctgcaattcgacggtttgttcatctccaacggtccgggcgaccctgacacctgcgatgcggctgtacaaaacatccgcaaagccatgcagaacgaaaaacttcctatcttcggaatctgtatgggtaaccagttgctttcaaaggcaggaggcgctaaaatctacaaactgaagtacggacaccgcagccataaccagccggtacgtctggtgggcacagacaaatgcttcatcacctcacagaaccacggttatgcagtggacaacaacacactgggagccgactgggaaccgctcttcatcaacatgaacgacggctccaacgaaggtatccgccacaagaagaacccttggttctctgcacagttccacccagaagctgccagcggtccgaccgatacagaattcctgttcgacgaatttgtaaagttgctgtaatccattaaaacaaagaagacaatgaaagaaaatataaagaaagtattgctgttaggttcaggagccctgaaaatcggtgaagcaggtgaattcgactactccggctcacaggccctgaaagccttgaaggaagaaggtatcgaaaccatcctgatcaacccgaacatcgccaccgtgcagacctcggaaggtgtggccgacaaaatttacttcctgcccgtcactccttatttcgtagagaaagtcatcgccaaggaacgtcccgatggtgtgctgctgtcgttcggtggacagacagccctgaactgcggtgtggctctttacaaggcaggtgtattcgaaaaatacaatgcccgcgtactcggtactccggtacaggccatcatggatacggaagaccgtgagctgttcgtacagaaactggacgaaatccatgtaaagactatcaagagtgaagcggtagaaaacatcgaagatgcccgccgtgctgccaaggaactgggttatccggtcatcatccgtgcagcatacgcactgggaggtctgggttccggcttctgcgacaacgaagaagaactgaacgtgctggccgaaaaagcattctctttctctccgcaggtattggtagaaaagagcttgaaaggctggaaggaagtagaatacgaagtagtgcgcgaccgctttgacaactgtatcacggtctgcaacatggagaacttcgacccgctgggtatccacaccggtgaaagtatcgttatcgcaccttcacagacactgaccaacagtgaataccataaactccgtgaactggctatccgcatcatccgccacatcggtatcgtgggtgaatgtaacgtgcaatacgctttcgacccggaatcagaagactaccgtgtgattgaagtaaatgcccgtctgagccgttcttctgccttggcatctaaagcaaccggttatccgctggctttcgtcgctgccaaactgggtctgggctacgggctgttcgacttgaagaactcggttacaaagacaacctcagccttctttgaaccggcattggactacgtggtatgtaagattcctcgctgggacttgggcaagttccacggcgtagaccgcgagctgggttccagcatgaagtcagtaggtgaagtcatggccatcggacgtactttcgaagaagccatccagaagggtctgcgtatgattggtcagggcatgcacggtttcgtagaaaacaaggaacttcagattgccgatgtagacaaggcactgcgcgaaccgaccgacaagcgtatcttcgtcatctcaaaagctatgcgtgccggctacaccgtagaccagattcacgaccttaccaagattgacaaatggttcctcgacaagctgatgaacatcatgcagacttctaaagaactgcacgaatggggcaacaaccacaaactgctgtcacagcttccgaacgaacttctttataaagccaaacgtcagggattctccgacttccaggtggcacgtgccattggttacgaaggcgacatggaagatgccatcctcgacattcgcaagcaccgtaaaagcgtaggtatcgttccggtagtgaaacaaatcgatacactggccgctgaatatccggcacagaccaactacctgtatctgacttacagcggtgtggccaacgatgtacactacctgggcgaccacaagagcatcgttgtactcggttcgggtgcttaccgtatcggttcatccgtagaattcgactggtgcggcgtacaggcactgaacaccatccgcaaggaaggctaccgttccgtgatgattaactacaacccggaaaccgtatctaccgactacgatatgtgcgaccgtctgtacttcgacgaactgaccttcgaacgtgtgatggatatcctcgacctggaaaacccgcacggtgtgattgtatctaccggcggacagattccgaacaacttggcactccgtctggatgcacagcacatccacattctgggaacttccgccaagagcatcgacaacgcagaagaccgcgacaagttctcggctatgctcgaccgcatcggcgtagaccagccggaatggagcgcactgacttccatggaagacatcaacgccttcattcagaaagttggcttcccggtactggttcgtccgtcatacgtactttccggtgctgccatgaacgtatgctccaaccaggaagaactggaacgcttcctgcagctggctgccaacgtatccaagaagcatccggtagtagtgagccagttcatcgaacatgccaaagaagtagaaatggatgccgtggcacagaatggtgaaatcgttgcctacgccatcagtgaacacatcgagtttgccggagttcactcaggtgacgccactatccagttcccgccgcagaaactatacgtagaaaccgtacgccgcatcaagcgcatcagccgtcagattgcgaaagaactgaacatctccggtccgtttaacatccagttccttgcccgcgaaaacgacatcaaggtgattgaatgtaacctgcgtgccagccgttcattcccgtttgtcagcaaggtattgaagatcaacttcatcgaactggctacgaaagttatgctgggactgccggtagaaaagccagaaaagaacctcttcgaactcgactatgtaggtatcaaggccagccagttctccttcaaccgtctgcaaaaagccgaccctgtattgggtgtcgacatggcttctaccggtgaagtgggctgtatcggtgaagacacttcttgcgccgttctgaaatccatgctttccgtaggctaccgcatcccggaaaagaacatcctgatgtctaccggtacgccgaagcagaaagtggaaatgctgaaagctgcacaggaactgaaggacaaaggctacaacatcttcgccacaggcggtacttccaagttcctcactgaaaacggcatcgaaaatacccgtgtattctggccaagcgaagaaggcaaaccgcaggcactggaaatgttgcacaagaaagaaatcgacatggtagtcaacatcccgcgcgacctgactgccggcgaactcgacaatggttacaagattcgccgtgccgccatcgacctgaacattccgttgattacgaatgcccgtctggcaagtgccttcatccatgccttctgcacgatgagcatcgacgacatcgaaatcaagagctgggacgaatataaataatccgtacagctagatacagaaaaagttatcccctcctgaacgcttcgttatgaatgaattcgggaggggattttttgtgtctggcactgcaaaaaatactttagaaatgacaatcaaatttccaccaaaagatattaattcatatttttgtctcatacacaataacaatcatgaaagtagtagaagtaatagtagaaaacgcatgtaacaacttgagtgcctacatcgaaggagctcccattttcacagtcggtaatgacctgaaagagattgaaaagcacatgacagaagccattgatttatatctggaagaaagcccaaatccttgtgaaatactcaaaggagaatttacgctgagattcaaaacagaaacggcataaaaaaaagcccaccgataaaggacgatgggccagagcctaaatgttttcacaacggaataatccttattgtgatttgcttcattttagtgttacaaagttagaaagaaaaacgggagaaacaaacatttctcataaaaagttagtagctttgggaaacaacccaaaagaccaaagtcatgaagcacattttaggattagatttaggaaccaacagcataggatgggcagttattaatgccacaactgatgaaaacactcacaaagaacaactcataggaatcaacgctgcaggcagcagaattattcctatggatgccgcccaattaggagatttcaataaaggaaataccgtttcacaaactgccaaccgcacacaataccgcagtacccgacgattacataaacgaaaaaaacttcgccgggaaagactacaccgcgtattacaactattgggcttccttccaccccattacgctgctcaattagaccgctatggaaaatttatagctaattcagaacccaaattagcctgggtaaagaataccaatcatttatatcattttatctttcaggaatcattccaagaaatgctaaacgattttactcaagcagatggaagcgctaaaaaaataccgtatgactggactcttttttatttacgcaagaaagctctcacacaaaaaataaagaaagaagaactggcctggattctcctaaatttcaaccaaaaacgagggtaccatcaactacgggaagaagagactgaaaaaccaacatccaagacacggctatattttgacagccaaacaatcacagacatcgttgatacaggagaaacttacaaaggattaaaaatatttaccctcactttagcaaatggagaaaaaggtaaatggtatgggaaaaacatacccgactggaaaggtcaaaagaaagatatcattgtaagcatagatttggataaaaacgggaatgacaaatgtgatgaaagcggagaacccatccgccgctttaagattcctacagaacaagaatgggaagaacaatggggacttgtcaaagccaagactgaaaaagacctgaatacttcaggaaagaaagttggtacttatatttacgatacattattacaagcacccgaccaaaaaattcgaggaaaactgattcgcaccatcgaacgtaagtattacaaggaagaactctatcaaatactaacgacacaagaaaagttccaccccgaactacaggacaaaaacttgttgcaagcctgcattgaagaattgtatcccagcaacgaagcacatcgcaatacaatttctaaatatagtatgtccaaattgctcgttgaggatgtcatattctatcaacgtccactgaaaagcaagaaatcactcatcagcgattgtccgtatgaggagcatacttatgtagataaggaaaccggagaaatccataccgtcccggtgaaatgtattgccaaatctcatcccctcttccaagaattccgtctttggcaattcctgtccaatttaagaatctatcaaaaagaaggaaccctcaatggaaagcttaccactgatatagacgtaactaatgaatttctgaaaaatgcagacgattatgtgaatctttttgattggctcaaccaaaagaaagaaatcaaacaagatgcgtttttcaaatatccagcatttggattaaagaaaaatgcggcaaattatcgctggaattatgtagaggataaaacatacccctgcaatgagacacattctagaatattgttccattgggtaaaaacagatatagaccaatctcttctgaccattgatttggaggaaaaattgtggcatatcttatactccatctcagataaaaatgagcttcaaaaagcactgcaacattttgctgataaaaacaagttgggacataagtttgtagacactttccaacaaatacctccattcaaaaaagattatggttcctattctgctaaagccatcaaaagattgcttcctctcatgagaatgggaaaatactggcatcctgaatcaatagataatacaaccctcacccacatccatcaaattttgaacggagaaaaggacgaagtaaccgcaagcagaataaaaggaaaagccatccatttggacaacctttcttcattccaaggactacctacatggttggcatgctatatcgtatataaccgacactctgaaataaaaaacattacgaaatggcagcagccttcagatattgatgcttacttacaatcattcaagcaacattcactgcataatcctatcgtggagcagattataatggaaactttacgtactgtacgcgatatatggaaacaaataggtcatatcgatgaaattcatgtcgaattgggacgtgaaatgaagaatcctgccgacaaacgtaaaaaacttactcagcagatacaagaaaacgaaaacaccaacctccgtattaaggcacttctcactgagtttgtaaatcctgagtttgagattgagaatgtacgcccccactctccaagccagcaagatttattacgcatatatgaagaagaggttttaaacgaatcagctaaaaatatgccggaagatatagccactatcctgaaaaagtttaatgaaactgatgccaaaaaacgcccctctacttctgatgtattacgctacaaatgctggctggaacagaaatatcgctcaccttatacgggagccatgattccattgggaaaactgtttactcctgcctacgaaattgaacatattatcccacaatctcgctactttgatgattcattcacaaacaaagttatttgtgaagcagaggtcaacaagctcaaaggaaatatgctaggctatgagttcataaaaaacaactcagggaaaatagttgaattaggcttcggacaaaaagtaaaaatacaaaccgtggaggactatgaattgtttgtaaaagaacactactcatacaacccggtcaagatgaagaaactgttgatggaagatattcctgaacagtttatccaacggcagttaaacgacagtcgttacatcagcaagtttatcaaatcactattatcgaatattgttcgtgaagaaggagaatctgaggccacatccaaaaatatcattgtctgtaccgggggcgttaccgaccgtctgaaaaaagactggggagtcaatgatgtatggaataaaattattctgcctcgtttcttacggttaaatgaaatcacaaacagcaacctcttcaccacaaccaacacaaacaataagataatccccaccatgccattagcattacaaaaaggattcaacaaaaagcgtattgaccatcgtcatcacgccatggatgccattgtcatagcctgtgccaatcgcaatatagtcaattatctgagcaatgaatcagccagcaaaaatgcaaaaatctcacgtttggacttgcgtcagattttatgcacaaggacaaaacccgacacatttggaaattatcaatggataataaacaaaccgtgggaaacatttacccaagatgttcacacaatcctggagaacatgattgtcagtttcaagcaaaatttacgtatcatcaataaaacgactaatcactatttccgttatcaaaacgggaaaaaagtacaatgtgtacaagaaacaggagactgttgggctatccgcaaacccatgcacaaagagactgtatatggagagattaatttacgcaaaataaccaccgtccctctaaaatccgctctagagaatccacaaaggattgtagaaaaagatttaaagaaaaaaaataaaagaattattgcaacaaggattaaacgaaaagcaaataaaaaaatattttgaggaaaataaagatacttggcaggatgtaaacctgaagaaaatccaattctattctttcacaaaagagggaaaagaacgtttctttgcaagccgcgaatccctagatacaagtttcaataacaagaaaattgaagaaaaagttgcggatacaggaatacaacaaattctattacatcatctagagcaaaataataacgatccaaaccaagcattttcccctgaaggcattgaatggatgaacaaaaacattatatccttaaataatggcaaatggcatcaaccaatatataaagtgcggacatacgaacaagctgaaaagtttacagtaggacaaacgggtaacaaatcagaaaagttcgtagaagctgctaaaggtacaaacttattttttgccatatacgaaacagagcacaaacgcagtttcgcctctgtttcattaaatgtggtcattgaacggctgaaaaaaggattgtcattggcacctgaaaacagtaaaggaaatctgcctaaatatgttttgtctcctaatgatttagtatatgttccaactcaagaggaaataaaatgtgggcacatcaatcaaccaatacaaaaagacaggatttacaagatggtaagttgtacagagggggaatgtcatttcataccatactttgtagcaaatcccatgattcagactattgaactcgggagtaataacaaagcacaaaaatcttggcaaaatgaaatgataaaagaaatatgcattcccattaaaatagacaggctaggaaatataacttcatcaattagcttatgataaaaaaaacattgtatttgggaaatccggcatacctatccttacgaaatgcccaacttgtcataaaattaccggaagtggagaaaaacgcttcacttccggaaaccatgaagcgccaatctgaaatcacacgaccaattgaagatataggagtagtggtattggacaataaacaaatcacaatcacttctggagctattgaagccctactcgaaaacaattgtgcccttatcacctgtgatagcaagagtatgcccgtagggttaatgcttcccctctatgggaatactactcaaaacgaacgcttccgaaagcaactggatgcttctcttcctttaaagaaacagctatggcaacaaaccatccaatccaaaattaataaccaagcagctgtcctaacctcatgcataaaagaagacatcaaatgcatgcgaatatgggctaatgatgtccgtagtggagacccagataaccttgaagcccgggccgcagccttttactggaaaacactttttcaccacattgaaggattcacaagagaacgggatggcattcctcccaataaccttttaaactatggctatgccattcttcgcgcagtgattgcacgaagccttgtaacaagtggtttattgcctacattagggattcaccatcataaccgatataacgcctattgcttagctgatgacatcatggaaccctatcgaccgtttgtagaccagattgtctataccttatacgctaaaaatactctggaacttactaaagaagcaaaagcgaccttattatctatccccaccatagaggtcagaatcaacggaaaaagaagccctttaatggtagcagcaggtcagactacagcttctttatacaaatgtttttctggagaaatacgtaaaatcatctatccagaattataatggaccgtttcagtgaatacagagttatgtggattctagttctttttgatttaccaaccgaaacaaagaaagataaaaaagcctatacggactttcgcaagaatctacaaaaagatggattcaccatgtttcaattttccatctatgtacgtcactgcgccagtagtgaaaatgcagccgttcatataaaaagagttaaatcttttcttccagaacatggacaagtaggaatcctatgcattacagacaaacaatttggtgaaatcgaactattttatgggaaaaaagccagtggggtaaaaacgccaggtcaacaattagaactcttttaaaataataaatcccatattgagtatgggatttattatttaagaaacaacaaattcttttttctaaaattcattctaaatcattgaaaaacaacaaataactacaatcgggttgtttccaatgattcaaagatactaaaatgaaagcaaa

SEQ ID NO: 1435 - DNA, 10695 bp, synthetic construct
  misc_feature 1..10695: note = Synthetic
  source 1..10695: mol_type = other DNA
cctatttttcaaacacccggaactgcttttcggcaagatccgggcgttttttcgtatatacgagagtagaataggaaaaaatacaagatataaagattattagtaacaggtaatgagaaatgtaacattgatcctcgacgacggagccgctttcatggcaagtcgttcggctatgagaaaccggtagccggtgaagtagttttcaatacggcaatgaccggataccccgaaagcttgaccgacccttcgtatgccggtcagttgatgacactgacttacccgctggtaggtaactatggtgtgcctcccttcacattcgaagcaaacggactgcccactttcatggaaagcgagaaaatccatgccgaagcgattatcgtaagcgattacagtgaaaaatactctcactggaatgcagtggaaagtctgggcgactggttgaaacgcgaacagattccgggcatcacgggcatcgacacacgcgaactgacaaaggtattgcgcgaacatggagtgatgatgggaaaaatcgtgttcgacgatgaaccaaataacattcccgaagctacctatgcaggtgtgaactacgtagacaaggtttcttgcaaggaagtgattcgctacaacgaaggcgaaggcaagaaaaaagttgtgctggtagactgtggcgtgaaatcaaacattatccgttgcctgctcaagcgcgacgtggaaatcatccgcgtgccctggaactacgacttcaactctctgcagttcgacggtctgttcatctccaacggtccgggcgaccccgacacttgtgatgcagccgtacagaacatccgcaaggccatgcagaacgaaaaacttcctatcttcggtatctgtatgggtaaccagctgctttcaaaggcaggaggtgccaaaatctacaaactgaaatacggtcaccgcagccataaccagccggtacgcatggtaggcacggaaaagtgttttatcacctcacagaaccacggttatgccgtagacaacaatacactgggagccgactgggaaccgctcttcatcaacatgaacgacggttcgaacgaaggtatccgtcacaaaaagaacccctggttctcggctcagttccatccggaagctgccagcggtcctaccgacacggaattcctgttcgatgagtttgtaaagttgctgtaatccactaaaaaacaaagaagacaatgaaagaaaacataaagaaagaaaacataaagaaagtattgctgttaggttcaggagccctgaaaatcggtgaagctggtgaattcgactactctggttcgcaggctctgaaagcgctgaaggaagaaggtatcgaaaccatcctgattaacccgaacatcgccaccgtgcagacttcggaaggtgtggcagacaaaatctacttcctgcccgttactccatatttcgtaggaaaaggtcatcgacaaggaacgtcccgacggcgtgctgctgtcattcggtggacagactgccttgaactgcggtgtggctctctacaaagctggtgtgttcgagaaatataacacccgcgtactgggtactccggtacaggccatcatggatacggaagaccgtgagctcttcgtacagaaactggacgaaatcaacgtgaagaccatcaagagtgaggcggtagaaaacatcgaagatgcccgccgtgcagcgaaggaactgggttatccggtcatcatccgtgcagcttacgcactgggaggtctgggttcaggtttctgcgacaacgaagaagaactgaacgtgctggccgaaaaagcgttctctttctctccgcaggtgctggtagaaaagagtctgaaaggctggaaggaagtggaatacgaagtagtgcgcgaccgtttcgacaactgtatcacggtctgcaacatggaaaacttcgacccgctgggtatccacaccggtgagtctatcgttatcgctccgtcacagacgctgaccaacagcgaataccacaaactgcgcgaactggccatccgtatcatccgtcacatcggtatcgtgggtgaatgtaacgtacagtacgcgttcgaccctgaatcagaagactaccgcgtaatcgaggtaaatgcccgtctgagccgttcttctgcactggcatctaaggctacaggttatcctctggctttcgttgcagctaagttgggattgggttacggactgttcgacctgaagaactcggtaacaaaaacaacttctgccttcttcgagccggcactggactactgcgtatgtaaaattcctcgctgggacttgggtaagttccacggcgtagaccgcgaactgggctccagcatgaagtcggtaggtgaagtcatggccatcggacgtaccttcgaagaagccatccagaaaggtcttcgtatgattggtcagggcatgcacggtttcgtggaaaacaaggagctggttatcgaagacatcgacaaagcactgcgcgaaccgaccgacaagcgtatcttcgtcatctcaaaggctatgcgtgcaggctacacagtagaccaaattcacgacctcaccaagattgacaagtggttcctcgacaagctgatgaacatcatgcagacttctaaggaactccacgagtggggcaacaaccatacacagctttcacagcttccgaacgagctgctctacaaggcaaaacgtcagggattctccgacttccaggtggcacgtgccatcggctacgaaggcgatatggaagacggtatcctggaaatccgtaaccaccgtaagagtgtaggcatcgtgccggtagtaaaacagattgacacgctggcagccgaatatccggcacagaccaactacctgtacctgacttacagcggcgtggccaacgatgtacactacctgggcgaccacaagagtatcgttgtactgggttcaggtgcttaccgtatcggttcatccgtagagttcgactggtgcggcgtacaggcactgaacaccatccgtaaggaaggctaccgctcagtaatgatcaactacaaccctgaaaccgtatcgaccgactacgatatgtgcgaccgtctgtacttcgacgaactgactttcgaacgtgtgatggatatcctcgacctggaaaacccgcacggagtcatcgtatctactggcggacagattccgaacaacctggcattgcgcctggacgcacagaaggtaaacatcctgggaacttctgccaagagcatcgacaacgctgaagaccgcgacaagttctcggctatgctcgaccgtatcggcgtagaccagcctgaatggagcgcactgacttctatggaagatatcaacgcatttatcgaaaaagtaggctttcctgtattggttcgcccgtcatacgtgctttctggtgcagccatgaacgtatgttctaatcaggaagagctggaacgcttcctgcagctggccgctaacgtgtcgaagaagcatccggtagtagtaagccagttcatcgaacacgctaaggaagtagaaatggatgccgtggcacagaacggtgaaatcgtagcttacgccatctctgagcacatcgagtttgccggtgtacactcaggcgacgctaccatccagttcccgccgcagaaactgtacgtagaaaccgtacgccgcatcaagcgtatctctcgtcagattgcgaaagagttgaacatctctggtccgttcaacatccagttcttggctcgtgaaaacgacatcaaggtaattgaactgtaacctgcgtgccagccgttcgttcccgttcgtcagcaaggtactgaagattcaacttttatcgtaactggctaccaagtcatgttaggcttgccggtagaaaagcccgaaaagaacctcttcgatctcgactacgtaggtatcaaggccagccagttctcgttcaaccgcttgcagaaggccgaccctgtgctgggtgtagacatggcttctacaggtgaagtaggctgtatcggcgacgacacttcatgtgccgtactgaaagccatgctgtctgtaggctaccgcattccggaaaagaacgtcctaatgtctaccggtacactgaaacagaaagtagatttgcttcaggcagcacgcgccctcaaggccaaaggctacaacatcttcgctaccggcggttcttctaagttcctggcagaaaacggagtggaaaacacccgcgtatactggccaagcgaagaaggtcagcctcaggcactggaaatgctacacaagaaagaaatcgacatggtggtaaacattccgcgtgacctcactcctaccgagttggaaaacggatacaagattcgccgtgccgcagtcgacctgaacattcctctggtaaccaatgcccgtctggcaagcgcattcatcaatgccttctgctctatgagcattgacgacatcgctatcaagagctgggacgaatacaaataatccgtaccacttaaagatatagataaaattaatcccctccggaactatttgtaatgaatgagttctggaggggatcttttatttatagaaaacataaaacaataaaaaagcccaccgataaaggacgatgggcaagcgcctaaatgttttcacaacggaataatccttattgtgatttgcttcattttagttttacaaaaataaaaagaaacaacacaaaagacaagtttttttcataaaaaattagtagttttgagaaaattgaaaaatacaactatgaaacatattttaggtttagacttaggtaccaatagtataggatgggcagttatcaatgccataaaagaagaaaacactcaaaaagaacaactcataggaatcaatactgcaggaagtagaataattccaatggatgccgcccaattaggagatttcaataaaggaaacactgtttcacaaaccgccaaccgtacacaatttcgtggggtacgccgattatatgagcgcaagaagctcagaagagaaagattgcatcgcatcctacaattattaggatttcttccaaagcattatgccagccaattagacaggtatggaaagtttatagccaattccgagcccaagctcgcttggacaacaaatacgcatgaaccttcttactttatctttcaaagctcgttccaagagatgctcaatgactttttacaaaacaacaaccaagtaaaaaaggttccatacgactggactttgttttatttgcgcaaaaaaagctttgacacaaaaaattgaaaaagaagaattagcctggattttattaaatttcaaccagaaaagaggatactaccagctacgcgaagaggaaacagaaaaagcgtcttctaaaacacggcaatattttgacagccagattgtaacagatattactgacactgggcaaatttataaaggattaaaaatattcacaataacacttgaaaacggagagaaaggaaaatttttcagtaaaaacatgcctgactggaaaggtcagaaaaaagatattattgcaatcatagaccttgataaaaacgggaatgacaaatatgatgaaaatggagagttaagccgtcgtttcaaaattcctaccgaacaagaatgggaagaacagtgggagcttattaaaacaaaaactcaaaaagatcttgacacatctcataaaacagtaggcgcatacatctatgatacactattacaaactcctagccaaaagattcggggaaaattgattcgcaccattgaacgcaagtattataaagacgaattaaatcagatattaaagaaacaagaagaatttcacccagaattgcgagactccaatttattagaagcctgcatcgaagaactgtatcctaataacgaagcccatcgtaatgctattgcaaaatatagcatttcccaattgcttattgaagatattttgttctatcaacgtccacttaaaagcaaaaaatcgctcattagtaattgcccttacgaagaatacacatacaccaataaagaaacaggagaaatatgcacttcttcattaaagtgcatagctaaatcacatcctctttttcaagagttccgtctatggcaatttatatcaaacctgcgaatttatcaaaaggaaggaaccataaacgggaaatttactactgatatagatgtaacaaatcaatttctgaaaaccgaagatgactacgccaatttgttcgactggcttaatcagaaaaaagaaatcagacaagacacatttcttaaaaaaccagcatttggattaaaaaagaatatagcaaattatcgctggaattatgtagaggacaagacatatccttgtaatgagactcactacaagatactgtcatattgggaaaaagcaggaatagagcaatcagccttaacatcagaaatagaagagaaactatggcatattctatactctatttctgacaagaatgaactcagaaaagctttacagcatttcgctgataaaaactatttaagcgataaatttgcagatacttttcagcaaattcctcctttcgagaaagattacggttcctattctgccaaagctatcaaaaaactattgccacttatgcgtataggaagatattggaaagcagaaaatttcgacagtacaactcttgaccgtatagaaaaaatattaactggagagtttgaagaaaacataaagaaccgaaccagagaaaaaacaatctatttggacaatttatactcatttcagggacttccaacctggctggcatgctatatcgtatataaccgccattcagagataaaggacgttactaaatggcaacaaccttcagacattgatgcttttctaaacgcattcaagcaacattctttacacaatcctattgtggaacaaatcatcatggaaaccttacgcactgtacgagatatttggaaacagacagggcatattgatgaaattcatgtcgaattaggacgtgaaatgaagaatcctgccgagaaacgcagaaaactcacccaacaaatacaagaaacgaaaacaccaatctgcgtatcaaggcacttcttactgaatttgccaatccagaatttggaattgagaacgtacgcccgcactctccaagccagcaagatttattgcgtatatatgaagaagaagttctaaacgaaactaaagatataccagaagatattgctgttattttaaagaaattcaatgaagttgataccaaaaaaacgcccgtctacatccgatgtcttacgttataaatgctggctggaacaaaaatatcgttctccttatactggagctatgattcctttaggaaaacttttcacccctgcatacgaaattgaacatgtaattcctcaatctcgttattttgatgattcattcacaaataaagttatttgtgaagcagaagttaataagctaaaaggcaatatgttaggctatgaattcatcaaaaacaatcaagaaagaatagtagaactaggattcggacaaaacgttaaaatacagacggttgaagcttatgagctatttgtgaaagaacattattcctacaaccgcactaaaatgcaaaagctattgatggaagatattccagatcagatttattgaacgtcaattaaacgacagccgttatattagtaagctaataaaatcattattatctaatattgtacgtgatgaaggagaagaagaagctacatctaagaatgttattgtttgtactggaagtatcacagaccgactaaaaaagactgggggatcaacgacgtatggaataaactcattttacctcgtttcatacgcttgaacgaaattacggaaagcaatcgctttacgacaaccaatgcatgcaacaagacaattcctgctatgccattagatttacaaaaaggattcaacaaaaaacgtattgaccaccgccatcatgccatggatgccattgtcatagcctgcgccaatcggaatatagtcaattatttaaataatgaatcagccagcaagaatgcaaagatttcacgtcaagacctgcgacaaatattatgcaagaaaacaaaaaccgacaatttgggaaactatcaatggctcattgacaaaccttgggacacatttacccaagatatgtactccattttaagcaacatcattgtaagcttcaaacaaaatctgcgtattatcaataaaacaactaaccattatatccattatgaaaacggcaagaaagtaaactgctcacaaaaacaaagtgatagttgggctatccgtaagccaatgcataaagaaaccgtatatggagaaatcaacctgcgcagaacaaccactgctacattgaaagccgctcttgagaatcctcaaagaattattgaaaaagacttaaagaaaaaaataaaggaacttttaacgcagggactcaatgaaaaacaaatcaaaaaatactttgaagacaataaagatatttggcaagaaataaatctaaagaagataccagtatactatttcaccaaagaaactgccaacagattctttgcttgccgtgaatcaataaatacaactttcaataaaaagaaaatagaagaaaaagttgcagatacaggaatccaacaaattttactgcgtcatttagaacagaatggtaataatccggaacaagccttctcacctgaaggtattgaacaaatgaataaaaatattatgtccctaaataatggaaaatttcatcaaccaatttataaagtcagaacatacgaacaagccgataaattcgctgttggacaaacaggaaataaatctactaagttcgtagaagccgcaaaaggtactaatctgttctttgcaatatatgaaactgcccataaacgcagtttcgcctctattccattaaatgtggtcattgaacgactgaaaaaaggcttgtcaccagcacccgaaaacgaaaagggtaatctgcctaaatttatattatcacctaatgatttagtatatgtaccaacaaaagaagaaatagaaaatggacatattaaccaaccaatacaaaaagatagaatttataaaatggtaagttgtacaggaaatcaatgtttctttatcaaatccaatgtagccaatacaattattgataaatatgaattttctccactgaataaaatggaaagagctatcacaggagaaatgataaaagaaacatgcatccctatccaaacagatagattaggaaacattataacgccaatcagcctatgataaagaaaacattatattttggtaacccagcatacctatcattacgtaatgcccaacttgtcataaaacttccggaagtagagaaatgttcttcacttccggaagcgatgaaacgtcaatctgaaataaccaaacctattgaagatataggtgttgttattttggataataaacaaatcaccattacgtccggagctattgaagcattgcttgaacataattgtgcacttattacttgtgacagtaaaagtatgcctgtaggattaatgctccctctctatggaaacactacccaaaatgagcgttttcggaaacaactggatgcttctttgcctttaaagaaacaactatggcaacaaaccattcaagcaaaaatcaacaatcaagcatcttccttatccatatgtataaacgaagatataaaatgcatgcgtatatgggctaacgatgtacgaagtggagaccccgacaatctggaagcacgtgctgcagctttctactggaaaacactttttcatgacattgaaaattttacaagagaccgagatggcataccccctaataatcttttaaattatggttatgccattctccgtgcagttatcgcacgttctcttgtaacaagcggattattacccacattaggcattcaccatcataaccgatacaatgcctattgcttagcagacgatattatggaaccatatcgccccttcatagaccagctagtctatcaactatactctgaaaacaaaatggaacttacaaaagaagtaaaagccagtttattatccatccccacaatagatgtcagaatcagtgggaaaagaagtcctcttatgatagcagcaagccaaacaacggcatcactatataaatgcttttctggagaatcacgaaaaatcatttatcctgaattctaatggaacgtttcagcgaatatagagttatgtggattttagttctttttgacctaccaacagaaacaaagaaagataaaaaagcttatactgattttcgcaaaaatctacaaaaagatggattcacaatgtttcaattctctatctatgtacgccattgtgcaagcagtgaaaatgcagcagtgcatataaaaagagtaaaatcctttctacctgaatatggtcaagttggaattatatgtatcacagacaaacagtttggagaaattgagctattttatggcaagaaagcaagtggggtaaaaacaccaggacaacaattagaactcttttaaaataataaatcccatggttaatatgggatttattatttcaagaaacaactttttctttttctaaatttacttataacctactgatagacaacaagaaacaatcaatgagttgtttctaatggttcaaagatactaaaatgaaagcaaatcacaacatggtgatatgtcctccttgtttgtttgaagttgtttctaatggttcaaagat

SEQ ID NO: 1436 - DNA, 10642 bp, synthetic construct
  misc_feature 1..10642: note = Synthetic
  source 1..10642: mol_type = other DNA
tttttacgtgcacggtcacatgttttcttttttcgattgcgataatttcagcatagtcactctcaaatgtcaaccagatcggattgaagaactgaaagcaaagtatagttgcattggcaaaccattcaatctgtcaactaagtattggataggtgtagaggcaaatacagctcccgatgcactccttcaggaacttacacgcaactcttacgagattgtaaaagcaaaatacaagaaataaaaattgacatacgcagattttctgttcgggcggatttgcaatccgaccgcaacgaatatcaacattttctttttgttactttctgtcttcagcgacagaaagtaaccaaagaacgccggcgacgctgcattctcgctaaaaatcatttcactacgctaaactctcgagaatggcgctccccacaaacccgcgccgccaagccgagagttcttaacgcttcgttcaaagattttcttaacgctcgcctgcaaagtcgccacgctatcgttacgtgaagaatattacttctttgtttcactaatcgaaaacattggtcagcacgatagtccgactgagccgagcggcgttaaaaaaatcaatggagagaacgttaaaaaggcgttggtgccttggtacgctatgggttgtctaacgatagcgtggcacttcaacgcctttagtgaacgacattgatttttagccgagcgggtccgtcggtggcttttctttgggttccgtttctttttccacaaaaagaaatggaacaaaataaatatgctatatctgttgcggtcggaggtcggattgcaaatccttatgttcacagcgactggattacaaatccagtcgaacagagaagaagaatttttgcgaaacaaaaattcttcttcccgaagtaatcatcctacgatgacttctcctagccagcggctattgctcacagtgtcgtagtcgggcgatgtgaatgcaatgtacgcctggcattggtcgccgtttttccagtgacgcggacgggcaacgggtattccgccgtcttcgcggtgaacgccttcggaaacatacagcgtgtcctgctgggttacgttatacatcagcagcagggcgttgtcgttgttgcgtgcctcggccttgccggcattgtttgtccacgaaaaatgaaacgagtcggttgcctcgtcgtacaccgcacgggcatcgtctacattggtgagcgtgccgagcgagaagctgagcagttcccagttcacacacacgttttcggccgtagtgccggtgatgcaggcgcgtatgttgtgacgcagtgccgcgttacggcaggtcatttgcaccgcatacttcctgaagccgatgttgatgagcggcgtcattggtctgagcgtcttcattacgagtccgaacttggcacgctgtaactgctgtgcctctgtgttcgggttgtggatgtttatgggcagtccgcgcatatacgatatgcctctccacgtgctacctaccaccgttccagtttttcctttgaatcctccgaggattccttgtttgattactcccattttttaaaaaaattttaaggttatgtaaaaattttatttctccacacaaaaggcagtcggctgtgagcgtcggctttttgtgtttcggaggcaaaactatgtcgtttctccgttccgccaatgcgtttgtccaaaaagtccattttgtccacattgtccactttgtccactttgtccatttacggctgtaacgtgctcataatcagcaacgggatgtgtaacaaagggcagttttctccgtaccaaaaccgtactttgtccgagtccgctccgtaattttacggacctgagtcggaggagagtcggaggagtgtcggacaaggtacgtagaatgtcctgctcggaccccgtcccacagcgacggcaaaaaaccttttttttcgcatcagcagtgggtttcagaagattttattatatatttgcagtataaaactacttcgccgttgtctgcaaacagatatgcggcgacctaaaacatacttgcatgattgacgacaagaacgtttcgcccgaaagcggcgaattatttctttacttagtgacaccttcgtggatagcacggaagctgaacatttcgtcccgcacgctcaaacgctgggtggcaaacggcgaggtgccgctgtacacccataaattcaacggccgccactactacgaccgtaaacaggcgcttgattttgtagcacaacggaaagcccacggccagagcagatgcatacagggggaatgctacagcgaacggctcaaatccttaggttcataggggctggattacaaatccagccgaactggagaactgagaactgacgttgaagtgttcggtcggatttgtaatccgaccgcaacgaatatcattttttctgttactttctgtctacagcgacagaagaatctgttccatttctttttgtggaaaaagaaacggaacccaaagaaaagccaccgacggacccgctcggctaaaaatcaatgtcattcactaaaggcgttgaagtgccacgctgtcgttagacaacccgtagcgtaccaaggcaccaacgcctttttaacgttctctccattgattttttaacgccgcccggctcagtcggggtgtcgtgctgacaaatgttttcgtttagtgggacaatggcggctggattacaaatccagacgaactggcaaaaaagacgaggcgaccgaagtcgccccgaacttaatgttttcacaacggaataatccttattgtgaattgcttcaaatgagtacaacaaagatacatgttttttcgaaaaaatatactacttttaacaaatttttaaatttactttcaaatgaaaaaaatattaggtcttgatttaggcacaaatagtataggttgggcggtgatgaatgcggacgttgttcgtcgcgaaaatgaaacaacatatttacaacccaaaggaattagtgcggcaggaagccgaattataccaatggatgaagccacacttagtgattttgacaaaggaaatacaaaatctcagacagcagaacgaacgggattccgtggtgggcgccgcctgttggaacgtaacctgctacgccgagaacgattgttgcgtgtgctgaatttgatgaactttttacccgaacattacgccaagcagattgacagatacggaaaattcatcaatcactctgagcctaaactggcatgggcgaaaggaattgatggcaaatttgagtttctattcaaagaatcatttaacgagatgcttgccgattttgccacaaatcaaccacagcttgtagctgacgataagaaagtgccatacgattggactatatattatttacggaaaaaggctttgtcaaaaagacttacaaaggaagaacttgcgtggattttactgcaattcaaccaaaagcgaggttattatcagctacgtggagaggaagaagaagaacaacaggataaaatagtagaatttcttgcacaaaaagttgttcgtgttgaagcaacagatgaaaagaaaggcgatgatgtttggtacaatgtttatttggaaaacgatatggtttatcgccgtacaagtcgcatacctcttgattgggaaggaaaaatcaaggaatttattgttacaaccgaccttgaaaaagatggaacacccaaaaaagacaaagacgggaacataaaacgatcgttccgtgcacccaaagaagatgattggactttgttgaaaaagaagaccgaatatgacattgacaatagcaaaaaaactgttggttgctacatttatgattccctactaacaaatccgaatcagaaaattattggcaaacttgtccgaacagttgaacgcaaatactataaagatgaattaaagcagattcttgatgcgcaaaaggcgtttattccagaactcaaggacgaaacactttacaaagcttgtatcgaggaactttatccaaacaacgaggcacatcgaaacaatatagcaaaacccgattttgccaatttgttcatcaacgatattttgttctatcagcgtccattgaagagcaaaaagtctttaataagcgactgtccatacgaatctcattttgataaagacggtgttgaacatccgataaaatgtatcgcaaaatcaaatccgttgtttcaagagtttaggttgtggcaattcgtgcaaaatttgaagatttatcagagagaaagaactatcagcgatggacaattagatttgtttggaaatgtatcagcagggaaacttcaaacggatgttgatgtcactgctgaattgttgaaaacggaagatgattacgttgctcttttcgattggcttaacgacagagcttcaatcaagcaagataccctgctcaactcttatttcaaattcaaaaaggagaaagataaggaccaatatccatatcgctggaactacgttgaggataaggagtatccgtgcaacgaaacgcgtgccgagattctgaaagggttagacaaatgtggcattgctaccaatttcttgactaaagaacgagaaatgcagctctggcacatactctattcggttgaagacaagaatgatattatcaaggctctgaaaaagtatgccgaaaagaaccatttgccagagtcatttgcagaagtgtttggcaaaatcaaaccctttgccaaagattatggctcatattctgaaaaggcaatcaaaaaactgcttccgttgatgcgaattggcaaatattggagcgttgacgcctttgatacgaaaacgaaagaacgaatcgaaaaaattatcacaggagaatatgacgagaacataaaaaatcgtgttcgtgaaaaggctatcgatttgactgacgaaacgcatttcaaagggttgcctatttggttggcttgctacattgtttacgaccgccactcggaagcaaaggagattgacaaatggaacaagccagaagacattgataattatctaaaggaattcaaacagcattcgttacggaatccgattgtggaacaagttgttacagaaacattacgcaccgtacgagatatttggagaaaagaaggtcagattgacgaaattcacgtcgaacttggtcgagaaatgaaaaatcccgccgacaagcgtaaacggatgactgaaaatattttgcaaaacgaaaataccaacctgcgtatcaaagcaatgcttatggagtttacgaatcctgaaatgggcattgaaaacgttcgtccgtattcaccaagccaacaggatattttgcgcatatacgaggaaaatgcacttgataatctcactaaagacgataaggaattcgaatttgtaagtaagatttccaaaacggcgcagccttcaaagtcagatattgtccgctataaatgctggttggaacagaaataccgttcgccttatactggcgaaatgattccgcttgcaaaactctttactaatgcctacgaaattgagcacgtgattccacaatcacgctactttgatgattcgttcagcaacaaagtgatttgcgaagccgaagtaaataaattgaaagaccgccaacttggttttgaatttatcaagaatcacaaaggcgagaaagttcaaattagtcaagggaatacggttgagattctgtcggttgaggcttacgagaagtttgtgaaagaccactacaataacaaccgagccaagatgaagaagttgttgatggacgatatacccgatgattttatcgagcgtcagcttaatgatagccgctatatcagcaaaattgtaaaaggattgttatcaaacattgttcgcgaaaaattacctgatggcgaatacgagcaagacgcagtttcaaaaaatctaatctcttgcaatggctcgataaccgaccgtttgaaaaaggattggggaatgaacgacgtttggaatagcattgttttaccacgattcaagagattgaatgaactaacaggcaaatatgttttcactgcaatcagctcagaaggtcacgaaataccagctatgccgcttgaattgcaaagagggttcaataaaaaacgcattgaccaccgtcatcacgccatggatgctattgtgatagcctgtgcaacaaggtcgcatattcagtatttaaataatgaaagcgcaaaaactgaaaaccgaaaattacaacatggattggctaaacaactttgttctttcaaagaagttgagttcaagaaaaaaataaaaaacaaaaatggtgtttgggtggaaagtgaagaaaagactaaaaagaatgtacctgataaattcttgaagccttggaattcgttcactacggacgccaagcaggcattggaaaacatcattgttagcttcaagcagaacttgcgcgtaatcaataaaaccacaaataattatcagcattatgatgaaagtggcaagaaggtgatggtgaagcaaggtagaggcgatagttgggctattcgcaaatcgatgcacaaagacacagtatttggtgaagtgaatttgcgatttaaaaaaacggtttcgttaaacgaagcattgaaaaatccaaaagcgatagtaaacaaggatttcaaagccaaaatattagagttgttgaaagcaggccgtgatgccaaatacattaaaaaatatgtggaggataacaaagatgtatggtcggatattgatgttaagaaaatagatgtttaccatttcacaaaagagacaaacgaccgctattttgccacgcgcaaacctcttgacatttctttcaaccaaaagaaaattgaagaaagtgtaaccgacacgggcattcaaaaaattctattggctcatttggaagcaaagggcaataaccccgaacttgctttctcgcccgatggcattgacgagatgaaccgtaacattgtcgctctcaataacggcaaattccatcaacctattctgaaagtgcgagtctatgaaaaggcagagaagttcgctgttgggcaaagtggtaacaagccatccaaatttgttgaagcagccaaaggcacaaatttattctttgccgtgtttgcaacaaatgttgaggacaaagaaacaggagagccaaaagtggttcgttcatatttgacaattccgttgaacgtaatgatcgattgccagaaaaagtttggctcaaaatggtatagcaatattgaagcttatttaagagaaaacaaaatgatttctgatgaagtcaaattgttgtttatactttcaccaaatgatttggtttatctaccgacaaaagaagagttgaaaggtggaataaaggttgttgataagaatcgaatatataaaatggtgtcatcaacagggaataggctatatgcaatacaatttaacatagcaaaatgcattgttgacaaagttgagtatacccaacttaataaagttgaattttcagatgataaactatctattaaagaagtttgtgttccactcaaagtcgaccgattaggcaacatcaccgaaattaataataaaaaactatgattaaacgaactctttgtttcagcaatccggcatatctgtcgttggctaacagtcagttggttattaaactgcctgaagtggagaagtcaactatgcctgattcgttcaaacaaaatgcagttcgtaccattcctgtagaggacattggcattgtgattctcgaccatacgcaaatcactattacacaaggacttttggaggcgttactcgaaaacaattgtgcggtaattacgtgcgacaagtcgcatttgcccgttggtctgcttcttcccttatgtggcaactacacgcagtcggaacggtttcggtatcagattgaagcaagtctgccgctcaaaaagcaattgtggcaacagaccatctccgcaaaaatattaaatcaagcagcagttctgcacaatgtgagaaagattgaagtaggaaatatgtcagcttgggccgacagggtgaaaagcggcgattccgaaaatatggaagcccgagccgccgcatattattggaagaatgcgtttccacagaacccccattttgtccgtgaccgcgaaggcgaaattcccaacaatctgctcaactacggctatgccattcttcgtgctgttgttgcccgtgcgttggtagcttcgggaatgttgcccacattaggaatccatcaccgtaacaaatataacgcctattgccttgccgacgacataatggagccctaccgtccgtacgttgacaaattagtgatgagcatctacgacactaatccgtcggtacaggaactgacaacagaactcaaacgcgcattgctcgaaattcccgtattggacgtaaccatacaagggaagcgcagtccgttgatgattgccgtttccaccacaaccgcatcgctatacaaatgttttgcaggagaaagcaggaaaattctctaccctaccatcgacgaatagcatggaaagactgagcgaatacagaattatgtggatattggtattttttgacttgccgacggaaacaaaaaaggaacggaaggaatacgccgatttcagaaaacaccttatgaacgacggattcacgatgtttcaattttccatttacgtgcgtcactgtgccagcagagaaaatgccgccgtccacataaaacgcgtaaaaaacatattgccgccccacggcgatgtaggcattctatgcataaccgacaagcagttcggcgacatagaactctatcattcacaaaaagaaaaagacttacccacagaaggtcaacaattggaattgttctaactatttccttataaaccctttttcatcaataatacagtcccaattgggattcttttgagttataagcgtttcttttttctttctattccatttcttcagttctttttcccgaaacgttagagaacaaaaatagccctaccgaagcaaggctattttcaaaaagcaggaactttttttattctaattattgacgtaatgaacaatatctcagttatttacacgaatcgtattgttcccactatgtcaaagatactcatttgaaagcaattcacaactgaaatgttctttaaacattatgaaaaatattgttcccactatgtcaaagatactcatttgaaagcaattcacaacaactcctcccgtagaagtgcgcgcaattcattgttcccactatgtcaaagatactcatttgaaagcaattcacaacgcatcataacgtactgcgtttccaagtaaattgttcccactatgtcaaagatactcatttgaaagcaattcacaaccgcaagcgtgtatggctcatatcctcgtgattgttcccactatgtcaaagatactcatttgaaagcaattcacaaccaatatattgcaaattatcttctttattagattgttcccactatgtcaaagatactcatttgaaagcaattcacaaccagtgagtgaagcgaaaaaaagcgggcaaaattgttcccactatgtcaaagatactcatttgaaagcaattcacaacatcggcaagctggttgtctgtggctgcctgattgttcccactatgtcaaagatactcatttgaaagcaattcacaacacacaaattagaaacgttccaattttcagattgttcccactatgtcaaagatactcatttgaaagcaattcacaactacgatacgtttggagtttgatttttccttattgttcccactatgtcaaagatactcatttgaaagcaattcacaacgagtgaaaatgttggaaatgacaaggcgaattgttcccactatgtcaaagatactcatttgaaagcaattcacaacgcatcataacgtactgcgtttccaagtaaattgttcccactatgtcaaagatactcatttgaaagcaattcacaactcatatcggcgagtttttcttccttttttgattgttcccactatgtcaaagatactcatttgaaagcaattcacaaccgtccctcgtccaaaactcccattgctttgattgttcccactatgtcaaagatactcatttgaaagcaattcacaacaaacggagaccgcaagacgattaaaacaaaattgttcccactatgtcaaagatactcatttgaaagcaattcacaactaacgaacatcaacaaaatcaacataaaaattgttcccactatgtcaaagatactcatttgaaagcaattcacaacacaagttgtcaagaattttcgagggcaaaattgttcccactatgtcaaagatactcatttgaaagcaattcacaacgcggacggagcgataaattcaattgcggacattgttcccactatgtcaaagatactcatttgaaagcaattcacaacattatgcttgtaaaagagattatttcactattgttcccactatgtcaaagatactcatttgaaagcaattcacaaccttgataaaacgtatcaggcaatgcgtaagattgttcccactatgtcaaagatactcatttgaaagcaattcacaacttctcgtcggtcaagccgaaaatttgtatgattgttcccactatgtcaaagatactcatttgaaagcaattcacaacaagaatttaaagaataagaacatgacaaaaattgttcccactatgtcaaag

SEQ ID NO: 1437 - DNA, 10547 bp, synthetic construct
  source 1..10547: mol_type = other DNA
  misc_feature 1..10547: note = Synthetic
tgcaactatacattcaggcactgttgacattccaaccacatcagcaccgatattacgaaggaatctatattctgcctttgtttcaagatttggacctgcaactgcaacataaacacctttctgaactttgatattatttctcaaagcaattttttcagccatgtcaatcaaaccgcggttatatggttcactcatatcaggaaaacgcggtccaaattcatcttcattcggaccaaccaaaggattatcgccaatcagattaatatgatcagcaatcagcattatatcgcctcttttataaaaaggattcattccaccgcacgcattcgaaatcaataaagtttcaacgccaagttttttcatcacacgaattggatatgtaatttgcttcatagaatatccttcgtaataatgaaatcttccctgcattacaacaacatcttttccgttaagttttccgaatattaatttcccgtgatgagattcaactgtggaaatcggaaaatgcggaatacttccataatcaatcacatgttctttttgaatgtcattaaccaaaccgcccaaaccggttccgagaataattccaattttatattgtttatccgttgctttacgaatttcagctaaagattcttcaatcatagtttgaagttttgtcataataatttctcgagtatatcgtcaacatcaatttttgattcattatttgtttcgggttcaactgccggagttactgttctttcacctgaattatattcaaatactctgctttgtgaatccaatatagctcttaatttgctgataattaatttcttttcttctttcagtttgataatatcgttactgattgcattaacttcttcttttgctttttcagtcaactgagccgctttaatttctgcttcacgaataattagctgatgttgtttctttgcagaatcaagcgctttggtagaactttcctgagcattaatcaaagtgctctgcagcgagcgttcaacttttttatattcttcaatttcttttcgcaatgaatcaatttctttttttagattgtcattttccgaaatcagaatagcaaactccgaagaaaccgattccagaaacgaagttacttcttccttgtcaaatccacggtatgatttgttaaactcctgattcttaatattataaggcgtaaacttcattttttaacctctgtcaccaaatattgcagttcctattctcagcatagttgaaccttcttcaattgcaatctcaaaatcatttgtcattcccattgataactcattcagttcaaaaccttcattgttcattttttctttcagctccctgacttttgaaaatgtctgtctgataattttttgatcatcagtaaacggtgccatcgtcataagtccggctaatttaatgtttgatttacctttacaatactcagccagttcaaataaatcatattcattcttcagaccatatttagattcttcatccgaagcattgaactcaagcaaaattttctgaatctttccaatcttttcagcctgcagattaatttcatctgcaagtttttttgactcgactgaatgaatatattctgctggtttaatcacgtactttactttgtttgtctgaagatgaccgataaaatgccaatttactgcaccatcgaataattcagatttctgattcagttcctgtgcacggttttcaccaaaatcaaccaatccgaatttgaaagcattttcaatttcagaaacaggataagttttcgaaacagcaatcaacttcacttcatttctgtttctttttgctgataaacatgcagaagatattcgttcttctaaaatatgtatattttttgcaaccatgtcaaaattaaggttgagaatctattgcatttaacaaacaaagtcaattaaaagataaatcaaaatgcattgcgtaatcaaaaaaataaatattttaattaacccaccttacgcaaagtttacaaaattgtcattctgaccctgcctgacggcagataggcttgcttcagaatcttcttttgtcattctgaacttgcctgacggcagtcaggcttgtttcagaatcttcttttgtcattctgaacttgcctgacggcagtcaggcttgtttcagaatcttctttgtcattctgaccctgcctgacagcagataggcttgcttcagaatcttcttttgtcattctgaacttgcctgacggcagtcaggcttgtttcagaatcttctttgtcattctgaacttgcctgacggcagtcaggttcagcatgacaaatgcgtatggtgacctaattaatttataaaatccgaatagctcggaaatatattttaacacggatttgctattagaaatcttttcctattcacaaataatcgataattcaaacttagcgggactttgtgatatacatcgagtccttcgtggtaaaaatatactaaccatgaagatcacaaaaggatgcactaagttttttctcgataaattatgaaaaatcaggcttcaaaaaatgtttacgccgtcctttgataggctcaggatgacagtaaaaatgacttttgagattacctgacatttactttaatcttcagactggcaaataattcatgaaagttttctcggaatccaaagattttttgacaaatcaacgcgaccgtcaataaacataacaccttcggacttcaataacaattccatcaattccggttgaccaaaatgcagtttacctgttaattccccgtttcggtttacaacccgatgacaaggaagatttgaaaactttgctttgtttaatgcccaaccgacagttcttgctgatgattttattccgcatttttctgcaatcaaaccataagttgttacttttccataaggaattttctcaacaattttataaactctgtcaaaaaaatcttcgtgcctgtcagaaacatttttcattaattaccggaatatttcataagataagctttgataaatcctttaaggtcaccatccataacagcctgtgtatttgatgtttcataatcagtgcgatgatctttaaccaaattataaggatgaaaaacgtaagaacggatctgacttccccattcaattcgcatttttgttttttcaatctcatcaagctctgcctgctgtttttctttttcgatctgatataattttgacttcaaaagtttcattgcatttactctgttctgaagctgagagcgttcactctgacaagcagcaactgtatttgtcggaatgtgagtaatacgaacggcagtttcaactttattaacattctgtccgcctttgcctcctgaacgataagtatcaattcgtaaatcagcgggattaacatcaatttcaatagtatcatcaacttcaggaataacaaaaacggatgcaaaagaagtatgccttcttttatttgaatcaaaaggagaaattcttacaagtcggtgaacgccattttctgcccgcaaatatccataagcaaattcgccttcaacttcaattgtagcacttttaattcctgcaccgtctccttcaagaatatcaaccaaagtcattttataattattctgttccccgtatcgcaaatacattctcatcagcatttctgcccagtcctgagcttctgttccgcccgcacctgaatgaattgtcattatacaattctttgaatcatctctgccgccaagcatattttttagctcaacttcttcaattgaatcttctaagttctgaatttccttatcaatatcggatttgaaagactcatccttttcactttcagcaagttcaatcaattcctgaatgctgtcgtgttttttcttaacatcattccaaagttcaacccatgtttcaagagaattaattttgtgcataactacctgcgcagctttctgatcattccagaaaccgtcgagagtagttttattgcgtaactgatttatttcatcttctttctgatctaacttaaagataaccccgtagctgatttatgcggtttgataaagatcccaaggttttcaaatgttcttcgtacatcatttctccagattttaaaaatatttgctgcaaatttagtgaaataaattttgtgtgagtgattaaaaatgatatttactaatgtatgtggctatcaaccaagagttactgagtgcaaatttcttaaaattgttgtttgaagagtagcaaaaataatataatgtatgtctggcaaatttgtaatttgattcatatgtaatttaacttaactttgaatctgatcatattaatgttgaatatcaattaaaattgaaatttaaaatcaaacattcttcattgcgcccttaataaaattcatcatctttattaaaaatttaattttaattgcttaagttgtaacatttttttaagttacactagggtcagtaattctttaaaacaacaatcccgcttttcagcgggactattgtaaatgttttcacaacggaataatccttattgtgatttgctttcattcgaaacataaatattctttttgataaaaaaaaggaaaattataatgaaaactattcttggacttgacttagggacaaactcaattggttgggcattaattgcaaaatctgaaaatgaaaaagatggaaaaattcttggtattggtagccgtataatccctatgagtcaagatattctgggagattttagcaaaggaaactctatttctcaaactgcggaaagaaccggttatagaggtgtaagaagattgcgtgaaaggcatttattaaggcgggagcgtttgcatagggtattaaatgtattgggatttttgccgaatcattatgccaatctgattgattttgaaaaacggttgggacagtttaaagctgaaactgaaccaaaattagcatatcaagaaattgggaatgaagaaaaacaaaaaaataaatatgactttatttttaaagaatcatttaaggaaatgttaaatgattttagagaacatcagcctaaacttttagaaaatgacaggaaaattccttacgattggacaatttattttctacgtaaaaaagccctgactcaaaaaattgagaaagaagaattagcttggatattattaaactttaatcaaaagcgaggatattatcaactaagaggggaggaagaggaagaaaatccaaacaaattagttgagttttattcattaaaagttatcgatgtacaggcagatgaaccacaaaaaggtaaagaggatatttggtattccttagttttagaaagtggtttggtttatcgcaggtcaagcaaaacgcctttatttgattggaaagataaagttaaagattttatcattactacagatctgaatgatgacggcactattaaaattgataaagacggaaaagaaaagagacatttcagagcgcctagtgaagatgattggacattaataaagaaaaaaactgaaactgaaattgatagctccggcaagactgttggaacattcatctatgatactttactgcaaaaccctaagcaaaaaattaatgggaaactggttcgtactattgaacgtaagttttataaagatgaattaaaacaaattttgcaaaaacagcaagaatttcattctgaacttcaaagtgaggatttattcaacaatagtataagagaactttacaaatacaatgaagcccaccaatttttattaagtaaaagagattttgtacatctttttttagatgatattattttttaccagcgtcctttgaagagtcaaaaagcatcaatcagcaattgttctttcgagtataagaagtacaatgttaatggtgaagaaaagaccatctacttaaaatctatacctaaatcacatcccctttatcaggagtttaggctgtggcaatggatatacaatttacgcatatataaaaaggatgatgactatgatgttactaatgattttttgaagaataatgaggattatgaagatttatttgagtacctaaacaacagaaaagaagttgatcaaaaagctttattaaaacatttcaaattaaaagacaaaacacatcgctggaattttgtagaagacaaaaaatatccttgtaacgaaaccagaacacttattaagacaagattggaaaaggttgaaaatttgccggataatttcttaaccgaggaaacagaaaaacagctttggcatattatctattcagttacagataaaatagaatatgaaaaagcattaaaaacttttgctaagaaacatagattagaagcaaattcttttgtcgaaaactttaaaaagtttccaccatttaaaagtgagtttggtagttattcagccaaagcattaaaaaaattattgcctctaatgcgtatcggaaagtattggaatgatatcgaagtaacaactgaagttaaagatagagtaaattcaatattagaacggttacaggcaattaattttaatgagaaggaaattgaaaacgtagctgatgatgatgttcaaaaacaagttttaaaaagtttcttaaagcagaaagatttcacaaaaggattacaattatatcaagcaagttatttggtttacggacgtcattcagaagcagctatcgctggcaaatggtattccgtttcagatttagaagaatatttaaaagaatttaaacaacattctttgcgaaatcctattgttgaacaaataattactgaaacattgcgtgtagttaaagatatttggcaacaatatggaaaaggagataaagacttctttgaagaaattcatattgagttaggcagagaaatgaaaaacactgctgaagatcgtaagaaaattacaaatcaagttatcgaaaacgagaacacaaatcttcgtataaaagctttacttttagaattgaaaaatgattcaagcattgaaaacattcgtccatattcacctatacaacaggaaatattaaaaatatttgaagatggtattttaagttctgatattgaaattcccgatgatattgtaaaaatcagcaaaacagctcaaccatcaagttcagagttgcagcgctataaactttggttagagcaaaaataccgttctccttatacaggacagatgattccactaaataaattgtttacagccgattatgaaattgagcatattattccccagagccgatattttgatgatagttttaacaacaaagtgatttgtgaagcagcagcaaacaaactgaaagacaatcaaaccgggttggaatttatcaaaaatcatcatagagaaattgttcaaacaggcttggggaaaagcgtaaaaatttttgaagtaaaggattttgaggatttcgtaaaatcgcattatgcaaaaaatcgttcaaagcgcaacaagttattgatggaagatatccctgaaaaaatgattgaacgacaaattaatgacactcgttatattagcaagtttattagtgccgttttgtctaatattgttcgttctgatcataatgacgatgggataaattcaaaaaacattataccaggtaatggtaaaattactaatatattaaaacaagactggggattaaatgatgtttggaacgatttaattttacctcgctttaaacgaatgaatcgacttactaacagcaccgcatttaccttatataatgaaagatatcaaaaacatcaacctactgttcctctcgaactttcaaaaaactttcaaaagaaacgtattgatcaccggcatcacgctttagatgcgttggtgattgcttgtgcaacgagagatcacgtaaatttattaaacaataaatatgcaaaatccgatgaacgatttgacttaaacaggaaacttagaaagtttgaaaaggtatcttatattcatcccaaaataggaaagcgagttgagaaagaaattccaaaagattttctaaaaccctgggcaaactttactgttgacgcaaaaaaaattttagaaacaattgttgtaagttttaaacagaatttgcgagtgattaataaaacaactaataaatatgaaagctataaagatgagaatgggaatttacgaattgggaaagatggaaagcctgtaaaagatgttatttcgcaaatcagtggcgacagatgggctatacgtaaaccaatgcacaaagaaactgtttcaggtaaaattgtattgaatagaattactgtaccaaatggaaaaatattaacagcaactagaaaaagtgttgatacttctttcaatttaaaaactattgaatctattacagacacaggaattcaaaaaattcttaaaaactatctttcgagcaaagaaaataatccagaactagcattttcagcagaaggtctcgaggatatgaataagaatattgaaaaatataataacggtaaacctcatcaaccaatctacaaagccagactttttgaactcggtagtaaatttcagttaggtcaaaccggtaataaaaaagctaaatatgttgaagcagctaaaggaactaatttattttttgctatttatcaagatgaagatgggaaaagaagttttgaaacaatccccttaaacatagtaattgagcgtcaaaagcaaggacttcactcaatcccggaaatcaatgaaaagggtgacaaattattatttcatctttcacctaatgatttagtgtacgtaccatcagaagaagatattgaaaaccctatttctattgatttttcaaatttatcaactgaacagttaaaaagagtatataagtttacagatggaagcgggacaacaatgaattttattcccgcaaacatagctagcttactatttgatttgtccaaaaaagaacaagaaaaaattggagtaaacttgttaattcaaaatgaattgggtgttggaagccctcaatctaaaaatcaaaattctttagaaggaattcagattaaatctgtttgttggaaactcaaagtagatagattaggaaatattaactcagtaattggtaaataacttttagaacaaactatgatcaagcgtactttatactttggaaacccggcttatctttctaaaaagaacgatcagcttgtgataaaattgcccgaagaaaaaaaagaagcggctgaacaatctgagcctgatccgaatcaaaaatatttggatcgggggaacattaattcaattccaatagaagatgttggtatagctattctggatcatcaacaaattacagtttcacaaggtttgcttgctgctttattagaaaacaacactgcacttgttacatgtaatttttcacatatgccttctggtctttttcttcctttagaaagcaatttaattcaaagtgaacgatttcaggctcaaattaaaatctcagaaccgttaaaaaaacaattgtggcaacaaacgatcagcgcaaagatttataatcaagcagctgttttaagaaacagaaaaaagcccaatgataatatgaaacgctgggctaaagatgtacgctctggtgatcctgataatcttgaagggagagctgcagcttattattggaaaactgtttttcccgcggaacttgaatttgtaagagatagaaatggattgccacctaacaatcttcttaattacggttacgcgattttaagagctattgtagcacgtggacttgttgcctcagggttactcccaactcttggtattcatcatcataacaaatacaacgcttactgtcttgccgatgatataatggaaccttatcgtccttatgttgatgaattagttacaacttttgttgaggacggtgaagattttactgaactaacaccctcaataaaaaaacaattacttacaattccagcgatagatatttttattgatggagaaaaaagtcctttaatggttggaatgcaaaaaacaacatcatcattagtaaaatgttttaatggagatgctaaaaaaattatttatccaacaatgtgattctggttaatgaaaaaaggttacttaaaagttatatgacttacaataaaataaaattattgccttaccccccttctctttgtaagagaaggggctgggggatgagttcacaatgagtttaaacagcaaacaaaaattagtgctcattgctaaacagcttgcacgtgaattaagaaggggtgcaactccggcagaaaagattttctgggaagttgtccgcaatagaaaatttctaaataaaaaattctatcgacagcacctaatttattttgatcttcttggtaaagagacttttttcattgcagatttttattctcacgaagaaaaactagtagttgaaattgatggcggctatcatataagacaacaggacaatgatgaattaagaaccgctattataaacttactaaatataaaagtgataagattttcaaatgaacaggtaattgatgatttaaagaatgtattaaatcaaatagaaaaatttataaaagcgaactcaccctaaatccctctcttaccaagagagggatttttaaatctattcccttctctttccaagagaaggg

SEQ ID NO: 1438 - DNA, 10288 bp, synthetic construct
  misc_feature 1..10288: note = Synthetic
  source 1..10288: mol_type = other DNA
cgtgaattgggtgtgcgcggcggctgtaatgtgcagctggcattggatccaaattctgaacgttattatgtaatcgaagtaaatccgcgtgtcagccgttcttcggctttggcttctaaagctaccggttatccgctagctttcgttgctgctaaattaggtctaggttacggtttgttcgatttgaagaactcggttaccaaaacaacatctgcgtttttcgaaccggcactggactatgtagtatgtaagattcctcgctgggacttgggtaaattccacggagttgaccgtgaactgggttcaagcatgaagtctgtaggtgaagtgatggcgatcggccgtaccttcgaagaagctatccagaaaggtcttcgtatgatcggtcagggaatgcacggatttgtagaaaacaaagaattgcagattgccgatattgataaggctttgcgtgagccgaccgacaagcgaatcttcgttatctcgaaggcaatgcgtgccggatataccgttgatcagattcatgaactgacaaagatagacaaatggttcctcgacaagctgatgaacatcatgcagacttcgaaggaacttcacgaatggggcaacaaccacaaactgttgtcacagcttccgaacgaattgctgtacaaggcaaaacgtcagggattctccgacttccaagtagcacgtgccatcggttacgaaggagaaatggaagatgccatcatcgatgtacgtaaccaccgtaagagtgtaggtatcgtgccggtcgttaagcagattgatacgctggcagccgaatatcctgcacagacaaactatctgtatctgacttacagtggtgtggcaaacgatgtgcattatctaggcgaccacaagagtatcgtagtattgggttcgggtgcttaccgtattggatcgtcagtagaattcgactggtgcggcgttcaggcactgaatactatccgtaaggaaggataccgttcggttatgatcaactataacccggaaacagtttctaccgactacgatatgtgcgaccgtctgtacttcgacgaattgactttcgaacgtgtgatggatatccttgacttggaaaatccgcacggagtcatcgtatcaaccggtggacagattccaaacaacctggcactccgtctggatgcacagcatatcaatatcttgggaacttctgcaaagagcatcgacaacgcagaagaccgcgacaagttctcggctatgctcgaccgcatcggcgtagaccagcctgaatggagcgcactgacttcgatggaagatatcaacgccttcatcaagaaagttggattcccggtactggttcgtccgtcgtacgtactttcgggagctgccatgaacgtatgttctaaccaagaagagctggaacgcttcctgcaactggcagccaatgtatcgaagaaacatccggttgtagtaagccagttcatcgaacatgccaaggaagtagaaatggatgctgtagcacggaacggtgaaatcgtggtatacgctatcagcgagcacatcgagtttgccggagtacactcaggagatgctaccattcagttcccgccgcagaaactgtatgtagaaactgttcgccgcatcaagcgtatttctcgccagattgccaaagaactgaacatttccggtccgttcaacatccagttccttgcccgtgaaaacgacatcaaggtaatcgaatgtaacctgcgtgccagccgttcgttcccgttcgtcagcaaggtactgaagataaacttcattgaacttgcaacgaaggtgatgcttggcctgccggtagaaaaacccgaaaagaacctgttcgaactcgattacgtaggaatcaaggcaagtcagttctcattcaaccgtctgcagaaagccgaccctgtactgggagtcgacatggcttctactggagaagtaggatgtatcggcgaagacacttcgtgcgctgtgctgaaatcaatgctttctgttggctatcgcattccggaaaagaatatcctgttgtctaccggtacaccgaagcagaaggtagaaatgctgaaagctgctcaggaactgaaggcaaaaggctataacctctttgcaacaggcggaacctcgaagttcctgaccgagaacggcatcgagaatacccgcgtatactggccgagcgaagaaggacatccgcaggcactggaaatgctccacaagaaagaaatcgacatggtagtaaacattccgcgtgacctttctgccggagaactggacaatggttacaagattcgtcgtgcagccatcgacctgaacattccgttgattaccaatgctcgtctggcaagtgctttcatccatgcattctgcaccatgagcatcgacgatatagctatcaagagctgggacgaatataaataatcccctctcgtgatagaataaatgttacttaagcgccacttcggaaaaggcaaatttccggggtggcgctttttcgtttagaaggctgttttccggcatcgggattcagccttttgctgtttcttcatttatatctttgcggcgttacggaattgaaactatttccgaattcccccttttgcgctttctttgtttctttttgtgaatagccttattatttatacattacctgcaactgagcttttactgtttctttacttatttttgtgacgtgcgtgtaagtatttcttcggaagtgcgactaacgagggtaaagaaacatgtagaacaatatgctgtatgaataaaacactgcaacaagaaaaagactttctcctgctgatagagtcgcacaagcgagtcatctacaaggtctgttacatgtatgcaaccgacaaggaacaattgtatcaggagatagtaatgaacctctggcgcgcttatccttcgtttcgcggcgaaagttcctctgccacatggatataccgtatcagcctgaatacgtgtatttcctatcgccggaagtcgaaacatcagattcaggcagtcacccttccggtagatttcgaggcattcgatgaagaggacggcaagacgtcgcagctgcgcgagctgtatcggctgatacacgcactcagtccgctggaacgggcgctcatcctactctggctagaggaaagaagctacgacgaaatagcccggataatgggtatttcgaagaacaatgtcggtgtccgtctgaaccgcatccgtgagaaactgaaaaacatgtcgaacctataaatctcagcttatggaacttgaagaactgaaaaatcaatggaacttgctcagtgagcagttgaagaagaacgaaatagtcaatcatgcagtcataaaacgaatgatagagaagcgtaccctgagtgcccgcgaccgcctgataggagcaaacgtgatagccgttttccttcttgcaggcatgctaatcctgtttccgcttgctgcaacacgagtaatcatccggcaggaacttctctggatattttacattgtgtttccactcctgattttgtactcgttctggaatatacacgttttgtataagttcaatctggccacccggaccctccttgagcttcatcgctggattctttcctataaacgcaggctccagatagaaatctggtgtactcctttccttgtaatagggctttttagttctgtctttctgattcatcaccattaccgcagtacgcttatggtagtgttcgatatcctgatgcttgcggtaagtgtcatggccggttatatttgttaccgctacgtagacaagcgttcggtagacgagatagagcagggaatgaaagacttgcaagacttggaatagtttggcgggttggacagcagaagcgtgggacgtttgactgaaatataccagcacgagtccgatgcttctgctggtcttttatggagaacaagatgaagttttgctgtaagtttgtacaaacttttttggtatttgtacaaaaaacaaaatgatttgtacaaatctagtttgatgggtgcggaagaattggggaggagatgaagggatgttaatagaaattgtttggttggttagtgagaaaagattgtagatactataaaaaagaaagcgaccttcgtaaaaagaccgctttaaatgttttcacaacggaatcatccttattgtgacttgcttcaatttagttaatgcaaatatacagaatatcctttacataaggaaggcttttttgatatcttttttctaactttgaggaaatgaactaagaaaatcggttatgaaaaagatattgggtttagatttaggaacaaacagcgtaggctgggcagtgataaattcggtcataaatgacgaaggcaaggaacaacttgtaaatatttcttcttgcggcagcagaatcattccaatggatgctgcaacattgggagattttgataaaggtaattctaaatctccagtagcggagcgaacccgtttgcggggagtacgtcgtttgctggagcgtagtttattgcgtcgggagcgtttgcaccgggttttatctgttatggaatttttaccggaacattatgcttctcaactcgaccgatatggtaaatttctgccggaacgggaacctaaattagcctggtatcaagatgaaactggtaaatatagatttctgtttcaggattctttcaatgaaatgctggaggactttcgtcagcatcatcccgaactggtagcagaagggaaaaaaataccttacgactggacaatctattatcttcggaaaaaagctctttctcagaaaataaccaaagaagaacttgcatggatattactcaatttcaatcagaagcgaggatattatcagttgagaggagaggaagagaaagaagataataaaaagtcagtggaatattatgcactgaaagttgttgcggtagaagattccggagatcggaaggggaaagatatctggtataatgtcaagttggaaaatggctgggtataccggagagccagtagtgttcctttagactgggtcggtaagataaaagaatttatcgtaacaacagatttggatgaaaagggaaatcctaaaaaagataaagacggcaatgtaaagcgttcttttcgggcacccaaggaagatgactggggattgttgaaaacaagaacgcaggcacagattgacgaaagtggtcagacagtgggtatatatatttacgagtcattacttcgcatgcctgatcaaaaaataagaggaaaattggttcgaacgatagtaaatattataaagacgaacttcgtaagattttggtcaaacaatcggagtttcatgcagctttgcaagatcacaatttgctgcttgcttgcattgaagaactatatcccaataacgaagcacatcgtcggttactgtctacttccgattttatctatttcttggtggaagatatattgttttatcaacgtccgcttaaaagtcagaagggactgattgacgattgtccgtacgaattgcatgtctatcgggataaaaagaatggcagtttgcagcatgttccattgaagtgcgtgtctaaatcgcatccgttgtttcaggaattccgcttatggcagttccttgcttccttacgtatttatcagcgtgaaagacaggtagacggttctcttaaactggatgtagatgttacgaatgaatttttgcagagtgaagatgactatgtaaaattattcgattggctgaatgaccggaaagatatagatcaaaaaacattcttagcatacaaacctttcgggttaaagaaaaacgagctgtcccaatatcgctggaattatgtagaagacaaaagttatccgtgtaacgaaacaagagcagatatggtatccagactaaataaagctggagttccggaagagttcttaacccgagaaaaggaagaggccttgtggcatatattgtattctatatccgataaaaaggaactgacaaaggccttggggacttttgcggagaagaatggtttgaatgaaacttttgtagaaatattttccaagatgccgccttttgaaagcgactatgcctcctattctttgaaggctattcgtaaactgcttgcgctgatgcgtatgggaaaatattgggacgagcaggcaatcgatgagcagacccgtagtcggattgaaaagatactgaccggagaatacgatgaaactatccgtacccgggtacgtgaaaaagctatgcatctgacggatatatcttctttccgaggattacctttatggttggcatgttatgttgtttacgatcgtcattcggaagcaaaggaacttgttaaatgggaaacccctgatgatatcgatcacttcttgcataagtttaaacagcattcgttgcgtaatcctattgtagaacaggttatcatggaaacgctgcgtacggtacgcgatatctggaggcaagaaggaagaatagatgaaattcatgtggaattaggtcgtgaaatgaaaaatccgtccaaagaacgtgcccgtataacagcgcaggtattggaaaacgaaaatacaaatttgcgtataaaggcgttgcttacagaatttatgaatcctgaatttgagatagagaacgtacgtccttattcacctgcccagcaagaaatcttacgaatctatgaagaaggtgtgttatcaggtgttgcggaaaaggatttgccagacgatattgcttcaattttgaaaaagttcagggagaatgatgtaaagaaacgtcctactacttcagaagtcttacgatataaattgtggctggagcaacgctatcgttcgccttatacaggcagaataattccgcttggtaaactgttcactcctgcttatgaaatagagcatgtaattcctcaatcgcgttactttgacgattctcttaccaataaggtaatttgtgaatcggctgtaaacaaactgaaagataattgtttaggatatgaatttataaagaaacattccggcgaaaaggttgaattgggaaatggtgaaacagctactattttttcagttgaagaatatgagcgttttgtgaaggactcttacttaggtaatagtaagaagatgaaaaagctgctgcttgaagatatacctgataactttattgaacgccagttgaacgatagccgatatattagcaaagtcgtaaaatctttgctttcgaatattgtctgtgaagaaggcgaacaggaaggtatgtcgaaaaatgtgatagtttgtactggtggagtaacagatcggttgaagaaagactggggagtacaggatgtatggaaccggattattcttccacgtttcctgcgcttgaataaaataacagatagtacagacttcacttctgtaagcacaaatgggcatttgttgcctgccgtacctttgcatttgcagaaaggatttaacaagaaaagaatagatcatcgccaccatgcgatggatgccattgtgatagcgtgtgccggtaggaatattgtcaattacctgaacaatgcttctgcacgcaaaggttccgaaatttctcgttatgacttgcagcatttattgtgtgataaggtaaagacagacgcaaacggtaattacaaatggattcttcgtaaaccttgggaaacgtttacgcaggatgtatatgtagcattgacggatattgttgtcagctttaagcaaaacctccgggtaataaatcgtacaacgaaccattatcagcattataatgaagatggagaaaagaaaatgattccacaaactaaaggtgatcgttgggcgattcgtaaaccgatgcacaaagatacggtatatggtgaggtaaatttgcgtaaggagaaaacacttcctttgaaagacgtgctcaataatccatcgattgttgtggataaatcattgaaaaacaaactatatgagttgctaaaatctcagtatgacttgaaggcaataacgaagtatttcgaaacgcatcaggatgtctgggctgatgtcaatttaaagaaaatcaaggtttactattttacaaaagaaacgaatgaacgcttttttgctacgcgtaaatcattggattcaagttttaatcagaagaagattgaagaagaagtaactgatacaggtatacaaaagattttgctgcgtcatttgcaacaaaatggtaacaatccggacattgctttttctcccgatggagtggagcgtatgaatcagaatatgactattctgaataatgggaaatggcatcagcccatttataaagtacggacttatgaaaaagcagataagtttgcagttggtgaaagtggtaataaagttaaaaagtttgtggaagctgctaagggagccaatttgttttttgctgtgtatgaatctatgcaagaggatgaggctacgggcaaggaagtccgtaaacggacttttgctaccataccgctgaatgaagttatcaagcgtaaaaagcaaggattatctgtcgctcctgaggactcaaaaggtaatttgcccatatttgttttatctcctaacgatttaatctatctaccgacagaagaagagcgtaatagcggtaaaataattcaacctttggatagagagagaatttataaaatggtttcttcttctggtaatcaatgcttttttataaaagcttttgttgctagttcaatttgggataaaaaagaatattcttctttaaataaaatggagcgtgctgtaactgatgaaatgataaaagaaatttgtatacctgtaaaggtagatagattaggtaatgcttctttgataaaaatatgatgctatgataaagaaaacattatactttggtaaccctgcttatctgtcattgcaaaataatcaattggtcattaagctaccggaggtggagcgtaacgcttcacttccagaaagctttaagtctcggtcgattataactagaccgatagaagatataggattggtgatattagaccataagcagatcacaattacttctggagtgcttgaagcgcttttggaaaataattgttgtgtcataacttgtgataataaaagtatgcctgtaggattattattgccactttatgggaatactgttcagaatgaaaggtttagggaacagctgatggcgactcttccattgaagaaacaattgtggcaacaaactataaaagttaaaatacagaatcaggcacatgtcttgcaatattgtttaggagaggacaataaatgtatgagggtgtgggcggaagaagtaaaaagcggtgatcctgataatttggaagctagagctgcggcttactattggaaaacactttatgctcatattccgggatttacgcgagatcgtgacggaatgcctcctaataatttattaaattacggatatgctattttgcgagctattatcgctcgtgccttagtttccagtggtttgttgcctactttaggaatacatcatcataaccgttataatgcttattgtctggcggatgatgtaatggagccttatcgcccctatgtagataagctcgtatttcagcttgttaagactcatggtgagaatgtagagctaactaaggaaataaaatcagttcttttgacaattcctacactcgatgttgttatcggtagaaagcgaagtccattaatggtagctgctacccagacaactgcttctttgtataaatgctttagtggtgaattacgtaaaattgcttatcctgaaatgtgatggatagatatagtgaatatcgtattatgtggatacttgtattttttgatttgcctacagaaactcaaaaagacaagaaagcttatgccttgtttcgtaaaaatttgcagaaagatggtttcactatgtttcagttttcgatttatattcgtcattgtgccagttatgagaatgcagaagttcatataaaaagggttaagtcatttttaccagaatttggtcaggtggggataatgtgtataacagataagcagttcgaacaaattgagctgttttatggtaagaagcctcattgtaaaaatgtagcaggacaacaattggagctattttagaaataagaaatcccgctttttatggcgggatttcttgtaggaaacatttcttttttaatttctattctttgatgtaatgtattgctatataggctgttgcacggattgtgctgtttcctatataacaaagttactaaattgaaagcaaatcacaacggattcagtgcggtgaacgtgttcaactttgctgtttcctatataacaaagttactaaattgaaagcaaatc

SEQ ID NO: 1439 - DNA, 10253 bp, synthetic construct
  source 1..10253: mol_type = other DNA
  misc_feature 1..10253: note = Synthetic
ggtaaccattcaatttaggccgtcctgtaatcaaacaaaaaatcccgaggttattcccgggattttttgtattggtatggcagaagttgtatgatctcatcttcatccatattgtctcttagcctgccaaggacatcggtgagccagtcaagagggttcaactgcacgacatcgcaggcttcaagcagcgagtagaatacggcattgtcctcagcccccttgtcatcatggctgaagagatagttctttctgcccatgacagaaggacgttgtccgcgctctacatcattgttgtctaagtggtaccttccgtcaagggcatagtttctcatcctgggccagagtttgtaagcatagtccagggctttccccaacaggtctgatggtgtggtagtcgtgctggcggctttcatccaagcctccatagcatccatgattggcaagcccttctccttgcgggcttttgccacttcttcgtacggggccttgcgctctctaagattttcctcctgggtatagagcagttcaatgtattcaatggcttttgatgccacaccggggcacgcccgttcggcctctacgaacttgcgacgaatgtgggccatgcaccccaacagggttacgccatcctgtttctcaaaataatcatagactttgtagccgtctgtctgtatggctcctcgatagtcctttagctgggcccttggtatttctcctccccgggagcctttcaagtagtagaaataaagaccgtgggaatccgggctggcatccctgaactgccatgcatagccatgtctgcatttgcctttcctgtcagctatcctccacggcacctcgtctatttggagatagtcgctatttctgatgtcttcccctaagctctcgtacaaaggataaagtttatcggccactgcatgaacccaattgttgacggttgacacagggagtacgacacccatttcattgagcatcttgacttggcggtattccggcagatggtgctcgtacttgtctatgatgatctgggcaaggacatccgctccgacgtgattgccgcctatgacggaaacaggggcggaagcctggactatcttcgggtgggccgcattcttgtccgttttgcggcgaaggatcgggcgctcggtgcattccacccaaaactttgcgggatcgcggtgcagcgtgcgggtgacatccttgccgattacgtcataatcgtcaggattgacgtcctttggcatttccgtatgccaccgctcctcaaggccggcgtatctgtattctgacggtctttggggtttggccggcttgcgactgcgacggatctgggcttccttttcaatctgttccttggccttctctatagccttatctttctcgtcacaagctttcttgaaaaagtcatcgaacaacgtaggcccgtcggaagaatcaactttcggagccttgtcacttttggaaccaaaaagcatacgctcaagataagctatacgctcgtctttgcggctgttttcggttcgcagcttcttgttttcctgtaggagctcctcgtatgtcggttgctttttcatgctataaaggtacataattttagcgagttagccaaacttttgaggcacttttttccttcttttttatattatcttcaccactgttttcgccgacttgaaagcgcttccttcgtctggcacctggagagattccctctatgaaaagaaccaactcatcccatcgaatttgtcggaatccgacttgctggcatgacgggaacagtcggggagaaagcctgcccgtctcaagacgcttataatacattacgtaacctcctcgttcccaatgaaggagcttcataactttgcgtgtcttccctacaaagacgtagacccttccatttgtaggttcatgcccagcttgtcggaccttgccgcacattgcgttgaccccaactctcatatcagttggggaattggagaggaaaaactggttattctcgttgagattaaacataaagctgtaaattttcggcaaaggtcggaaatttacagcttataggaaagacggcctaaactgaatgcttaccttataaaaaatacgtactttctcagagaaaaagtcattgttgacgatttccttcccgaagggtgccaatgccagtcgcatcagccggaagtgcatcttgccccaggggaagccgatgatggtgatcatcagcaacagcgaggaaacgaaatactccactgcgatgccgaatcctctaaagatgagccaaacaatgtttcctaatatcttcatatctgaggtttttgtttcaattgaaaaaacttctattttgcaaaggtaatgaatttcacagaaagcaaagaacagaaagtattctatattgtaggatataatttgtcgagaggtcgttagttcgaagtataataagcaaaggttcgaaatcttttgggtaccggggggcgaatcctttcgggtaccggggggtggaatccgttatcctctatggtgtcaagcttggtgtcatccactctgatccttaccttggtgtgaaactccacatggagcctgtcgaccgcggcttcctcactgaggacgagcttcaggcaatcattcaaaaggagttcgacatcgagcgtcttggctttgtccgcgatctgttcgtgttcgcctgcttcacggggctggcttatatagatgtcaagaagctcaaaccggagaatatcgtcacgctcaatggcatagagtggataaagattgcgcgtgagaaaacgtctacacctgctagcatcgtcctcttcgaaggcgcaaagtgcatcatcaagaaatatgagaacgaccctaagcgcaagggcaaactcttctcttcgatgtcaaaccagaagatgaaccagtatctgaagaagattgcagtgtcatgcggcattcagaagaatgtcaccttccatatggcgcgtcataccttcgccacgctgacgctcagcaagggcgtgcccattgagtctgtatcccgtatgttgggtcacaccaacataaaaacgactcaaatctacgccaaaattaccaacaagaagattgaagaagatatggacaagtccttcaatgacaagacgatacggaacttcagccgagagtctgcgagcatgacaggaatggatatgagtacagacaagaagaagtccgaagaggatgagaagcaaagcaatgataataaagacagagatcatccaaccctcctctgattaagtcttttttggtattctattggagcaatagtacgcccctgacgcaataaataattgtgtcaggggctttttagtagtataataatgtgtaaagatggcaatatggcaataactgatattctattctaatatgcaatactcttttgttgggttcataacaagcactaatttactaaaataatagaaagggtgaaatagtttcgtgactttagctttgttttgaacattcttcaattaattattacccatatgatttgtgatgtttaaaacataaaaaagggtgacttgcgccacccgaaatgttttcacaacggaataatccttattgtgattagctaaaactcgttgcaaagataagaaaaaaaactaattaaacctagctatttaaataattttatttatctttgccgataaaattaactaaaatacgatatatgagaacaattcttggtcttgacttaggtactaacagtataggatgggctcttatagacgacgagaataagaagataattagggcaggatgccgaataattcccatggacggacaagctatgagtaactatgagactggaaatctccagtcttctgcatctgtgcgtactagttttagggttacacggcgtttgtatcagcgagcagagttaagacgagaaagattgctacgagtcttaaatataatggggtttcttcccgaacactttaagaatcagattgattttgtagatcatcctggacaattcaagaatcatagtgagccattgctgccttatagaaagaacaaggagggcagaaacgagtttattttcatggactcttttcatgagatgcttgctgactttaaagtatatcatcctgaacttcttgctaatggtaagaagataccttatgactggacgatatacttcctacggcataaagccctttcacatcctatatctcgtcaggaacttgcatggataatcctcaacttcaacacaaagcgtgggtattatcagcttcgcggtaatgaagagactgagacaaaaaatggagaagaatataagattcttaaggttacaaaggttgaagatactggtgcagacaaaaagagaaagaacatgcactggtttgagattacatatgaaggtgacattaagcagaaacggttgtcagtagctccaccaaagtctgtgggagatacagccgaactgattgtaacaacaaagactaagaaggatggaagtctgtctgtttcactcagagagccaaaagaaggcgactggactctgatgaagaagcgtactgaaagcattattaatcatagtgggcaaaccgttggagaatatatatacacaactttgctcaaagagcctgactcaaaaatcaggggcaatgtcgtgcgtacaattgaacgtcaatattacaaggatgagctgataaagattcttgaaacccagaagaaattcattcctgagctacagaatcatagtcttatggagaagtgcgtcaacgaactttatcatcagaacgaggttcaccgggacgccatcagtaaggatagctttacacgttttatagttgatgacatcatcttttatcagagaccattgaagagcaagaaaggcgaaatagctgattgtcctttcgaaaaatatcgctataaggatggcgagggtaatataatagagaaaggtataaaatgcacttctaaatctgaccctctatttcaagaattccgtctctggcaattcatacagaatcttaagatttttgcaagagaaaaagaagttgacggcaaactaagaacagacgttgacgtaacatgtgactttatcaagagtagtgaagctatcgttgcattgtttgattggcttagtcggcagaaggagattacggaagacaaacttcttaaatctcaaatattcgatttgggcaagaatgcttcgcgataccgttggaactatgttgaggggcgtgcctatccttgctgtcctacacacgctgagataatatctcgattgtcgaaagtgaaaggtatcccaagcctttcacgtgaacaggaaatggatttgtggcatattctttattcggtggatgatgctattgatttggagaaggcattaggacactatgctgagaaaaatagtcttgatgtcagctcgtttaaggaggcttttaaagatatggagcctttcgataatgactatgcttcttatagccaaaaggctataaagaaattactccctttgatgcggtgtggtaaatattggactggtgacaaaataggcacttatacacatcagagaatcgacaacatcatgaatggcgtagtcgatggtaatatttctgatcgtgtacgtgagaaagctgtagctatgcggagtttagaagactttcagtatcttcctctatggttggcaagctatattgtctacaaccgtcattcagaagctttcgacacatcaatttggaaaacaccagatgatatagataattatcttaatacagaattcaaacagcactcacttcgcaatcctgttgttgagtcggttattggtgaagcaatacgtgtggttcgtgatatttggaagacatatggaaaaatctcagaagtacacatagagatgggtcgtgaccttaagcagaccaaagaccaacgggtaaagacgaatgagagagcattggagaatcagattactaacattcgtataaagcggttgcttggtgaatttatgaagccacaataccaagttgaaaatgtcagacctcagtctcctagtcaagcagagatactgaagatatatgaggatggcatattaaatagtggcgtggatgtaccagatgaaattgagacaatcttacgaaatcttggcaacctttcaaaagaggtttctggtagtgacataatgcgttatcgactttggttggaacaaggctatcaatcaccctatacaggtcaagtcgttcctttgtccaaactatttacccctgcttacgagatagaacacgtcattccgcaatcacgttacttcgatgattctatatccaacaaggtcatttgtgagagcgaggtcaacaaggcaaagggcaatatgctcggctatgagttcatacaacagcaggggggagcaatcattgttggcaatggtggcaaacaacacaaaattcttgataccaagcagtatgaagatttcgtgaagcagcactatgccaacaatagagggaagctgaagaaacttcttatggacgaaataccagatgattttatacagcgtcaactcaatgacagtcgttacattgcccgtaaggcgcttgagattttctcacatcttgtaagagaagaaggcgagcaggaagctatatcaaagaatgttgtttctaccaatggaagtataacgacccggttgaagaaagattggggcatgaatgatgtctggaatgacattgtcggaccacgcttcgagcgcctgaacagaataacgaagtcagaggcattcggctcatgggtcaataaggacggaaagcgctacttccaaacagatattcctttggagttgtcgcgcaactttagcaagaagcgcatcgaccaccgtcaccatgcaatggatgccattgtcattgcctgtactacaaaggatcacgtgaattatcttaacaatagcgcatccctttcctcaaaaggcgaaatacggtatgacttgcagcataagttgtgcaacaaggttaaaactgatgctaatggcaattatgtgtggcgtttccgtaagccttgggatacgtttacacaggatgcccatagggtattggacggcataattgcaagttttaaacagaatctgagagttatcaacaagatgacaaactattattggaagtacgttgatggcaaaaagcagcttgtcagacagacaaagggagacggatgggctgtgcgaaaatctctccataaagcaaccgtgtatggtgctgtgagactgcaaaacaagaaaactgttaagcttaaggatgccttagagaatttatccactattgctgacaaggatgtgcgaaaggcaataaagaatgttgtcgagctatatcatggaaaggttgacaataagactttgcttaaatactttaaggatagacagtacaaggtgggtaacaaggacatcagtaaagtagaagtgtacgatttgcctagtcagccagatatggctgcaacacgtgtgcctatagacacaagttttgatcaaaaggcaatcaattccgtcactgactctagtataagagctattcttactcatcatcttaagaactatagggataagtctggcaaagaccatcctgaacttgctttctcacctgaaggactggttaggatgaatgaaaacattcaggtgcttaataggggtaagttacataagccaattgtaaaggtaaggaagtttgagcctctaggcatgaagttcaatgtcggtgaatacggaactaaacaagagaagtatgttgaagttgataagggtaccaaccttttctttgcaatatacgtcgatgaggatggaagcagaagttatgatagcatacctttcaacgtggctgtcgaaagaatgaagaatggactacatccagcagaatcaaaactgcctgatggacgcacattgttattcacgctgtctccgtatgatttggtcgtacttcagcatgatggagaatggaataatcagttgtttagatttgtttcctcaactggtaacagagcatcattcatcccagtgaatgttgcctcaccaattgctaacaaactggaatttggtgctttaaacaagattgaacttactgatgaccggctttccatcaaacagtattgtattaaggttagtgttgaccgacttggcaacatcataaatctttaaagccaatgataaagaaaactctatatttcggtaatccagcatatctgtcgttgagaaacaaacagttggtaatacgattgcctgaggttgagcggcagatggatttaccagacatactgaagaaagaagcaacaaggacaattcctatagaggatatcggtgtgatggtactcgacaacaaggagattaccattacagaaggtgttatgtcagcgttgcttgacaacactgtggctgttattacgtgcaatgacaagcgtatgccagttggcatgttgcttccattgcaaggaaataccacacagaacgagcggttccgcagtcagcttggtgcttctttgcctctgctgaaacaactttggcagcagacaatgaaggcaaagatagagaaccaggcaacgttgctttcacgcttcactcctaaagaagcaaagaatatgtttgcttgggcaagggatgtaaagagtggcgaccctgataatcttgaagcaagggcggcggtctactattggaagaacatctttcaagatttcccgaactttgtacgtgataaagatggaacataccccaataatctgctaaactacggttatgcaattcttcgtgctgtcgtggcccgtgccttggtggtcagtggactgcttcctgttatgggaatccatcaccataacaagtacaacgcctactgtcttgcagatgatattatggagccataccgtccttttgttgatagccttgtattagacattatgaaggaaactagaccagtagatgaccttaccaaagaactcaagtccaggttgctgtcaattccagtattagatgtgaggataggtggaaagcacagtcctttgatggtggctgtatctcagacaacggcgagccttgcgaaatgcttctctggagaattaaggaaaatatcttacccctcttttatttgacagtggaactcaacgaatacaaggtaatgtgggtgatggtgatgtttgacctgcctactgaaacggcgaaagagcgcaaggctgcagcacgtttccgcaaggacatcatgggcgatggttttactatgttccagttctctatctacatccgtcattgtgcaagtcttgacaatgcaaaggtgcatatcaagcgtgtaaagtctatgctacccgattatggacatgtcgggataatgtgtattactgacaagcagttcgatggcattgaaattttctattgtcaaaaagaagaagcaaagattaagggtccaatccaactggaactattttaaaaatggattccaccgataaaggtggaatccatttcatcaactttttaatttcaacatcaatacttaatatattgattatcagcaatttgagataattgagttgttgatgaccttgcaaaggtacgaaaattttagctaatcacaacagaggccagcaaatcacaaaagaccgagtgttgttgatgaccttgcaaaggtacgaaaattttagctaatcacaactagcggtgccattggtgcggtagatgtccagttgttgatgaccttgcaaaggtacgaaaattttagctaatcacaacggccttggcgaactgataagccttgtcgtagttgttgatgaccttgcaaaggtacgaaaattttagctaatcacaaccccagaagccaaattatatttccattaattgttgttgatgaccttgcaaaggtacgaaaattttagctaatcacaacaatactcataattattactccttgttttggttgttgatgaccttgcaaaggtacgaaaattttagctaatcacaacaggttatcgacgacggcctgcaccatagagttgttgatgaccttgcaaaggtacgaaaattttagctaatcacaacccttgtgggtcgcgatgtgggcgttcccttgttgttgatgaccttgcaaaggtacgaaaattttagctaatcacaaccgtcaagaggtgtgccctgcttctcgacttgttgttgatgaccttgcaaaggtacgaaaattttagctaatcacaacactaatgcgtactataaggaagcagcaggagttgttgatgaccttgcaaaggtacgaaaattttagctaatcacaacaatatgcctgcatttcgtggtt

SEQ ID NO: 1440 - DNA, 10043 bp, synthetic construct
  misc_feature 1..10043: note = Synthetic
  source 1..10043: mol_type = other DNA
aactgaccctaaatgtccctgtttcaaccttatattttcatataaaccaggtattttgaatgtgtttttttacaaaaatatttttttaacaagaaatttttttatatttggcaattgccagaaaatacactggtaagtaaaatttgtaattgatatgggcagaccacctactagggcgaaagaatatagagatggattttatattgaagttcgcaataaaggatctcaaaccgggattaagattattcgtaagacggaggaagagatgatcctggccatacgggagtatgaaaaaaccaaggaagtgatcatcttgggggaatcgaaaaacgggaaatggatcaaacacgaggcctaatattgatttagatttttaagattgcaacaggcaggaagcagaaataaattattccattatcgccaatttaacccttagtaaatgatgaattcccgacttttcaggacaaagcctatgctcgatcatacgcatcaggccagtgataacaacgagatgaaaagggcactcagtgccacaaatcttacaacattaggaatcggtgccgtaattggtgccggtatttttgttttaacgggtcaggctgcagcacaatatgccggaccagccattgttatttcgtttttaatatccggtttggcctgtttgtttgccggtttgtgttacgccgaatttgcctcgatgatcccaatatctggaagtgcttatacatacgcctattctactcttggagaatttatcgcctggattatcggatgggacctgattttggagtacttatttgcagcatccacagtatcagtaggttggtcgggttatgtggttagtttcctcaaagatttcgggatcaatatccctccccagtttacggcagcttacagtactgttttggtgaatattccagatctgggctggaagcccattacagaccagctcaccgccagccttgcctcttccggcgttctgattgccagtcttccgcacatcactgccgtacttaacctgccggcaatgtttatcgttgccctgatcacaatcctgttgatcatcgggatcaaagaatcggcaagtttcaacaatatcatggtcatgatcaaagtatttgtgatcgtgttgtttataggtatcgggttcttttttgtccataaggcaaactggcatccttttatccctgagaatacgggtgtctgggggcatttcggatggagcggtatccttcggggttcggcagtgatcttttttgcctatatcggtttcgatgcggtttccactgctgcacaggaagccaaaaacccgcaacgcgatatgccgatcgggatacttgggtcacttggaatctctaccatcctttacattctggtcgccattgtccttaccgggatcgtgagctatacttttctgaacgtggccgatccgattgcagtcggtgtaaacgaaatgggtgccggattgttctggttgcgcccgatcatcaaaattgccgcaattgcaggacttagctcagtcattttggtgatgatgttaggacaaccccggattttttatgccatgtcgaaagatggtttgttgcccgcaaagttttcgaaaatccacccaaggttcaaaacgccatattacagcacagtcattaccggtgtagtagcactaatcttagccggtatcctgccaatcaatattttaggtgaattggtatccatcgggacattgcttgcctttgcgattgtttgtgtcggtatccttgttttaaggtacaaacggcctgagttgaagcgccctttcaaaacgccattggttccgttggttcccattctaggtgcagggatttgtctgttgcagatgtattctttgccattcgacacctggctcaggttgatcatctggatggccatagggattattatctattttacctacagcattaaaaacagcaagttggtcaaaaacgccaaaaaggtttagaccgattcttcactcctattttaagcctattgagtattgatcgtctcaacacttaataggcttttttgtaaagtatagttttcgatccttaaacacagggaattaaaaccaactattgcaatagatgaaaattccttttaaaatattgcttctccttttttcggttagttttttgacccttaatgaagtacgggctcaaagcgaacgagattgggtaagtttttcaaaacatcccattttaacaggttacggttttaagaaattaggccatcctgaactattccagggaaaccaaaagcataagaaatattttgaagggtggtactttaaaatggtttcagccgacgggtcatccatcctcagcatcattcccggcatttcactctcgcatgatggaaaagagcaacatgcattcattcaaatcattgatggaaagtcggccaaaaccgattattacccttttccaatcggcgacttttccttttcaaagaaggaatttgcaattaaaatagggcagaattatttttccaaaaacaaaatcctcctcaatatccattccgacagctcttctgtcactggtgagattaggatgtcaaaacaggtctgtctttcttcgccaaaaattctgaatcccgggatcatgggttggtaccggtttgtgccctttatgcagtgttaccatggggttgtcagccttacccacaagttggagggttatcttgtgaaaaacggaaaggactacaatttcaatcagggcataggatacatcgaaaaagattggggctcctcgatgccctcagcctggatatggatgcagtccaacaatttccacaaagggaacagttcctttatgttatcgatcgcaaacgtgccatggcttgggaaaccgtttacaggatttcttgggttctttttgaatgacagtactttatatcgttttgcaacctatacccatgcgaaattgtcgctgacggaatccggatcggacaccacaaaaatcaccattactgaccgcaaaaatacttattcaatagtggcagtccgcaacaactccggattgttgagggctcccgttaaaggttcaatggaccgccgtatcgccgaaagcatcgatgcaaaattgcatcttaatgtccgtgaccggaagggaaaaatcatttttgacgatagtacctcaattgccggttttgaaaaagttggagaccagaagatactggagggggtgcataagaaaagaaattagaaacttgtgaaacaagacctgtcaaattgcgaagctcatgacagtgtcttttaaatcagtttcttatcctaaatccaaacgccgacgggtcttcgacaccgttggggtttagactcgcgtaaccattcctatttaatccaacgctgacaggtctccgacgctgtcaggttttgacttcctttaccaaatgttttggctattccatcccaacagtggaaacacttacctaacttttgttgcagtcaaaagctccagaggagcgaaatctttgtggaaaaaccggctccccaaccctccggcgcaatcagaaataatcaaaaatgatcaaatgttgcttgcgccggaaggaaatggatcttcaaaagggcgggaagaaaagaaaaattatcgtacattatgctggcatttgaaaaatatttttcttagttttagagtgtcataaaaacttgatttaacatttactttttttactttacctaaacctcatggttatgaaggaatcctttaagaacaaagctttcatcgacaaaaaaacgacctttacgggttgcggttcacacaatgcaatgataaggtggaataggtcagaaacaaaaaaacgaaggcaactttcgctacctccgcttcgaatgttttcacaacggaataatccttattgtgatttgcttcaaattgtaccgctaaattactataaataatcaacaaacaaaattatatgaaaaaaattttaggactggacctaggtacaaatagcatcggatgggctttaatagaacaagattttgaccaaaaatctgggaatataattggcatgggttcaagaattataccaatggaccaaacgagtattggagattttgaaaagggcaatcctgtatcacaaacagctgatcggacaaacttcaggggaatacgtagattaagggaacggtttttattacggagggagcgcctaaacagagttctttatcaattggggtttttgcctcagcattattcagatcagattgattttgagcatcactttggtaagtttttaaacgataaagaacctaaaattgcttataaattaaatattgataccaatagatgtgagtttattttcaaatcctcattcgaagaaatgattgaggagtttcaaaagtgccaaccaaaattgtttttaaataataaaaagatcccctacgactggacgatatattatcttcggaaaaaggctctgtcatctcctatatctaaagaagaattatcctggttactattgcattttaatcaaaaacgaggttactatcaactccgcggtgaggatgagaatgaaaatacgaataaacttattgaatttcatgctctaaaagtggttgatgttcaagatagtggagatagaaagaataaagaagaaatctggtacaatgttattttagaaaatggctgggtttatagaaggacaagccgattgcctcttgattgggtaggaaagatcaaagagttcattgtaactactgaacttaatgatgacggaagttttaagatggataaagaagggaaagaaaaacgctccttcagatcacctggtgctgacgactggactttattaaagaaaaagactgaagatgaaattgagaaaagtaaccaaactgttggttcatatatctataatacgctattgcaatctcccgagcagaaaattaaaggaaaacttgtccgtacgattgaacgtaatttttatagggaagagttaaaacttattcttgaaaaacagcaagcatttcatcccgaattactaaacaaagctaattataagctctgccttgaagaactctataaaaacaacgaagatcatcgggctacatacaaggacaaagattttgtacatctttttgtcaatgacattattttctaccaaagaccactaaaaagcaaaaaatcagaagtcagtgactgtcgttatgaatttagaacatttattgacgaacacggaataaaacaaacaaaaatattgaaatgtattgcaaggtcacatccacttttccaggaatttaggctttggcaattccttcaaaacctaaaaatttaccaacgtgagaaatacattgatggtaggctttatacagatgtaaatgtaacctctgattttttaaaaacagaggatgactgggttgaactatttgattttcttaatgatcgtaaagaaatcgaccagaaagcctttttaaaatacccagctttcagactaaaaaagaatgtcgatctataccgatggaattatgtagaggataaaacttatccagctaatgaaacaaggtcacaaatgctcactaaattgaaatcgtcaaatttagctcctgagtttttaacaaaagatgttgaagagcacctatggcatattttaagttcagtagaagataaaattgagatcgggaaagcattagcgacatttgcaaagaagtacagtctttcaggcgagtttattgagaacttccgaaaatttgcaccttttaaaaaggaatatggggcctattcagcgaaagcaattaaaaagcttttaccattaatgcgcagaggaaaatattggtctgaagatggcatttcgccaaatacaagaattcgcttggaggcaattacagagcggttgaaatcaattaattacgataaaaatagaattgacgaaatcacagatgacgacattccaaaacaagtcttgaaaagctttcttgattgccagaatccttttaaagctttaaatacctatcaggcatgttatgctatttatggaagacactctgaagaaagtgatgttgtgaaatggacaactccaaacgaactagattattatttgaaacacacatttaaacagcattctttgcggaatcctattgtagaacaagtcgttacagaaacacttagagtagtttcagatatttggcagcaatttggtaatggtaatatagatttcttggacgagattcatattgagttgggtcgcgaaatgaaaaatactgctgatcaaagaaaaagaataactgaaacagtgtccgttaatgaaaatacgaatcttagaataaaagcattgcttattgagttgaaaaatgacccatccatccagaatgttaggccatactcgcaaagtcaactggaaatccttaagctttatgaggagggtgtattgaatgcaactgaggctataccagaagagatttcaaaaataagcaagaattcacaaccgacttccaatgaactgactaggtataaactttggcttgatcaacaatatcagtcaccctatacaggagaaatcatacctttaggaagactcttcacatccagttatgaaattgaacatatcatacctcagtctctttatttcgatgattctttaagcaacaaagtaatttgtgaatctgtagtgaataaggataaagacaataggatggcatattcgtacatccaacaaaatcaaggtaagattatcgagttggattttggtaagcaggtaaagctatttactctggatgcttatgaggactttgtgaaaacccgttttttgaaaaataaaagcaaattaaagaaaatgttgatggaggaaatacctgaagatttcattaacagacaattaaatgataccaggtacattagtaaactgattaagaatctcttatcaaatgttgtccgcgaagaaggagaggtagaaaccacatccaaaaacgtttgtgtatgttcaggaagtatcacttcgatcctaaagcaagattggggactgaatgatgtttggaatgaattaattacgcctcgctttgaaaggctgaatgaaataacaaagagccctaaatttggtcaatggacaaacaaagaaggcaaaagagtttttcaaaccgaaataccacttgagctacaaaaaggattttctaaaaaaaggattgatcaccgacatcatgcaatggatgccttggtaatagcttgtgctacaagaaatcatataaactacttaaacaatgagcatgcccacaaaaaggatgataaagtccggtttgatcttagggaaaaattgcgtagaatcgaaagaatggacattcaaaaaattgagaatggacaaaagattcgaagaacgataaatgttgccaaagaatttattaaaccgtgggagtcattcacacaagacacaaggctaaaactttcaactacaatagtaagttttaaacaaaacctgcggattattaataaaacctgcaattggtatcagaaatgggaaagacagcctgatggtagtattaagaaaatattcacaaaacaggaaaaaggagaccattgggcaatacgcaaactcatgcataaagagacagttaatggtttggtacagttgcggttcaagaaatttgtacagcttaatgcagccctagaccaatgggaaatgatcgttgataaatcattaaagaatcaaattcgaattctttttaaacagggttttgaaaaatcgaagatcaggaaattttttaaggttcttgaagataaatgggatggaaaagagatctcaaaagtagaattatactactttgaaaaagagatggttgcatcaagatcggcaattactgaatcgtttaattcaattggtatcctcagtatcacggatacagccagccaaaagatacttctaaatcatctggtaaaatacaatgagattaaggctgggaaaataatcgaacatcctgaaatcgctttctctcctgacggaattgatgaaatgaacagaaatatatcggacctaaatgatggtaaatttcaccagccaatatttaaagtcagaacatttgagacaaaaggaagtaaatttaaggttggttcaactggtaataaggtcaataaatatgtcgaggcagcaaaggggactaatctgttcttcgctatttatcaaaacaatgaagacaaacgatcctatgaaagtatccctttaaatattgtgattgaacgacagaaacaaggacttacaccagtgcctgagattaacgacaaagaggagcatttactttttcatctttcaccatcagatttggtttatattccaacaaatgaagaacaaattaataatcaatcctttggcatacagaatatcagtcaaatacagaattgtaatatttacaaaatggtaagttcaagcggaagtcagtgtttctttgtaagacacgaaattgcttcaccaatttggaacaaggttgaattttcggcacttaataaaaccgaaagatcaattgagggcattatgattaaagatgtttgctacaaactatcaataaaccgtttaggattcgttaaaggaataatcaatggtttaataactaataatataattaaggattaaaattaactattagtttttacttgtttttttatttttctataatgattaaacgaactctttactttggcaacccagcttatctccggtttaaagatgagcagttggtgataaatctgcctgaaacatctattttgcccgaaaaagaccgggtgattactattcctattgaagatattggcgttgttatacttgaaaatcttcaaatcacaatcacccatcaactagttaatgcacttttaaagaacaatgttgccattatcacctgtgacgaacgccatatgccatccggattgttgttacctcttgaagggaacaccacacaaagcgaaaggtttacccatcaggtaaatgcctcagaacccctgcgcaaacaattgtggcaacaaaccatccgtcagaaaatcttaaaccaagcctcggtacttaagcaagaagggcgtaaaatcgaaaatatgaaatactggtcagatcaggtaaaaagtggtgacaccgaaaaccatgagggccgggcagcagcctattactggggagaactgttcgattcgtcactcgatttcaggcgtgatccggaagggttcacacccaacaatttgctcaattatggttatgccattttacgcgccacagtcgcccgctcgcttgtggcttctggattgttgccaactttaggtatccaccaccacaacaggtacaacgcctattgcctggcagatgatattatggagccctaccgtccgtatgtcgatcagctcgtgcttgaaattcttgaaagtggcgaaatgcctgaagaactaacaaaagaacataaggccaagcttctgcaaataccggtgttagatgtcaatatcaattcccgacgaagtccgctcatgctggcggttcaacaaacaactgcctcccttgctaaatgtttcctaggcgatttgcggaaaattgaatatcccgaaatgaattgaacctttttaatggaacggttaaatgaatatcggattatgtgggtaatggtattgttcgaccttccgaccgaaacaaaaaaagagcggaagatttatgctgatttcaggaaaaaactattgaaagatgggttcacaatgttccagttcagtatctacctgcgccactgtccgagcaaagacaacgccgatgtccatatcaaacgggtaaagttggaattaccgcctcaagggcatattggaattttgtgcataaccgacaaacaatttggagatatggaactgttttatggaaaaaaagaggtggaaaaaaaaggtcaggtgcagcaattggagctattttaaatgacgatcaaaagtgattggaataaaaaaaccgggctttaatccggttttttctgctgatattcccttgttttaaatcctgatttcgaccatatttcactatcaatcagcctattaaatggaggtatggtgaatatcagtatgtcaaagatacaatttgaaagcaaatcacaacga

SEQ ID NO: 1441 - DNA, 9836 bp, synthetic construct
  misc_feature 1..9836: note = Synthetic
  source 1..9836: mol_type = other DNA
taagtaaagtacaccgggcgtctaaatttcttgcggccggtgtaaaggttggcggaaattacctgaaacattacgccagagaagccatcaacggaaaaacgggcaaggaaaacctgcataccgaaaatgcgcaggatatataccatgccctgagcgagctgaaaggcagcgccctgaaagctgcccagatgatgagcatggataaaaatatactgccaaaagcgtattccgacacctttgccatggcgcaatacagcgcccctcccctttcgtacccgctggtggtgaaaaccatcaaaagcaacctgggaaaagctcccgctgaaattttcgacagctttacgcacaatgctaccaatgccgcctcgataggtcaggtgcacaaagccacccttacggggaaaaccctggctgtgaaggttcagtatccgggtgtggcggccagtataggttccgacctgaaaatggtgaaaccctttgccctgcggctgatgaacatgagcgaaagcgacgtgaacaattatatgcaggaagttgaagaacgcctgatggaagaggccgattacgaactcgagctgcagcgctcggtaaacatcaccaaagcctgcctcgcggaagggttccccggaatacagtttccggtttattatcctgatctgtcgggcaaacgggtgatcacgatggactgggttgacggacttcatttgaaagagttcctgcaaacatcgccctcgcaggacgtgcgcaaccgcatcgggcaattgctttgggatttttacgatttccaggtccacagccttcgaatgatgcatgccgacccgcatcccggaaacttccttttcaaacccgacggcagtgttggtataatcgatttcgggtgtgtaaaagaaatccccgactggttttatccaacctacttccggctgcacgagccgggaattcttgacgattacaaccggatgatcgaattgttttatgagaatgaatttataagcgaccgcgacagcgaagaggacaaaaaacttttcattccgctgtttcgaaaggtgattatcctgatggggcaacctttttttgaaggtacattcgattttggcaacgacgaatattttgaaaatgtttatgccctgagcgaatccatttacaaaaacaaggatgtccgctcctcgaaccatgcccgcggcaacagacacgccctttatatcaaccgcacctacctggggctttatgtcatgcttcacgacctgcgggcacaggtaataaccagaagcagaaaccagtcatggaaaattacaaaaaccagggaatgaaacatatactatcattgcggaaaaccaaatatcaggaaaccataaaaaaattttcaatgaaatcaattgcagcaataataattaccatatcattgttaacaggttgcacacacggacaaacaacatcaactatgaagaaagacatcaccttgaatgtaaaccccctgggattccagtgggaagtaaacaatcccttcctgttttgcgcacatcatctcgaccagtatccggcgggaaatgaaaatatgggaccggatccatccttgttaaaaggcagaaacatcgggcaggattttacactgaaagacggctggcggatgtaccacggcgaaaaagtgcccggctttccggcgcaccctcaccggggtttcgaaacggtgaccatcgttcagcagggctttgtcgatcattccgattcacatggtcaggcagggcgttacggcatgggcgatgtacaatggatgactgccggttcggggcttcagcactgcgaaatgttcccgcttctcaatcaggacgggggaaatccgacggagctgtttcaggtctggctcaacctgccaaaggccaaaaaatttgccccgccattttacaaaatgcattggcatgaggacattccaaaagtcaggatgacagatgaaaacggcaaaacggttgagataactgttattgcaggccacgtaaatgaaacaaaagcgcttcctccggctcccgattcctgggctgccgacccagaaaatcatgtggccatatttacagtgaaaatggaaccgggcgcacaatggacattgcctcctgttcctgcggaagccagccgcagtctttattttcatcgtggagataagctgacagtgaatgacaccctgattccggcaaaacattctttcgatttgaataccgattcggaaatcaccctcgtgaatggagatgctgacgcttatatccttctcctccagggaaaacccatcaacgaaccggtggtgcagtacggcccctttgtgatgaatacggaggacgaaatccgtgaggccatccgcgattaccgggctaccgaatttggcggctggccatggccttcacacgaacacgtttttccacgcgaaaagggcaggtttgcaaggtatattgggggaaaggaggagataaaaccttaaggaaccaaatttttttatcccgcctgcaacactcttaatcccgttagccagattatggctaaagtccttattattatccgcacattttttgattttttcaaaaaatatttttttcggaaatccgattttagaaaattctctacttttatgctttcaaattgtgcatgatttcaacacagataaaatgaattattggaaaggaaatgaaataatttggtgcaaaaaagaaagcgatcccgtttccagaaccgctttaaatgttttcacaacggaataatccttattgtgaattgcttcaaattgtagcgtcaaaagtaaattaaatttctaaaacaacatatttatgaaaaaaattttagggctggatttaggtacaaactcaattggatgggcagttgtgggtgaaaatgaagaaaaaaaggagattcttggaataggcagtcgtattattccaatgagccaggatattttggggaaatttgacagtggaaattctgtttctcaaacagctgaaagaaccagtttcagaggaatcagaagattaagagaaaggcaattattacgacgtgaacgcttgcatcgtgtacttcatttaatgggttttttaccaatccattacgatgcagtgatagattttgaaaaaagaccagggaagtttatcaattatcaggaacaaaaaattgcatggaaaagcacatcgaaccagagatttgaatttttgttcaaaaattcatttgatgaaatgcttgaagatttcaaaaaaatcaacccttcatttttttctgcaactggaaataatcatgaaagaaaaataccttacgactggactatttattttttgagaaaaaaagcactgcaaaccaaaattgaaaaagaagaattagcctggattttactaaatttcaaccaaaaaagaggctattatcagcttaggggtgaggatgaagaaatatcaaacaaaaatgtcgcgtatcatagtttaagagtaattgatgtaactgttgatgagccacaaaaaggtaaaaatgatgtttggtacaatgtaattctggaaaatggctgggtttacagacgatcgtctcgaatacccttgtatgactgggtaagtaaaaccaaagacttcattgtaacaactgagttaaacgatgatggtacaatcaaaaaagacaaagaaggaaatgaaagacgttcattcagagcaccatctgatgacgattggacacttctgaaaaagaaaacagagacagaaatagaaaaaagccataaaactgttggcacctacatttatgacgcattattactaaaccctgaccaaaaaattaaaggcaaacttgttcgaacaatcgaaagaaaattttataaacaagaacttaaagccattttagagaaacaaaaagagtttcatcacgaattaactgatcctgaattattcagagaatgtcttacagagttgtatcaaaataatgagactcatcgtaacagcaatataaacaaggacttcacctatttgtttctcaatgatattctgttttatcaaagacctcttaaaagtaaaaaatcgttaatcagcaactgcaaatatgaatacaggacttacgttgataagccgaccggtgaaataaaaaaggcacccattaaaaccattccaaaatctcatccactttatcaggaattaaggctgtggaaatttgtgaaagatttgagaatttacgaaaaggataagattgttgatggtaaactaaaagcagaacaagacgttactgtagaatttctgaaaactgaaaatgacatcgtctccttatttgactggctcaacaaccgtaatgaaataaaacaagacaccttgcttacttcatggttcaaaataaaacgtaagaaaggagaagaatcacttcctttcagatggaattatgttgaagacaaggaatatccttgtaatgaaacacgttctttgatttttagtaagttatcaaaagctggaatcatcgcttcagatttcatgaatgaagaaaaaataatagctttatggcatattctctactcaatcgaggacaaaattgaaattgaaaaagcactcaaaacatttgcttttaaaaacaacctgaatgatgagtttgttgaaatcttcaaaaagttcccaccattcaaaaaagagtatggttcatattctgaaaaagccgttaaaaagcttttaccattgatgcgaattggaagatattgggataaaaacagaattgacgcaaatacattattaagaattgaaaatattataaatggtgaagttgacaataaaattagagaacgggtaagagaaaaagccatacatttaacagaattagagcactttaaaggtttgcctgaatggttggcatgctatgttgtgtacgacaggcactctgaaaccagcgaccttgaaaaatggaatacaccagacgagcttgattggtttctgaactccaaaaatcctgaaggcttcaaacaacattcactgaggaatccaattgtggagcaggtgattaccgaaactttgagaactgtcagggatatttggaaaaagtatggcgacattacagaaattcatctagagttaggaagagagatgaaaaatcctgctgacctgagaaaaaaactcacagctaagataaccgaaaacgaaaatacaaatttacgaatcaaggcattattggctgaattggtgaatcataacgatatcgaaaatgtcaggccttattcacccaatcaacaggaaattttgaaaatttacgaagaaggtgcattaaactcaagtattgagattcctgatgatatcgctaaaatttcaaaagcaggaaatccttccaaatctgaattaataaaatacaagttgtggctcgaacaaaaataccgctcaccttacactggtgaaataattccacttggcagactttttacctctgattatgaaatagaacacatcataccacaatcaaggttttttgatgattcgattagtaacaaagttatctgtgaatcagaaatcaatcatgaaaaagacaatgaccttgggtatgaatttattaaaaataacgaaggcaggattattgaattaagtttcggaaaaaaagtcagaatttttaccatttctgaatatgaggcctttgtaaaacaacactatggcagaaaccgcgggaaaatgaaaaaacttctactcgaagacctgccggaagactttattcaacggcaactcaccgatagccgctacatcagtaaagtggttaaaagttatctgtcgaaaattgtacgtgaaaaagatgaacaggaagctacatcgaaaaatgtaatttcctgtaccggtggcgttaccgccacactcagacaggactggggattgaatgaagtctggaacaggataatcactccacgatttgaaagactgaatgaattgacacaaagcaataaattcggacaatggaccaataaagatggtaaacgtgtttttcagattgatgtcccgcccgaacagcaaaaaggattcaataaaaaaagaatcgatcaccgccaccacgccatggatgctttggtaattgcctgtgcaacacgtaaccacatcaattacctgaacaacgcacacgccagtgggaaagattccaaaataagatatgatctgagaaataaactgcgaaggatagaagaaattgaagttgaaaaaacagtgaatggacaaagaatacgcaaaaaattaaaggttgccaaagagttcattaagccctgggatacttttactcaagatgcgcaaaaatcacttgaaaacataattgttagtttcaaacagaacctgagagtgataaacaaaacagtgaatagttaccaggtaatagagaatggcaggaaaatatttaaaaagcaaatcaaaggcgacagttgggcaatcagaaaacctttacacaaggacactgtttcaggaattgtaaatctcagattgaagaaattggtcaatttatcatcagcgattgatcaatgggaaaatatggtggataaaaacctgaaaaccaaaataaaacaattgatcaatgaagggttagacaagaaaaaaatgttgacattttttgccgaaaaagaaaacaagtggatggataatgatgtatcaaaaacggaaatctactatttcagcaacgagaaagaaattttggtggcatcacgcgaaaccctgaacgatagcttcaattcaaaaaccatcgaaagtattacggatcacggaataaggaaaattttgctgaagcacctggccaaatacaatgaacacaaagagggcaaaatcatcgaacaccctgaactggcattctcaccagatggtattgatgaaatgaacaaaaatataataagcctgaatggtggaaaatatcacaaaccggtcattaaagtccgaacctttgaacctaaagggaataagtttaatgtgggaacgaccggcaacaaaaaagcaaaatttgtggaagcagccaaaggcaccaacctgttttttgccatttaccagaattctgaagggaaaagaagctacgaaagcattcaaatgaatattatcatcgaacgccaaaaacaaggtttaatcccggtacctgaaatcaatgaaaaaggggaacagcttttatttcatctttcgcctaatgacttagtttatgttccaaaagaagaagaaatttttgaccagttatctgatatccatctaagattacatcaaaatcagcagaaaatgatctataaatttgtaagttgtactgaaaatgaagggcattttgtaccgaattattacgcatctccaattttgaaaaacgaacttggatcaaacaacaagaatcaaaacgcactaaatggaattcaaataaagtctgtttgctggaaacttgaagttgaccgtttaggaaatattcaatctatcattaaatgatcaaacgcactctttattttggaaaccctgcttaccttcatttgaagaataagcaacttgtcgtcaggttgcctgaagtagaaaaaaacgatatgttgcctgtatcatttaaaaaggaagccacggctactatcccggtggaggatattggtgtaatgattattgaccatggccaggttacatttacacaaggtttaatggctgctttgcttgacaacaataccgctgttgttatctgcgaccagtcgcacctgcccaacggattgttgttgccgctttcgggcaatacgcttcaaagcgagcgttttgccgatcaaatcaatgcttcggttcccttaaaaaaacaggtctggcagcaaaccatcaccgccaaaatagaaaatcaggctgcattgctcaaaaaagccggatgtgataacaacaagctgctggtttttgcaagaaatgtaaagtcgggcgacaccgacaacgtggaaggacgtgcctcctattattactggaacaacctttttccggaatcgttaaactttagcagaaaacgggatggcgacccgcccaacaacctgctcaattatggctatgccatcgtacgcgccattgttgcccgtagcctggtgggttcgggactgctgcctactttaggcatccatcatcacaaccgctacaacgcttattgcctggccgacgacatcatggaaccctaccgcccttttgtggatgaaattgtgctggatataacccataaaacaagggattataaggaacttaccaccgatttgaagaaaacactgcttggaatatccactgtggatgtgctgatggacgccgaaaaaagcccgttgacggtggctgcccaacgcactgcttcctcactggttaagtgctatgaaggaagcgcacgtaaaattatatttccggaatttgttcctgaaaaatgacattgacgttttgaaaactgatcgcctaaacgaatacagaattttgtggatactggtttttttcgatttgcctgtggttaccaaaaaagaacggagcattgccacccggttccgcaaggaaatcatggccgacggatttaccatgtttcagttttcgatttatgtgcgccattgcccgagccgcgaaaatgcggaggttcacatcaatcgggtgaagcgcattttacctgaaaaaggacatgttggcattcttaccatcaccgacaaacagtttgggatgatggaaattttcttcggaaaaaaagaaaagaaaccacccggagtagcccaacaattggagcttttctgaaatgaaaaaaagcctgttctgattacctgagcaggcttttttattcaatttttcattgctgaaaacaacattaaacaactgtttttcaatggatttatacctcataagttgtttagcaataagtcaaagatacaatctgaaagcaattcacaacgaaagtctgaattatcaacatgtcggaattgttgtttagcaataagtcaaagatacaatctgaaagcaattcacaacctgctgttgtattgtagcgccttgccagtggttgtttagcaataagtcaaagatacaatctgaaagcaattcacaaccagggtcgtaaatctttgtaactttcatttgttgtttagcaataagtcaaagatacaatctgaaagcaattcacaacatgtattctgcgttgtaagtatttccatcggttgtttagcaataagtcaaagatacaatctgaaagcaattcacaacaacggatacatcgacctgaaccggttgaaagttgtttagcaataagtcaaagatacaatctgaaagcaattcacaactaaagcaactgcatttcacgacgtgcaacagttgtttagcaataagtcaaagatacaatctgaaagcaattcacaacggggtgcaatgggtggagcattagttttcagttgtttagcaataagtcaaagatacaatctgaaagcaattcacaaccaatttcattgataggtaaagttatttcggttgtttagcaataagtcaaagatacaatctgaaagcaattcacaacaggaattgtaattcctatcggtgtgatttcgttgtttagcaataagtcaaagatacaatctgaaagcaattcacaacattaaacaatagcgaaccagttatctttgagttgtttagcaataagtcaaagatacaatctgaaagcaattcacaacttttctataacattcaaagacaaattgtggttgtttagcaataagtcaaagatacaatctgaaagcaattcacaacagtgtttgcgcttctccttcaaatactggtgttgtttagcaataagtcaaagatacaatctgaaagcaattcacaacattggttgaaggattccacggattgttgaagttgtttagcaataagtcaaagatacaatctgaaagcaattcacaactcggtttc

SEQ ID NO: 1442 - DNA, 9765 bp, synthetic construct
  misc_feature 1..9765: note = Synthetic
  source 1..9765: mol_type = other DNA
cttttgcatgcatgttggctgtatcgttcacccctccgttctgagcaatgatatatgccgtttcaagagcgttgatattggtggtaataactgccagcgttgggcttggagttgtaaaagaaacattacctgtaatagacgtaacgataaatcttgcttgtactattttttgtggaacgggcaattttgccaattttagcaccactactacttttttcataatttattgtttttgtgttccgctaattctcaataataatcatgaattactatcaacaaaaagcggaacggttaggatccaaacaacctgtctgcagacagctattattcaaatctagtagtggtatatcatctttaattgttttaaaatataattaatctcttttccgattcaacttgttccaattcctatttaacttgtttcttttcctatataaattagctcaatgtatatttactcttgtccaattcctattcactcttgcccggttttaatcggaattggttgttttcctatttatacccgtccggttcctatatactgttgtccaatttatactggaattgtaccaatgtatatttactcttgtccgatccctttttactttagtccttttcctatccgaattggctcaatgtatattaactctggtccggttcctatttactttggtccatttcctatcggaattggttgttttcctattcattcttgtacggttcctattcactcttgttgttttcctattcaagttgtaccaaaatgaacttatcttgttttaaacctaataattgaaagaacgaaccttgaaaataaattgattgattataataattttggaggataacggaaagcattaattatattgcatttatgatggtgttaaattttgttaaggaaagaaaatgtttttttgtttttaaattaaactcaaaaccgatgtaagatttttacgaattatgtaattattcgattaaattaaatatgtttaaagcaggtttaaatatttgcctaaagcagaaatgctttatatttggtagggaataaaaaaagcgagagattgctcttccgctttagatgttttcacaacggaataatccttattgtgatttgcttcaaaatgtaatacaaatgtaaattaaatattgatatgacaaaaaaaatattaggattggatttaggaacgaactcaattgggtgggcgttgattcaacaggattttgaaaataaaaaaggtgaaattcttggaatgggtagccgtatcattcctatgagtcaggatattttaagcgattttggtaaaggaaactctgtttcgcaaacagctaatagaacagactatcgaagtgttcgcaggttaagagaacgccatttattaaggcgtgaacgtttgcatcgcgtactaaatgtattaggttttctacctgaacattatgctaaagaaattgattttaaaaaacacttaggaaaaattttagaagaaaaagaacctaaattggtttggaaagaagtaacaaaaaacaagtttgattttgtcttcaaaaactcttttaatgaaatgttacatgatttccaaaaaaataaatccgagttactgaacagaaaaaataaaaaaggagaagatgccaaaataccttacgattgggcaatttactatttgcgtaaaaaagcattaaagcaaaaaatagaaaaggaagagttagcttggatactcttgaattttaatcagaaaagagggtattatcaattacgtggcgaagatgatgaaacagtattaaatattaaagaatatgtagaattactcaaggttattcaaattgaaaaaggagaaaaagataaaaagaatgataaaaaaagttggtataatataacgttagaaaacggctggatttactctgcaacttttacttcagaacctttatggttaaatcaagaaaaggaatggctagttacagaggaatacgatgaaaatggcattattaaaattgtaaaagacaagaaaacagataaagaaggaaagcaaaaaagaaagttcactccgctaccatcatttgaagaaattgatttgatgagcaaagcagaccaagataaagtttacaaaaaaataaaagctaaaacagaaatcacaattcgcaatagtggtaaaacagtcggcacatatatttatgacactttgttgcaaaaaccaaatcaaaaaataaggggaaaattagttcgtacaatagagcgaagtttttatgaagacgaactaaaacaaattttagaaaggcaaattaagttgcaacctgaattatttaatcgagaattatataacaattgtgtgcgtgagttgtatcgcaacaacgaaatgcatcaaacaattttaagtaaaaatggttttgttcatctttttctgaacgatattattttttaccagcgtccgttaaaaagtaaaaaatcttcaatcagtaattgtactttagaattccgtaaatacaaagacgaaaatggcaacgaacaaactgcaccattaaaagcagtttctaaatcgcacccgctgtatcaagaatacagggtttggcaatggttatacaatttaagcatttacaaaaaagaagatgaaactaacgtaacagcggaatttttaagctcaatcaaagattacgaaaaactatttgcatttttaatgcttcaaaaagaagttgaccataaagacattatcggttactttttgaaacagaaagacgataaactaaaaggcaaagccctaataactgaaactgttaaatacagatggaactacgtttacaactcagaaaaagacgaatcaaaaaattacccttgcaacgaaactggttacgaaatacggagacgtttagaaaaggttgaaaatgtacctacagatttccttaccgctgaaatagagcaagcattgtggcatatcatttattcagtaaccgataaaaatgagtttgaaacagcattagaaaccttcgctaaaaggcacaatttatattatgttccgaaatctgaacgaaatgctgaaaatcctgataaaaaatgttttgtagaaaactttaaaaaatttaagccttttgataacgattacggcagttactcattaaaagcaataaaaaaattagtacccttattgcgcctaggtaaatattggaaatgggatgctattgacgacaaaacgaaaaacagaattagcaaaattataacgggcgagtttgatgaaaacatcaaaaaccgtgtacgcgaaaaagctatacaactaacctcagaaaactgttttcaaggtttgcaactttggttagctcaatatattgtttacgatagacattccgaaggaaaagatggaaaaatatgggaatccatagctgatttggaaaaatatttggaagagtttaagcagcactcattacgaaatccaatagtggagcaagttataaccgaaacgttacgtgtggtaaaagacatttggaagaagtatggaaagagcgcaaaaaaattctttgacgaaattcacattgagttgggcagagaaatgaaaaacacagccgaagaccgtgcacaaattaccaaccaaataaacgaaaatgaaaacaccaacataagaataaaactgctattagctgaattgttaaacgaccaaaatgtagaaaatgttcgtccgtattcgcactcacaacaagaaattttaaaaatttacgaagacggggttttaaattcaggagttgaaattccgaatgaagtttctgaaatttttaaaaaatttaaagaaagggactcgaaaaaacaaccaacttcatcagaagtaaaacgttacaaattatggttagaacaaaagtatcgttcgccatacacaggcgagatgataccattgaataaattatttactgccgactacgaaatagaacatattattccgaaaagtcgcttttttgatgacgggttcaacaacaaagtaatttgcgaagctgccgtaaataaactaaaagataaccaactaggtttggagtttatcaaaaataatcacggtgaaattgtagaattaggtcaaggtaaaactgtgaaagtttttagtgaagatggatacaaagattttgtaaaacagcattacacaacgaatcattctaagaaaaataaattgctgttagaagaaattcccgaaaaaatggtggagcggcaattaaacgatacacgatacattagtaaattcatttcatcgattttatccaatattgttcgttctgaaacaaatgatgacggtataaactccaaaaatgtaattccgggtaacggaaaaattacggccacattaaaacaagattggggcttaaacgatgtttggaatgaattgatattaccacgttttgagcggatgaacgaacttacaaaaagcacagtatttacagcgtatagcgaaaaacaacaaaaacatttgccaacagttccgcttgatgaattttctaaaaactttaaaaagaaacgtatcgaccaccgtcatcacgctttagacgctttaattattgcttgcgccacacgcgaccacgttaatttactaaacaatcaacacgcaaaatcagaaacaaaacgttacgatttacaacgcaagttgcgaaagtttgaagacgttgaatacgatgataaaagtggcaagcgagtgaaaagagaagtacctaaagacttcttaaagccttgggacaattttaccgttgatgcaaaaaacaaattagaagcaattgtaatcagctttaaacaaaacttacgtgtaataaacaaagcaaccaacaaatacgaaagttataaagatgaaaatggaaatataagaattgggaaaaacggcaaacctgaaaaagactttattccgcaaactcaaggcgatagctgggcaattcgcaaaccaatgcacaaagaaaccgtttctgggaaagtaaaattagcaaggataaaagtacccaaagggaaaatattaacggcaacccgaaaaaagattgatacatctttcgatttaaaaactatcgaatcaattactgacataggaatacagaagatactttcaaattatttaaaacaagaaaaatttaaaggaacaaatgacaaagaggaagttttatataatcctgaaattgcattttcacctgaaggcattgaagagttgaataaaaatattataaaattcaatgataataaacctcatcagcctatttacaaagtacgaatttacaaagagacaggagaacagtttcaagtaggacaaactggaaacaaaaaatataagtatgtaacttctgctcaaggcacaaacttattctttgctgtttacactaatgaaaaagggaaaagggattttgaaactatccctcttaatgaggtcattgaacatcaaaaatggagagctactttacctaaagagcaacaaaaagcaacaccgttaattccgataaaacctataaatggcaccttattattttatctatctcctaatgatttagtatatgttccaacaaaggaagaacaagaaaattcaacaagaattgattttggtaatttaatgaggaggcgactttttgttgtaaatgatttttcaagtacttgttacttcacaccaaatcatatcgcaaaaaatatcgcacctaaagaaatagatttaagttttgattctaaaaagaataagctatcaggatcgtttgacacaaagacagcaagttttgaaggcgaacaaatcaaagatatttgcatcaaactacaaattgaccgattaggaaacatttcaaaagcctaaaatcatgtcgaaagcagcagtaaaaaaggaacttcaaaaattaaccaaagaacagttaattgagcaaattttggatttgtacgaaaaaaacaaagcggtaaatgaattttacaatttttacttaaatccacaaagtgaaaaggagttagttaaaaaatataagaaaattatacgccaagagttcaatgttgaaaaccctatgtgcagcaccgaaaaattttcggttgcaaagcgtgctatttcagattttagcgatttgcagccttcgcccgaagcgttatgtgatgtgatgctctatttgccggaaagcgcctgcgaattgacgtataaatacggcgattacaccgaacaattttataattcggcatacactaattttaaaacagcattagattttattgccaaaaaccacttattggctcagttcaaacaccgcgcagaacagtgtataaagtgggcttctccttgtggttatggtttttctgatgatataaacgatgcttattatatgtattatggtaattgaaatgtagtattaaacctgacaggttttaaaaatctgttaggtttcggaggcattgaaacaactttgtacaccaaatttccaaagtttggaactttggaaaagttaaaagacaagttcgaaagttttaaaaagcttaaatttgatatataaatggcaaagaaaaaaacatataaacccaaaacaaaatcctcatcggtaaatgagcctttgcttacttacggaaataagaggatcacattctttaattcttttgaagaacaagaaaaagataattactcgtggttggcatcactcaatcccgagcaacacttatactacgctactcaattaataaagcgagtatttgccaatgaattaaaagcaaatcctactataggtaataaaattaaatttgattaataatggatatactaaagtaaaatggcaaagaaaaaaacatataactcgaaaacaaaatcaacagtagcaaatgaacctttggtcaattacagggctgatcgcctacagttttttaattcatttgaagaagaaaatgaatatacatataaagaacgtgcttcaatgactccattagagaactttaaaacggttaccttaatgctaaaactacattttcagaaacaactaaaagaaaaccctacccttggtaaccgtatttattttgataaacaatgaatatacttttagaagaatataaaaagtttttactacttctattaaaacataaagtagaattcatactcattggtgggtatgctgtaatatattatggatattcccgaacaacgggcgatatggatatattggttaaagcctgacaacacgaacagagataaatttataaaggctttgaatgaatatggaattatttccgaagatactgatatattaaaacgtatcgacttctccaccactcaagtatttcatataggtaaggagcctaataaaattgattttttaacaaaaattcaaggtgtaacttatgccgaagctgataaagagaagatcttttttccgcttaaaaatgaacatgttcccattatacaatatagacacctgatcatcagcaaaatttcaagcggaagaggcaaagataaagctgatgtagatgaattacaaaacatcaataagtatcggaataatgattaaacgtactctctactttggcaacccatcttatttgagcctcagcaatgctcaattggttttgcgtttaccggaagtagagaaaaacgatacagtgcctgaacatttcaaaaaagaggcatcagcaagtattccggtagaagatattggcattgtagtattggatcataaacaaattaccattacccaagctttgatagaagctatgcttgaaaataatgtagcgcttattacctgcgatagtacccatcaccccaccggattaatgttgccattgtgtggtaatactatacaaaacgaacgtttcagggcacagttagatgctactgaaccactcaaaaaacaattgtgggctcaaaccatctcgcaaaaaataaaaaatcaggcagccatgttcggtagcagggatattgacaataactatttgattccactttaccgcaatgtaaaaagtggtgatcccgataattgcgaagcgacagcagcggcttattattgggggaatattttctccaatctcccctctccaagtggagaggggctgggggtgaggtttaagcgtttcagagaaggtttaccgcccaacaattacctgaactatggctatgctcttttgcgtgcaaccatggcgcgaagtattgttggcgcaggtttattacccaccttaggtatttttcatcataatcgttacaatgcatattgccttgccgatgacttgatggaaccttaccgaccatacgtagataaagtggtatatagtattattgaggagcacggaattaatgaagatattcctaaggaaataaaagcggtgttattaaaaattccggcaatggatgtgttgatggaaggagaaaaaagtccattgatgaatgcaacacagcgtactgccgttagtttggtaaaatgttttaatggagagcaacggagattagtgtatccggaatttatataattaagaatggtaaagtgcaccgtgtgttgtcagttcgagcgaagtcgagaacgagcgcgggcttgtcagttcgagcacttcgacttcgctcagtataaactccatcgagaacgtgcgaaagcattagtaaaaacaaaaaattaaacaatgagcctttttaagtatctatacgtttacatattaaaatgtgctgacaaaacttattacacaggtgttaccaacaatcctgaaaaaagaataatagaacataattcaggcgtaaataaaaacagctatacagcctcacgcttaccggtagaaatgatctattgcgaaaaatttaccgattttaaccttgcgatccgttgggaaaaacggattaaaaactggaacaggaaaaagaaagaagcattaataatggaaaattgggatcaactaaaaatagcagctgaatgtaaaaatgatacttcgcataagatttataatgaagcaaactaacacacattctcgactacgtttatactgagcgttgtcagttcgagcatagtggagaacgagcgcaagcattattgatttatgttcattcttctcgcgatctctattaaagtttatcccgagtgaagccgaaggagtctaactaagaattcaacgcacgttctcgatggagtttatactgagcgaagtcgaagtgctcgaactgacaacacacaaaataacgttaacaataatgagcatatctaccgaccgcctaaacgcctaccgtatcatgtggacactcgtaatgtatgacctaccaaccgaaacaaaaaaagaacgcaaagtcgctgcccgtttccgtaaagacttacaaaatgatggattcagtatgtttcaattcagtatgtatgtaagacatagttccagttcagaaaatgccgatgtacatagtaggcgggtaaaaaagaatttaccggaacatgggaagatcggaatattacaaatcaccgataaacagttcggtcaaatggaacttttttatgggtctaaacctgtagaattgccaaatgttccgcaacaattagaattattttaaagtcagttcgagcgaagtcgagaacaattagaaacaaaaaatccggtacgagcccggacatttgtttgataaacacctcatttttttattgataaacttaccttaaagcattgttgttgttgatttatatcctgatatgttgtttatcaataaatcaaagatacattttgaaagcaaatcacaactattgattcactgtataataatgcaggcaagttgtttatcaataaatcaaagatacattttgaaagcaaatcacaactaactctttgttcatatctacgtacattctgttgtttatcaataaatcaaagat

SEQ ID NO: 1443 - DNA, 9291 bp, synthetic construct
  source 1..9291: mol_type = other DNA
  misc_feature 1..9291: note = Synthetic
aaatcctacagcatctctgccaagaatagatatttctaattctaaccaaaatgccaattctacactgttcttaacgaaatcagactatttaagtcttcaagatttgacgctgagtgtgggcataccgcagagtttccttgaaaactacggaatccgagatgccaatatttatgtaacggggaacaaccttttcctaatctcaaagagaagaggctacgacccaaggctgtctatttctggcgtttcggagacatacggatataatctgttgtcaagtgtttcattaggtcttaatcttaaattttaattttaaaaaaagttatgaaaatcaataaaatattagcaggagcattcgttgctctatcacttttaagctgtaatagagaattagaaacagaatccgcgaaaccgatttcagaggagcagattcctgatgatgcagcatctttggacaagtatcttaatgggatttatctcggatttagaaatcatggttcgggtggaactaccactcacacagattttgggataatgtccataaaagcaggggttgatttgctttccaatgaccttattcaggcgaaacagcagcaccttgggagatattacaactacgaagcgagacaaagtgacaactttaccaacgaaatcgtttggaatacattttattctaaaatctttgatatcaatcgtctgatagagaagatagaagccataggcgtaaataatgaaaaccgacacatctacggtcagcttttggcacttcgtgcgtatagttattttaatttggtgagattctatgcgcttacttacatcggtcatcagaatgaactgggggttccgctggtaactacagcatccagtccagaaacaccgagagcaagagccactgtgcgcgaagtttatacccaaataaccagcgatatagaaaatgccatcacttcgctgaatggtttcactcagcgaaacattgcacagatagaccaaagagcagccaaagccatcgcggcggatatttaccttgaaataggagattataccaaagcggcagcctatgctaatgatgcccgaacaggcaaaacgctgatgtctcaggcagactacacaggtgcaggattttctctaaaaaccaatccagagattatctggggatttgataattctttacagaccaaaaacatcggtaatcactatgcttcgttcttctctatgtatgacagtatgaatgaaggctatgcaggagcagcaggaatttataaaatcattgataaaagattatacgataaaatcccaagcactgattatagaaaacaagtgttcaacggggctgcggcatctgcctatacctttaatggaaaaaccaaaactcatcctgcgtatgtgagcagaaagttcaaggatttgactttctttgagggggattatatctacatcagagcatcttcgctttactatatagaagcggaagctttggcgagactagggcagacagctcaggcgagacaggtgctctatgatattacttctgtgagagatacagggtacacactttccacgaactctgggcagagcctcatagatgaaatcatcctgcaaaagagaatagaactctggggcgaaggctacgcttggtttgatatgaaacgccttggggtggatttggtaagggattatccaggttctaaccatacctttgggaagtttaatatcagctattctacggattataaccaataccgtttccagattccacagagtgaggtgagtaacaatcctaatattgttcaaaacccagtgaaataagccatgaaaaccacagcccgctgaaaggagaaatccctttcggcgggttattttattggagcaggagagttgtttttctattttaattaaaaaaataaagtgttcattgtcaaggttttgtaactttgacaatgattttttgtaacgaaaaaaatatttcctgcactaatgtgggtataaaatgcattttagaaagttagagtttaaataattaaaatcaaaacaaatgaaaacaagtcaaaataaaaaagatttacaggagatgatgaccaagagaaaggatttattttgggctggtttttctttgataaacttttaaaagcattttatgaaagcagaacagcagcaggagtttatcaaacaactgaatgaaaaccagagggtaatccataagatttgtaaaatctacatggacaatcccagcgaccacgaagacctttttcaggagattgtaattcagctttggaaagcctatcctaatttccgtggagaagccaaattttccacttgggcttaccgcatcgggctgaataccgcactagcactattccgaaagcggaaaagagatgtccctgcggactccatggagattcttcccgagataaaaatagcagaagaacacgatgaccagaccgcacagatacaggcgatgtatgatgctatacaccagctgtccgatgtggaaaaagccctcatcatgatgtatctggatgacaagccctatcgagaaatttccgagatactgggcataacggaaggaaacgcccgagtgaaaatgaaccgtgcaaaagaaaaactaaaaaccctcatcaaaaaataaggctatggacgaattagaattgttaaaaaaagactggaaagaaaataaatctgatgattttaaaaattatacagaacaagaacttttcgcaatgaccaaaaaaaggtctgtttccatcgcaaaatgggtgtttatcattgctttgctagagctgggcttttggtttttaattggatatttagcgtcttcttcagaggatagtaaacatgaagatattccttttgttgatgtggtttttaatgttatggatataatttctattcttttaccatttgtttttatcggttcgcttttatatttaaattttaaaatcagaaccgaggaaaaccctaaaaaactgatggaaaaaatcctgctgatgaaaaaatgtatccaatggtatatcaggatatttttaggagaaatagtagtgtttttcatcatcagtatgatattgatattttatacaagataccatactttggaggcagaagaaatagaagggttgtattttatgattttcataatgtttattccttttttaatgattattttcatttttgttttattcctaagatttatttatcatctcgtttatggaaaactactacataaactaaaacaaaactacgaagaactcagcagaatggaagagtgaagtaaaaaatcccttaatctaagggatttttttatgaaataaaaaagccccgaagatagtcgaggcgctagatgttttcacaacggaataatccttattgtgagttgctttcaaatttgaagcaaagatatatcaaatctttcgtatttccaaacctatattttaagaaaattttaactaaatttggtatcgactgtaaaattttagcaatgaaacatattttaggcttagatttaggctcaaactctattggatgggcgcttattgaacaagattttgataataaacaagggaaaattcttggtctgggaagtagaattattcctatggatcagggaattttaggagagtttgagagaggaaataaagtttcccaaacggcggaaaggacaaaatttcgtggtgtacgccgactaagagaacggcatctgcttcgtagggaaaggctgcatagggttctccatttgttaggatttttaccgcctcattatgatgcacaaatagacttcatgaagcgttttggtaaatttatgggagattccgagcctaaactagcttataataatgaaggctttatatttttagaaagtttcaatgaaatggttgaggattttaaaaaacatcagcctcaactattttacataaaatctaatggcgaagagagtaaaattccttacgattggacgatttattatttaaggaaaaaggctttgtatgagaaaattagcaaggaagaattggcttggataatcctgaattttaatcagaaaagaggatactaccagttgcggggcgaggaggaagaaaaatctactaaaaatgtagaattttattctttagaaataacagatgtaatagctgatacgcctaataataaaggagaaatatggtattctatacatttggaaaacggatgggtatatcgcagagctagtaagatttcattggaagattggaaggggaaggtgcgagattttatagtaacgacagaactaaatgaggatggttctataaaactggataaagaaggcaaagaaaaacgctctttcagagcacccagcgaagatgattggaatttaataaaaaagaagacggagcagaatattgttttttctgggaaaacggtgggcgaatatatctacgatcatctattacaaaatcctaatcagaaaataaaaggaaaactagtccgaaccatcgaacggaaattctataaagaggaattaaaggctattttagaaaaacaagtagcccttcagccagagctttttacagaagagctttttgtggattgtgtaagagaattgtataaaaataatgaaatccaccaaaacagcctttcttcaaaagactttgtgcatttgttcctaaatgatattattttctatcaaagacctctgcgtagccaaaaatcaaatatatcaagctgttctctagaatatcgtttctgtattgatgaagaaacaaaacagagaagaaaaacttatctaaaagttatttctaaatcaaatccttattatcaggaatttagagtgttgcaatggctttctaatcttaaaatttatagaaaagaagatgataaagatgttacttctgaatttatttcttccatagagaacaaagaaactttgtacgagtttttgatgtctgaaaaagaggtaagtaataaatctgtacttgagtttcttttaatgaaatcactgaaagagacatatccttttgctaaagaaacagagctaaaaaaagaactgaaaaaagaaattacgaaataccgctggaactatgtatatgaggaggaaaatgataacaaaaaatatccaatgaatgaaacaggatatgagattagaaaaaggctgaaagaagtaaaaaacataccagataatttcttaaccaaagatatagaatatcagctttggcatataatatattctgtaacagataaatacgaatacgaaaaggctctggtgaagtttgcacaaaaacataatttggatgcagagtcttttgtagaacattttaagaaaataaaaccttacccaagtgattatggagcattttctgaaaaagcaatcaagaaactgcttcctctgatgcgttttggtaaatactggaattacagcaatatttctgaaccagtacaagcgcgaatatcagacattatcaatggagttgataatgagagcattaaaaccattgtgagagaaaaggctgaaaaattccagcttagccaagaagctgattttcaaggattgccactttggatggctcagtatatagtgtatggaattcattcagaggctgttgatatacagcgctggacttctccttctgatttggaagaatatctgaaaggcttcaaacagcattccttgaggaatcctattgtagaacaggtagttacagagactctacgagtggtaaaggacatttgggagtattatggaaaaggagaagaaaatttctttggagagatacatatagagcttggcagggaactaaagaaaacagccgaagaaagaaacagaatgactagggaaataaatgaaaatgaagaaacaaatctgaaggtaaaaaagaaattacaagaattatttgaagataaaagcgcagagaatgttcgtccgtattctcctattcagcaagaaaaatatagactttggctggaacaagaaaaagaatctccttacacagggcagccaattccgctgagtaaattgttcacagatgaatatcagatagagcatgttattcctcaaagtagattttttgatgacagcctttctaataaagtgatatgcgaggctgctgttaatgctgaaaaaggtgcgctgttaggtttagaatttataaagaaacatggcggagagatattagatataggactaaataaaaaagtcacaatccttaatgaaaaagagtataaagagctggtcaataaatactttgccaataaccgagcaaagaaagccaaaatgctgatggaagaaattccagagaaaatggtagaaagacagctcaatgacacaaggtatatcagtaaatttatttcacaaattctttccaatatagttcgttctcctcaggaggataatggtgtgaattctaaaaatattataccatgtacaggaaaaattacagccgcgctgaaacaagactgggggctgaatgatgtatggaatgaccttatcctgcctcgttttgagagaatgaataatctgacacagatagaattatttacgacatatagtgaaaaatatcagaagaagattcctactgttccgcttgaacacgctaaaggtttccaaaagaaacgaatagatcaccgtcaccatgctttggatgctttggttgtagcttgtgctactcgcagtcatatcaattatatgaataacaagcatgccttggataaacataaggcaaaagaagaaaaacagaacactagaatagatttgagaactgtcctatgtgagaagaaatataatgataatgctgaagacaaatacaactggacattcaaaaagccatggaatacctttacccaagatgtgcgaagcgcccttgaaatggtagttgtgagtttcaaacaaaacctaagagtaatcaataaagctaccaattactacgaaaaatgggtagaggaaagaggtaaaatggtaaagaaaaaagtgaaacaagaaggtatcaactgggctatcagaaaaccacttcatgatgatttaccttacggcgaaataaaatatcaaactaattatttaaaaatatctgaaaatatttctaaaagaaaatttataatagatgaatttattagaaatcaagtagagagaatttatgttgagaatcatagtaaaaataatctaacacagaaatatttaaaagaatatcctgtaatagatgaaaaaggaaaagaagttgtaagtactgattttagaatagaagtaattaaatatagaaaacgaaagccaatatcaatactttctgatagaaattctagaacaggaataaccactattgaaaaaatgcttcaagctattaataaaatagcagacaatgttttaaagaaagagttattattacatttagaacaaaataataatgacattgataaggcttttgcagtagaaggaatagaacgattcaattctgaaagaaagacacctgtatatagattaccttttattgaagatggagaaaaaaaaattaaattaggtagtaaaggtaaatatgtagaagcagccaaaggaactaatcttttctttggaatatatcaaggtaagggaaaacgctcctatgccactattccgttagctgaggttattgagcgacagaaacaagtacttacttctgttccagaatttaatgaaaaaggagaaaaattattatttagtctctctcctaatgatttggtgtatgtgcctatggagggtgaagatgtggaaagcatcaatttcaccaatttatccaaagaacagagggaaagggtttataagactgtaagttttacaggaagtcaatgtttttttgttaggcaagatgtagctactagtatagtaaataaaatggagtactcatcattgaacaaaatggaaaaaggtatcgatgggataatgataaaagaaacttgtattaaactaaaaatagaccgcttaggaaatatttcaaaagcttaatgttataaatatttttttagtcatgctgtatcgttctatttatattggcaatcctgcttatctaaagcttagggataaacaattaaagattactgaccctgaaaccaaaatagaaaagggaagtatttctatagaggatttaggattgttgatgcttgatcattatcagattaccatatctcatcagttgatgcaggaaatgatgaagaataatgtcgtaatgattagttgtgattctaagcatatgccaaaaggtgtaatgcttcctattcatgggcattctgagcattcggaacgaataaaatatcaattggaagcaagtgaacctttgaaaaagcagctttggaaacaaacgatagaatgtaaaatagaaaatcaggctaaagtattggagaaattaggcaggttttctgagccgatgtatgagtatttgaaaaatgtaaaatcaggagattctactaatatggagggtattgctgcccagcattattggaaacatcttatcagtccagattttctcagaggtaggtttggtgattatcctaatcagtttttcaattttgggtatggagttcttttgagcatcgtttctagagcaatagtagagacaggtctgcttcttgtattgggaatttttcataagaataaatacaatccttattgcttggcaagtgatatgatggagccatatcgcccatttgtggatatgctcgttatccaatggatagagaacaatcctgacatagaagagcttagcaaagaagcaaaagcacattttctaaatattgcttcaaaagatgtacagatagatggtcttgtaagaccactgatggttggtataaagacaacaatttcttcgctctataaatgctacacaggagagaaaagattgatttcttatcccaatttattatgaatagtgaacgactaaatgcatatcgaattatgtgggttatggtgctgtatgatttacctactgatacaaaagaaaatataaaggcatctgatttatttagaaaacgcctgatagatgatggcttttctctatttcagttttctatgtatatccgccattgtccaagccgagagaatgcggaagctcatatcaaaagagtaaaaaatatactacccaaacaaggaaaagtagcgataatgtgcattacagacaagcaatttggagcgatagaaattttttatgctaggaatgaagaaaaaccacctccagtgtggcagcagttagagttattttaatttttcgaatcgtataaaacaaaaaaatccgctgattatcagtggattttactttgaggctgtgatgtatccacaaagttaaagaatttgaaagcaactcacaacttacgaag

SEQ ID NO: 1444 - DNA, 9215 bp, synthetic construct
  source 1..9215: mol_type = other DNA
  misc_feature 1..9215: note = Synthetic
aatacctccaatcgccctagaaaagccgaatttggaggtatcgcaaaaataaatcgtccatcgagccatatgctcatcgcccatcgagccatatgctcattgcccattgagccatatgctcattgcccattgagccatatgctcattgcttatcgagccatatgctcattgcttatcgagccatatgctcataatccatcgagccatatactcatcgcccattgagccatatgctcatagcccatcgagccatatgctccttgccgaagatatgagtgaggtggccatatgctttagtattcattccgctttgcaggtgtctgctgtttcagtttataaagatataaagaggaaggcagtctagttagatcaggaaaagtctgcatggatcagagaagatattttcattgccttctaaagatatcttatctcaccgggcattattttataaactacgagagtatgggcatatatcatttaattgtattctaaatgataatagagaaatcgtgtttctttactttggtttttatttgttttatattatctttgtggtctcatatcatgttttcgagaagtctaatgcaaaatgctatatgaaacatttcggggagagtctgtttatgtgatgtaacatagattgtcagctattgggaacatggatgctgcagggcagacggacagtgtgtcgaaaggtcggacagtaaagtcatgccggtgatggtagtatcctgccggttggcggcatggagaatggcagagtggtgaaataaagaaaatactaagaacttatcgtatggattccttacataataagatgatttgtctcttgttgttcctggtcggcacgctcatgctggctggcggggtatatggatggacatcgctggcacggttttcgaaaacctccatacgtacgacaggtgtgataaatacaatccgttcggaaaggaagtaccgcttccggaagatgcgtatccgtcgtgagatgcggataagttatcgcacggaaaagtatggcagcttatatgtctctaaaaaatgctacctgcctttccgtagtgaaggcgacagcctggaggtgctttatgattccggtaatccttacgacgtgcgtattcctggcgatgagcgctgtatttggacggtaatgctggcaaccggtgtcttatgtgtggccggtgggtggctgatgcgaaagtcccaccgtcggttggaatgacaatttcttaatccttataaacatcaaccaatatgaaaaagaaaacattactgagaaccgtgtttctgctgggtttcctggtgctgacaatgccagtcatggcgcagtttaacttaaagaaggccatcagtggtgccgccaaggctgtaaaggccgtcaccctgaccgatgcgcagatgacggagtatgtcaaggagtatattgactggatggacaagcataatcaggtgtgtgatgccaatagcccttacaccaagcgattgaataagttggtcgaagggttgggcgatgctgatggcatccccttgaatttcaaggtctactatgtgacggacgtcaatgcctttgcatgtgccgacggcagtgtccgtgtgttctcttccctgatggatatcatgaccgatgaggaattgctgggtgtcattggtcatgagatcggtcatgtggcccatcgtgactccaagagcggctttcgcaccgcgttgctcacctctgcattgaaggatggcatctcctcacagggtggcaaggcagccacgctgaccgattcgcagttgggtgacttgagcgaggcactcgtcaatgctacgtattcgcagaagcaggaacgtgaagcggacgactatgggtatgaatttctgaagaagtcggggaaaaatccttggtcgatggccttgtctttccgtaagctgaaatcattgcaggagaaagtcggcgcacagaagaacagcaagctgaaccaactgttctccacccatcccgatcttgatacgcgtattaagcgtatggaagaacgcgctacggccgaaggaatagtgaagcctgctgatgtcaaatagtgacattactgcagaggtataagaaggatgtagggcagacaaggatatttatccgtctgtcacgcatccttcttgcatattgtctgcctatgcagacaatggatcagagtgttccgataggtcaggtatccggcttgcggatgccgtcttcatttttgtcatcacgatcgtccaatgtttgtttctcaggtatttgcatgttctgttggccttgctgccgttgatggtccgtaatgaaaggtgtggcacgattgtatgatagtgcctttgggtactagcattattttattatggtatcgttagtggcttttacataaatgttcgttgtcgtgcaggggcgggaatcttaaatacgtttccatgacgggcaacctggcctgcctgtcatcggtgaaaaataaaaataggggcaactatttggcgggtatgtattttttctctatctttgcaagtagaattttaagcaaatcacaataaggattattccgttgtgaaaacatttaggctggccctcgtccttggacgtcgggtcggccttttccgttcttggccgtcggcagggaacagggagaaggatggcttccgcatgccgcttagctcttgccgtgagaacgacacattccaggtgaggaggcattgaccagccctccaattagcaatccgaatgtcgggcatctgtataaccaggatgctgggatttggacaagataaccgatgggacttaaaggtggattacctttctatccattatcctaactaacatgaggcgcacgagtatgtacaatctgtcagattcgcattaaaagtgcgggataaaatgcttttcttttctaaaatgtttatatttgcatattaaatcatttgtgtcgttgacagaatataaatttattgagtatgaaaaacatattaggtttagacctcggaaccaacagtattggctgggctttagtgagaagtgacaaagacagtgacaatgtggaaagggcgaccggcataacggctgccggaagtaggatcatcccaatggatgcggcggtgcttggcgatttcgccaagggcaacaccaaatcacagactgctgataggacggcagccagaggcatcaggcgcctggccgagcgccataagttgcgtcgcgaacgtcttaatagggtcctcgatgtgatgggattccttcccgaccattattcttcgtcgctcacccgctatggcaagttcaaggatgacgtggaatgtaagatagcgtggcgaaaggacgagaatggcaaatggacctttgtgtttggtgactccttccgtgagatgctggccgattttgccgcccggcagcccgagtggctgacccgtggtaagaaagtgccctacgactggaccatctactatctccgcaagaaggccctctcaaagcctctgaccgggcaagagctggcctggctgttgctgaacttcaatcagaagcgcggctattaccagcttcgtggagaagaggagcagatgagtgagaagggtaagctcgtggagtattatgccttgaaggtcgtaggcgttgaggatacgggcgaaaggaagggcaaggacacgtggttcaacatcttgcttgagaacgggatggtgtaccggcgtacggcttccgaggctcccgactggataggaaagacgaaggaatttatcgttactacggatcttgagaaggatggaacaccgaagaaggacaaggatggcaatgtcaagcgttcattcagaatgcccaaggaggacgactggacacttgtgaagaaaaagacggagagcgacatcgacaagtcgggcaagacggtcggtgagtatatctatgatacgttgttggataatcctacgcagaagatcaggggtaagcttgtgcggaccgttgaacggaaatactataaggaagagctgaggagaatcctcgagacgcagaagcagttcatgcccgagctgacggacaaggcactttacgacaggtgcatagaggagttgtatcagagcaatgacgcctatcggaaatcgatctcgtcttacgacttcacctatctcttcatcgatgatatcattttctatcagcgtccgttgaagagcaagaagtcgctcatcgacgattgtccgtatgagacacggtcgtatgtcgacaagcagacgggcgaggtgagacagtctcccgtaaaatgtgtggcaaagtccaatccgttgtttcaggagttccgtctgtggcagttcgtgcagaatttaaggatcttcgagcgtcagaaaaaggtcggtgacagtgtgaagaccgacgttgatgtcaccgatgagtttatcaagagcgaggacgagcgggtcgccttgttcgatttcctcaacgaccgcaaggatataacccagggtgtactgctcggcacctatttcaaggtgaggaagccaaagggcaaggagggagagtatccctatcgttggaactatgtggaggacaagacctatccgtgtaacgagacccgtgcgctcatgctcaagggcttgaaggatgccggtgtggatgccgctttcctgaccgttgcccatgagcatcggttgtggcatgtcttgtattcggtagaggataagcaggagatccgaaaggccatggccgggtttgccaggaagtacaataagagggccgacaaggtaaaggacaagagcggtcatgtcattgagttgaacgacaagttcgtcgaggtgttcagttctttacctccgtttaagaaggactatggcgcctattcggaaaaagccatcaagaagttgctggcgctgatgcgcatgggcaaatattggagtgtcgctgccatcgataagcatacgcttgcacgtatcgacaagatcatcaccggcgaatacgatgagggcataaggacacgagttagggagaaggccatcagtctcaccgatgtgtctcatttcagagggctgccgttgtggctggcctgctacatcgtctacgatcgtcacagcgaggcgaaggacatcacccgttggagcagtccggccgacattgaccggtatctgaaggacttcaagcaacattcattgcgcaatcccatcgtggagcaggtgatgaccgagaccctgcgcacggtgcgtgacatctggaagcagtatggtaagatagacgagatacacatcgagatgggtcgcgacatgaagaatccggctgatgtcagggcgaagatctcgaagcggatggcggaaaacgagaatgccaacctgcgcgtcaagacgctgttgacagaattcgtcaatccggatttcgacatagccaatgtacgtccatattcaccgacgcagcaagaattgttgcggatatatgaggaaggtgttttggacagtgtcgatgaggtgcccgatgatatcaatgagatcatggccaaattcaatcagtctgatgtcgccaagcgcccgacccatggcgaggtgatgcgctataagctgtggcttgaacagcattaccagtccccctataccggccgtatcatctccctgtcccgtctgttcaccgacgactatcagatagagcacatcattcctcagtcgcgctattttgacgattccctgtccaacaaggtcatatgtgaggcagctgtcaaccagctcaaggaccggatgctgggttatgagttcatcaagaatcatcatggcgagaaggtcgacttgggcatgaacgttacggccaccatccttaccgtggagaaatacgaggagttggtacagaagaatttcaggaagaatcctgtcaagatgaagaagttgctcatggacgacatcccagacaagttcattgagcgtcagctgaacgacagccgttatatcagcaagaagatcaagtcgttgctttccaatatggtacgtgaggagggcgagcaggaggacatctctaagaacgtgatcacatgcaacggaacgatcacggacaggctgaagcgcgactggggggtgaacgatgtgtggaatcacatgatactaccccgcttccaacgcctggacgcccataccgattcgcatcgcttcactacaaccaacacgaacgggcacaccatacccgacatgccgctcgacctgcaaaaggggttcagcaagaagcgcattgaccaccgtcatcatgccatggatgccatcgtgatagcctgtaccacgcgcaaccatgtcaatctgctcaacaatgaggcggccatgtctaagaacaatgccatgcgctaccagctctcacacaagttgcgtcgttatgaggatgtcacgaagacgcaggatggccggacacgtaccattagtgtagcccgtgagttcataaagccgtggccgggattctgtggcgatgtggagcaggccctgcaggggatcgtcgtcagcttcaagcagaatctgagggtgatcaataagacggtgaacaaatatcagaagatcgtctatgacgaagagaggcattgcaaggtgaagaagatggtgaggcaggaggagcatgacggaaggcatctcctggccatacgcaagtcgatgcataaggatacggtctatggcgaggtgaacctcaggcgtatcagggaggtgtcgctcaaggaggctgtggccaatccgaaggctgtcgttgacaaggacctgaagaagaagctcaaggcaatggttgagttaggctacgaattgaaacgtatccagcaatatttcgacgacaataaggatgcatggcaggacatcaacctgaagaagatcaaggtgtactatttcacgaaagacacacgtgaccgttattttgccacacgttccggcaatgatctcgtagcgttgttcaacaagacaatgaagaaagaggaggtggaaaagcaaatcgggaaaatcaccgacaccggcatacagaagatcctgcgccggcatctcgagaccaatggtggagactataagaaagcgttctcgcccgatggcgtggacgagatgaaccgtaacatacggcaattgaataacgggaaggcacatcagccgatctataaagtgagagtctttgaaaaggccgacaagtttgccgtaggcgtgaggggcaataaggcggccaaattcgtggaggctgccaagggcaccaacctcttctttgctgtttatcagaaggaggtgaaggacagtgctaccggcggaacgacgatgaagcgggtgttcgataccgtacccctaaagatcgttatcgacaggctgaaacaaggactgacacccgctccggaagagaaggagggtgccaagttgttgttcgtgctgtcgcctaatgatctggtctatctgcctactgcgagcgagagggagagcggaacgatacaacaaccgttggataggaagcggatttataagatggtatcatcttcaggaaatcaatgctttttcttaaaatataatgtggcgtcacctatcgttgacaagtttgagttttcttctttaaataagatggagcgtgccattaccggtgaaatgataaaggaaagttgtattccgattcgtgtcgaccgtttaggtaacattattgagattaataataaaaagctatgataaagcgtgctttatgtttcaccactcctgcgtatctttccttgaaggatgcccagcttgtggtgaggttgcccgaggtggagaagagcgatttgcccgtctatatgaagaaggagagtgtgaggaccataccggtggaggacatcggtgtggtcgtgctcgacaacaggcagataacggtgacgcacggactgctcgaggctctgctcgaaaacgattgtgccgttatcacgtgcgactcacggagcatgcccgtagggctgatgcttcccctatgtggcaatacgctgcagagcgagcgcttcgggcgacaaatcgaggcgtcgctgccgttgaagaagcagttgtggcagcaaaccatcaaggcgaagatcagtcagcaggcagccgtgctcagtaccgtgtccggagtggagactggctgcatggagcggtgggcggctgatgtgcgtagtggtgatgcggataaccttgagggaagggcggcggcctactattggaagcaggtgttcagcgacattcccgccttgtcaggcttcacccgggggcgcgaaggcatgccacctaataatcttctcaactacggatatgccatcctgcgagctgtgatagcccgctcgttggtctcggcggggttgttgcctacgttgggcatacatcaccacaaccggtacaatgcctactgcctggccgacgacgtcatggagccttaccgtccctatgtggatcggctcgtacgcagcatgatagcagaacgcgatatggacgagtacacccgactgaccaaggagttgaagatggagctgctctctatccccacgatcgaggtgacggtcaacggccggcgcagcccgctgatggtcgctgccacacagacggccgcatcgttgtgcaaatgttacagcggggagttgcggcgcatagcctatccggagatcaactgatcctccgttgcaagggagcctgtgtattgacagaataggatacagtaaaagtaaataaaccattgatgctatggaccgatttagtgaataccgcgttatgtggatacttgtatttttcgatttgccgaccgataccaaaaaagacaagaaagcctatgcgctttttcggaagaatctgtgtcgggacggattttccatgtttcagttttccatttatatccgtcattgtgccagcatggagaatgctgcagctcatatcaagcgtgtgaagtcgtttctgccggagtttgggcaggtcggcattctttgcataaccgacaagcagtttggcaacatagagatattctatggacataagcctgccgaaccgaagacggaaggacttcagctggagctgttctgatccttacaggggctttatgccatctatatcagaaacgggaatcctgccttgtggcaggattcccgtttctcgcaaacatcatttttattttctatttcccgtcttatctacctatgtatcagatgtttatggacatcgtgatgtttgttattatgcaaaggtaagaattttaaagcaaatcacaacacaataggacaggacagatattcaccatacgatgtttgttattatgcaaaggtaagaattttaaa

SEQ ID NO: 1445 - DNA, 9058 bp, synthetic construct
  source 1..9058: mol_type = other DNA
  misc_feature 1..9058: note = Synthetic
gatttaaaacacggattttagcaaaaataacagcattaacattggttcaattcatcaataaatttatttttgatagaccaataaacaatattaagaatcaaataatttaattacacccaacgggttgtatataataaaaatgtatctaaataatattaattatcttacatttatagttaaaaataaatctagacaactagaataattaaaatataagcaagtacaatgaaaaaaatattaggattagatttaggaacaaatagtattggatgggctttaacaaacaatgatttcgacaataaacttggtaacattgaaggattaggaagcagaataatccctatgagccaagatgttcttggtaaatttgatagtggcgtatctatctctcaaactgccgaaagaacaaaatacagaggaaccagaagattagtacaacgatttttattacgaagagagcgacttcatagaattttaaatattcttgattttttacccaaacattatgctgaaacgattgattttgagaaaaagtttgggcaatttaaacctgaaaaagaagaaaaattgtctttttataaaaatgaaagtggcaaaaatcagtttttatttttagaaagtcatcaagaaatgcttgccgaatttcaattaataaatcctgatttaaaacaagttccgtatgattggactatttattatttgagaaaaaaagctttaactcaaaaaatttctaaagaagaattggcttggatattactcaactttaatcaaaaaagaggctattatcaattacgtggggaggaacaagaagataacaaaaataaacttgaggagtttcatactcttacagttgtagatgtaattgaaagagagaaaggaaaatcaggaatatggtataacgtgattcttgaaaacgggtggatttataagcgtgaaagcaaaattgcattatttgattggattggcaaacaaaagaattttattgttactaccgagttaaatgatgacggaactgtaaaactaaataaagacaacgaagaaaaaagaagttttagatctccaaaagaggatgattggggattggtaaaaattagaaccgaacaaacaataaatcaaagtgaaaaatcggttggtacttttatttatgatgcacttttaaaaaatcccaatcaaaaaataaaaggcgagttgctaagaaccatcgaaaggaaattttataaggatgaattatcaaaaattctaaaagcccaaattgcatttcatcatgaaatttttggagacagaaatctttataaaaaatgtattgatgaattgtacagacacaatgaatcacacaaaaacaacattaaagacaaaggttttgattatttgtttttagacgatattattttttatcagcgtccgcttaaaagtaaaacctcattaattagtgattgcagtttagagtttgtcccaattaaagacgaaaatggtattttagtaaaagatgacaatggcaaacaagttgtaaaacctttaaaatgtattgcaaaatcaaatcctatttttcaggaatttagattgttgcaatttgtaaaaaaccttaaaatttacaaaaaagaaattgtaaatgatgttgatgtaacccatgattttataaaaactgaagaagatttagttgaacttttcaattttttaaatgataggaaagaaatagatcaaatttcacttatcaaacatttattaagacctttaaaattaaaaggtaaattattagatgcggaagttgcaaaattaagatggaattttgtagaagacaaaatttatccttgtaacgaaacaagaaatcagtttttgaatgccgttgcaaaaattgatgtagataaatctttttttgatgccaaaaatacccaagatttatggcatattttatattcggttacagataaaattgaaattacaaaagcaattaccacttttgctaaaaaacataatttacctgatgaatttataaccaatttttctaaattaaaaccttacaaaaaagactatggttcgttttctgaaaaagccataaaaaaattattaccattaatgcgctttgggagctattggaaggaaagcaacatcgatatcaaaaccttggcgagaattgataaaattcaaacaggcgaatttgatgaaaacatgagaactcgtgttcgagaaaaagcaattcatttaagtaaaacaacagattttcaaggtttgcctttatggttagcatcgtatattatttatgaccgacacagcgaagcaagtgatgtttcaaaatggaaaactcctgcagatattcaaaactttttaaagtatgatttcaagcaacactcactccgaaatccaattgtcgaacaagtaattactgaaactttacgcgttgtaaaagatatttggcaacattatggcgatggaaaagaaaatttctttaccgaaattcatattgagttaggtcgtgagatgaagaatgacaaggcaactcgtgaaagaatgactaaaaaaatatcagaaaacgaaaatacaaacctacgcatcaaagccattttaacagaattgaaaaatgatggtcttaatgacattcgtccttactcgccaagtcagcaagatattttaaaaatatatgaagaaggagtgtatagcaatgaaaataaaaaagaaaagttagaagaaattgataaaatcagaaagaatgcaaaaccaaccccttctgaaattatcaaatacaaactttggttagaacaaggctatatttcgccttatactggaaagctaattccattaagcgaactgtttacaactaaatatcaaattgagcatattatcccacaatcaaggttgtttgatgattcgttatcaaataaagtgatttgtgaatctgaagtaaatgaattaaaaagcaatatgactgcttatgagtttattcagaataacgaagatagaattgtaatcttgactggaggtaaaacggttaaaatttttactaaagatgcctataaccaacacataactgcttattacagcaaaaataaaagcaaacaaaaacgattattgagcgaagaaattcctgaaaagtttatcgaaagacaattaaatgacaccaaatacatcagtaaaattgttaagaatctattaagcagaatagttcgagaagaggaggagcaagaagtaacttcaaaacatattgtttccttaaatggttctatcacatcaagaatgaaacaagattggggattgaatgatgtttggaacaacatcgttacaccacgttttgaacgtttgaatgcgctaacaaactcaaatgattttggacaatttgaactaaagaaagatgcttatggaaacaaagggaaacaaatatttcaaaccacagtacccgatgccattgccaaaggttttactaaaaaaagaattgaccacagacatcatgctctggatgctttggtaattgcttgtgtgagtagaactcatattaattatttgaataatttaaacgcaagagatacagatgacaaagctgtaaaacatgaattgagaaataaattgtgttttaaaactaaaccagatagcaatgggaattataaatgggaattttacaaaccttggaaagacttcacgacagaggcagaagataaactaaatacgacaatcgttagctttaaacaaaacacccgagttatcaacaaaacagtaaacaagtacacaaactataaagacgaaaaaggaaatttgaacattggaacaaatggattggttgaaaagaaaattattactcaaaccaaaggcgacaattgggcgattagaaaaccaatgcatgccgaaacggtaagcggaaaagtatttttaaaacgtatcaaacaaagtcctattactattgcaaatgcgattgaacaaatagaatttattgttgataaggaagttaaaaaacaattagcatctaaaatcaaacaatatccaaacaatatggtaggtttaaaaaaacacctcaaagcttttcctgtaatgattgatggcaaagcaattgacaaggttcaggtatatgaaactatagaggccacagccacaagaaaaacacttgacataacttttgatgaaaagaaaattgaaaaaataacagatactggtattcaaaaaattctattaaatcatctgaaacaagaaatgtatcaaaatgcaattcatgaaaatggcgaaaaaatccctgctcacgaagttgctttttcagaaaatgggttagatgaattaaataaaaatttaacaactttaaataatggtaaaaaacatcaaccaataaaaaaagttagagtttttgaagaaggaggaaaatttaggctagggcaaacacaaaacaaagcagataaatatgttgaagctgcaaaaggaacaaacttgttttttgcaatttatcaagatgaaaaaggaaagcgaaattacaaaaccattccttttaatgaagtaattgaaagacaaaaacaaggcttaagtgctgctcaagaaactgatgaaaacggaaatcgtcttttattcactctttctccaaatgatttagtttatttaccaacagaagatgaaaaagaaaatttaactacaattaattttgataaattatcaaaagaacaaacagaacgcatatataaatttgtaagttgtactagtggagaaggtcattttgtttctaataattattcaaaagaaataatttctaatgaaaatgggtcaaataataaaaatgaacgaatgctagagttgaacaattcaaatactatttatgatgagaaagaaaaaccagtaatgataaagtcagtttgctggaaactagaagttgatagacttggaaaaatcagaaaaatcatccgatgataaaatatcaatgcaaaaatcaataggattgggctttagcctattcaacaaaaaattgataaaaaattaaaattgagataaattcaaattcatagaaatgggttaaaacccatttctatgaatttgaataatcgagattgactttagccaaaatatttcataaaccatttttaaatcgcaaaatatgataaaacgcacccttttttttggcaatccagcttatttaagcaccaaaaacgagcaaattgtaatttcttatcccaacaaggagcaagaaaccaaaactgtggctattgaagatattggcgtaatcgttttagaaaaccaacaaataaccattaccaatggtctgttagaaaaactaaccaacaacaacgtggcgttaattaattgcgaccaataccatttgcctattgggttgttaatgccgctcaacggacatacagaacaatcggaacggtttaaaaaccaaattaacgcttctgttccacttaaaaaaaacttatggcaacaaaccattagtgccaaaatcatgaaccaagcaggattgcttaaagaaaaaggaatcccgtgccgaaaaatggagctttgggcaaaagaggttacatcgggcgatgcgctaaatcacgaatctagagcagctgtattttattggcaaagcctgattacggtaccaaattttaccagaggacaaaaaggaattccgcccaataatttattaaactatgggtatgcaatactgcgagccattactgcaagagccattgttagttcgggcatgttacccactttaggcatctttcatcgcaacaaatacaatgcctattgtttggctgatgatattatggaaccctatcgcccatatgtagatttgatcgtgtgtcatattatagatacagaggattcatacgatgagctgaccatcgaaatcaaaaaacaattactcagcattgccacaattgatgtatgcatagatggcaaaaatagccccttgatggttgccatgagcagaacaacacattccttacaggaatgctttgcgggagccgcaagaaaaattttataccctatttatgtatgacgaacattacacccgtttaaaccagtatagaagtttgtggatattagtattttttgacctgcccaccgaaacgcgaaaagagcgtaaaattgccagtgaatttcgaaagaaattattggacgatggtttttctatgtttcaattttcgatctatatgcggttttgtgccagcagagaaaatgccgaagtacacaccaaaagaataagaaatagtttgcccgaacacggcaaaattggagtaatgcaaataaccgataaacaatttggtatgatggagcttttttatggaaaaaaacctgtagaaacagacaaaccttcgcagcaattagaacttttttgaaaaataggatttagaaatattagacctaccagaatatcaacacacaaacagaactgttttttaatttcaaaataagcatataaccaccaacatatcaaacgattaactcgcggtatgttggtaattataagctaaaatacaattttgaaagcaattcacaacccctttatacggaatgtcgcaataaattaagttggtaattataagctaaaatacaattttgaaagcaattcacaacgcatctgtaccacccacaactgtcattatagttggtaattataagctaaaatacaattttgaaagcaattcacaacgacatcttgcgccagacacaaaagaccatcgttggtaattataagctaaaatacaattttgaaagcaattcacaactatcatttgacgatatacgaacagatttaggttggtaattataagctaaaatacaattttgaaagcaattcacaaccatctctaatctcgtatgctagtttttctcgttggtaattataagctaaaatacaattttgaaagcaattcacaacattctgtaggtagctcccaagagattcgcagttggtaattataagctaaaatacaattttgaaagcaattcacaacacttggttacttaatttattaggtgtattgttggtaattataagctaaaatacaattttgaaagcaattcacaaccgtgaaagcgtatgtgtcaggcttttttttgttggtaattataagctaaaatacaattttgaaagcaattcacaactattgccttatttacgaggcgtaattgcaagttggtaattataagctaaaatacaattttgaaagcaattcacaacgtcttctcgggcgttacataataagccccagttggtaattataagctaaaatacaattttgaaagcaattcacaacctaaaaccatatctataatagcttcttgatgttggtaattataagctaaaatacaattttgaaagcaattcacaactataccaccaacatttgcaacgcgctgtaggttggtaattataagctaaaatacaattttgaaagcaattcacaacccaaggacatagctcgctatcatcatctagttggtaattataagctaaaatacaattttgaaagcaattcacaacgcgattctcataaagagttattcgatagtggttggtaattataagctaaaatacaattttgaaagcaattcacaacagtaaatgaatatattaaaaaagattattggttggtaattataagctaaaatacaattttgaaagcaattcacaacttgaacccataatgtaatacttgccaataagttggtaattataagctaaaatacaattttgaaagcaattcacaactggtaagaagatggctcgcagaaaacagcagttggtaattataagctaaaatacaattttgaaagcaattcacaacctgttgtcaatgaaaattggatcagtaactgttggtaattataagctaaaatacaattttgaaagcaattcacaactccatcgtgtatgtcaaatcttttctttttgttggtaattataagctaaaatacaattttgaaagcaattcacaacaagatgctgaaatcatcgcagaaaatcgcaagttggtaattataagctaaaatacaattttgaaagcaattcacaaccaaggaatctttcatcgtaatatttttcaagttggtaattataagctaaaatacaattttgaaagcaattcacaacccatcttcttcatctatttggctaaacatgttggtaattataagctaaaatacaattttgaaagcaattcacaacctaggcgggttttaataaaaaaaagatggcgttggtaattataagctaaaatacaattttgaaagcaattcacaacaatttcttgagtttcttttgaaaaaattatgttggtaattataagctaaaatacaattttgaaagcaattcacaaccgaaacccatttggtcttttaattccgccagttggtaattataagctaaaatacaattttgaaagcaattcacaacttgaactatatgatgctggaattgtagagcgttggtaattataagctaaaatacaattttgaaagcaattcacaacttaatttcgttgatgtaatcaaaataatctgttggtaattataagctaaaatacaattttgaaagcaattcacaactagtaatgcactatccttttcgtctgtaaagttggtaattataagctaaaatacaattttgaaagcaattcacaaccacgccatcaaaacaaccttattcagagtaagttggtaattataagctaaaatacaattttgaaagcaattcacaaccattacctgaacaagatatatctttttttggttggtaattataagctaaaacaggcagtataacacaaagtgtgtaagttaaaaagttattctgaaaatttgagctaattcaaaaagctcaaaaattttcggaaataactttttaacattttatatatttacatagttatgatagacaaagacaacttattaaacaacaaggaattctacaaatcctttaaaaatggagaagatttaacttcattttttaaacaaatgcacaaacgagcagtagaacatatgcttgaagcagaacttgatgcacatttagacaatgaaaaacatcaaaaaaccttcaatggtaattaccgtaatggacacggaaccaagaaaataaaaacttcctttggtgaagatgaaa

SEQ ID NO: 1446 - DNA, 8715 bp, synthetic construct
  source 1..8715: mol_type = other DNA
  misc_feature 1..8715: note = Synthetic
gaaaagtctatttcttgttgttgaacatctgtatttgtaatttttgtacaataccacgccgaaagatttgcttttggtgaaatcacatttaaaatcactggctcaatattatttccattaacagtatttgaacccgaatgaacagtactcatagcattccccccactttcagtacacatattgtatgagagtacacgagtattattaggtgcattatatgagtaatgaaattgttgaaactcataaatagttccatcacctaatgtaactgtccatatgctggtcaaatttccatttgaaatagtatttttaaatctaatttctactggtgtctcaaatccatttaatccaaaaaccattgtggaatttgattgatcatagtatttaaaaaccattcttcctgaagcaactcccggaatatttaactgaggtgcaaaccaatacaaatctccttgatcgtttcctgtaaatttattaataggatcatttggaacagcaactccatcataattcattacaaactgattcgttggattagtacaagacttaaattgatccagttcttgggattctgtatatttatgaaaggcttctgtttcaacgctaattgtcggaatttcaagactccaaccttcaccataaggaatacctgtacaaactggtgtggttgttcccacacttgtattacttgaataccccagattcaaaggaaactttagtcccaatggcgtagaaacacttcctaacggaacagacgtagtgtattcaccattcaaaacatttacatctgaaacaatatttccagcagaaatttttgagctttctacttttttaggagagacatcaccgttatctcttccaccaacaatttgagaatgtgacttatttattgcaaataaagttagaaataggagaattatttttttcatgcggtttgttttattgaatactgtgaactatttttgcgcacaaatataactgtaattttaaataaaacgaatcgattaatgataattatttgttaaaataaaaatctatatatctttgcataacaattgttaccaattaaaaacccataaatatcataacatgaagaatctgttttttacctcaatatttctaatttcacttaactgttttagccaaaatcaacagatttcagtttctctttcgattcgtgattcaatttctgcaaatgatttcttttttcatatttctggaaaagggctttttggagattcattaactttaaatgtagaattaattaaccctcttgattcaagtaaaatatatcaaggagtttatgatgtaactaaaacaagcacaaatacaatcccaactttcaaatacgacctacaaactatggattatagttttcaaattgggcattatccacaaggaaattatgtattacatctatggacatcgattggcggggtaaaaagagatgaagtatatcatcaagaataattcataatgtgatgaatagacttacaccggcagaagaacaagtaatgcttcgtttatgggtattagaaagagcatccgttaaacaaattgttaaactatataatgacaatctgcttgatcgtaattcaacctcaacaatcgctagagtcttggaacgaaaaaattttattaaacataggcaaaaagggagcgtatatatctataaatctatgatttctcgtaacgagtatcgtgagtatttgacagaacatttactagcgaattactgcgatcaagacaaaatatctttgattgaagagataaaaagaatctaattgtttagaattttaatatcatcagctttgtgaaacaattttttgtgttaggttatcaaacagtcgatactccttgttatcattttcatctaaattatacaaatacaaggtttgtgtttgaaaaacatagagcatttgaagtaattggaattaaacctaattttgagttaaatggaaagcacagaaacaaaagaagaatacttggaaaaatttatggcgaaaaatctgcacaggtttgaaacacctttgattagtgagtatgatgctgaaacatggaaaagcggacaggtaattacttatgttgaattattgccagtagatcgaacggaacaagtaccacaaaaagtagaacaaacagaatcgataacaggggtgaaatttattttgtataaaacgaataatccaaatttattttggacgaatcctaatgaataagagcactccaagactagtaatatggtgaattaatttacttattatttcactttagaaaataaagaatagctacaaataaaaaatcccccgttgaaggacgagggaacctaatgttttcacaacggaataatccttattgtgattggcttcaaaattgttgaaacaaacgtacggttgtttttttataattcctaattatttttttagtgctgtgagattatttttcactagttttggaaacatataaaaatcaacttactatgaagattgttttaggattggatttggggactaactctattggatgggcattaataaaacaaaattttgaaaacaaagaaggcgaaattttgggtttaggctctcgaataattcctatgagtcaagatataatggggaaatttgatgctgggcaatctatttctcaaactgccgaaagaacaggttatagaggagctcgaagacttcgagagcgatttttactaagaagagaaaggcttcacagagtgcttaatatactaagctttttacctgaacactattccctgaatatagattttacaaaaaaaacaggtcaatttattagtgagacagagcctaaattagtttacaatggttccaatcaatttatttttaaaacatcgtttgaagaaatgttaggcgactttcgtaaagaacaaccaaaattagttaataatgataaaaaagttcctgctgattggacgatttactatctacgcaaaaaagcactaactcaaaaaattgataaagaagaattagcctggttacttttacatttcaatcaaaaaagaggttactaccaattaagaggcgaagaggaagaagaaaatccaaataaattaatcgaatttcattccctaaaagtagtcgaagtaattgctgacgagcaagaaaaaggaaaaccagatctttggtataatattattttagaaaatggctggatttatcgaagagcaagcaaaacaccattattcgattggaaagataaaacaagggatttcattgttacaacagatttaaatgatgatggcagtgttaaaacagacaaagaaggaaatgaaaaaagaagtttccgggctcctgctgaaaccgattggacacttgtaaaaaagaaaactgaatcagaaatagataatactaataaaacagtaggtgaatatatctatgacacattacttcaatctcctaatcaaaaaataaaaggaaaattaattcggacaatcgaacgaaaatactataaacaagaattaaaacgaattttagagaagcaatcagaatttcatccaatcctacaagatgaaaaaatatacctgagttgtattgaagaattatacccacataatgaatcccatagaagtaatatttccaagaaaaattttgtccatttatttttagaggatattttattttaccaaagacctcttaaaagtcaaaaaaacttaattaacggttgtccatttgaaagtactagatacatagaagatggaatacagaaaacaaaagctctaaaatgtattcctaaatcacatccactattccaagagtttagattgtggcaatggctacaaaatcttaaaatttataaccgagacactgatcaaaatctaacgtctgattttttatcggcagaagaaaattatattgctcttttcgattttcttaataaaagaaaggaaatagatcaaaaggccttattaaaacatctaaaactatctgaaaaaacacatcgttggaattttgttgaagataaaaaatatccttgtaatgaaacctattcaatgattcaaagtcgattggaaaaagttaagagtgttcctaatgattttcttacttctgaaacagaatttcaactatggcatattatatactctgtgaatgacaaaattgaatatgataaagcaattcgctcatttgcggtaaaacattcgttagatattgagacttttgtagaaaatttcagaaaaacacccccgttaaaaaatgagtatggttcctattcagccaaagctgtaaaaaagttattacccttgatgcgaatggggaaatgttggagttggaacaatattaatgaacaaacaaagattagaattgaacgacttcaaacgggggaatttgatgagaacataaaaaatagagtccgggaaaaagcaatccatcttaaagagaataatgattttaaaggtttaccaatttggttagtcagcaatattgtatatgatcgtcattctgaaagtagcgataataaaaaatggaaatcagttagtgacctagaagcatatattaaatcttttaaacaacactcattacgaaatccaattgtagagcaagttgttactgaaactttaagagttgtcaatgatatttggaaacattatggaaaaggcgaagaaaatttttttaacgaaattcatattgaacttggtagagaaatgaagaatcctgctgataagcgcaaaaaaatgacttctcaaatttctgagaatgaaaacaccaatttaagaatcaaagcattattagctgaaatgctttacgacacaagtgttgaaaatgtccgtccatattcaccaatgcaacaagaagcattaaaaatctatgaagatggtgttttaaattccaacattgaaattccggaagatattgttaaaatcagtaaatcaccacaaccaagtaaaacagagttattacgctataaattatggctagagcaaaaatatcgctctccttataccggaaatattattccactttccagtttatttactttagaatatgaaattgaacatattataccacaaagtagatattttgataatagttttagtaataaggtgatttgtgaatcggctgtaaataaattaaaagataataaaacaggaaaagagtttatcaaagatcatcacggtcagattgtagaaattagctttggaaaaaccgttaaaattttcgaagaagaagtatatgaagaatttgttaaggatcactattcaaaaaataggacaaaaagaaataagcttctaatggaagagattcccgaaaagatgattgaaagacagctcaatgatacacgatttattagtaaatttgttatgagcactttatctaatattgtgagggaagaaaatagtaatgacgatggagttaattcaaaaaacatcttagcttcaaatggtcaaataacatcgacattgaaacaagactggggtttaaatgacgtttggaatgatttgattttaccaagatttgaacgtttaaacgaactaacaaattctaaaaatttcacaagttataataaacgttatcaaaaaaatctaccttcaattcctttggaattatcgaaaggatttcaaaagaaacgtattgatcatcgtcatcattctgttgatgctttaatcattgcatgtgcaacgagaagccatattaattttctaaacaatcaaaatgccttggaaaagaacaaatccaaggaagaaaaacaacgttcaagaaatgatttaagaacggctttatgtaagaaagaatataacgaaggttctgaaaaaaattaccggtggatatttaaacaaccttggaataattttattattgacagtaaaaataaactagaaacgaccattatcagttttaaacaaaatatacgggtcatcaataaaacaacaaatttgtacgaatcctataaagatgaaaatgggaatcttagattagataaaaatggtaaacctaaaaaagaaaaaataaagcaaataaaaggagaaagttgggctattcgaaaatctatgcatactccaatgccttacggaaaaaaggaatattattttgatgtattaaaaatagctgacaatgttggtaaattggatttaattattgatgagacaattaaattaaaagttcagagtcggctaagacaattaaataataaaattaccgaaacacaaaaataccttaaaaataatcctttaaaagatcaaaatgataaacctgtattgacctctgcttttaatattaaaactgaaaaattcagaagaaaacaaccaatctcaaaattatcaaatcggggacaaggtggagttaaaacgattgaagatgctatgaaatttatcgaaaaaatagctgatttaaaattgcaacaagacttaataatgcatttaaattttaacgaacatgatctcgaaaaagcattctcttcagaaggattagaaagatttaatcaaaatcgaaaagtaccagtttttaacgttcctattgccgaaaatggatctagtagatttcttgttggaaatagaatcggaacaaaacataaatgggttgaagcggctgaaggaaccaatctttttttcgcaatatatgttgatgaaaataataaacgaagctatacatctattccattcaatattgtaattgaaagacaaaagcaaggtctagtttctgctcctgagatcgattctaaaggaaacaaactattattttatatttctccaaatgacttagtctatgtacctaatctggaagaaatcgaaaatcccaatttagtagactttaagtatttgtcaaaagaacaagtacaaagaatttacaagtttgtaagctgtactggaggagaaggtcattttgtttcacataattattcgaaagaaattgtttcaaatgaaaatggatctaataataaaaatgaaagaatgttggaatatgtaaaattgaatactatttatgatgataaattaaaacctatgatgattaaatcaatttgttggaaacttagtgtgaatagacttggacaaataactaaaataatccgatagtaactttttaaaatacaactcgttaaaggtatttataactaacaactataaatacttaaactatgattaaacgtaccctacacttcagtaatcctgcacatctttctacacgtaatcagcagttagttgtagaactcaaggatgaaaacagaactattaaaaccattcctatagaagatttaggagttgtaattttagaacatccacaaataacacttacttctaatttattagagcaaatgctcgaaaataaggtagctgttataacctgtaacagcaaatatatgcctagtggtatgtttttaccttttgaatcgaatacagagcaaaccgaacggattcgtgtacaattggatgcaagcgttcctctaaaaaagcaattatggcaacaaaccatcaaacaaaaaattggaaaccaatctaatctgctcgaaaaattaggtgtaaatagtttgcgtttaaaaaatctcaagaatgacgttttaagcggtgatacaacaaattgtgaaggacaagctgcttcacattattggggacaaatttatggtggttacttcttacgttcacgtgatccacaaagtccaaatgctcaattgaattatggttatgctattttaagatcagttgttgcacgagcattaacagctagtgggatgttaccatcctctggtatttttcaccgtaataagtataatgctttttgtttggctgatgatattatggagccgtatagaccatttgtggattgggttgttcttcagcttccagagttaggaacagaagagggattaactaaaatacaaaaaatcgaacttcttaaacttccacaattagatgtagaaataaatggtgttaaacgccctttgtttcatgctgtgagtacaacaacggctagtttatataaatgttttgcaggagagcaacggaaaattatatatcccgatttctactaaataaatcatatcatggaaaattcacgttttaactcgtacagaaatatgtgggtaatggttttgtttgatttgccgactgaaacaaaaaaagaacggagtacagcttctaagtttagaaaaacattgttagaagacggatttagtatgtttcaattttcgatatatatgcgtttttgtcaaagtatggaaaatgccgaagttcacactaagcgtgtgaaaggaattttaccggaaaaagggaaagtgggtatttttgcaattactgacaaacaatttggaagaatggagattttccatggtacatccaaaactcaaacagatagtccatctcaacaattggaattattttaatgcggtaagttagttgaattaaaagaagttgatttcatttttttaatcctacgaatcgctgaaacccttagtatttctacggaattaggtcacgactgtgtgacctatccgtaaaaataacaattttgaaagccaatcacaacgccgcgtctcctctaattttacagggtcaatgtgtgacctatccgtaaaaataacaattttgaaagccaatcacaacagcaatgggattgtttcttaattcaaatactgtgtgacctatccgtaaaaataacaattttgaaagccaatcacaacgcgaaagaaaaagaggtaaatcaaaatagctgtgtgacctatccgtaaaaataacaattttgaaagccaatcacaact

SEQ ID NO: 1447 - DNA, 8659 bp, synthetic construct
  source 1..8659: mol_type = other DNA
  misc_feature 1..8659: note = Synthetic
aatagaacatacaagacatcgttcctttgaaaattttacaactaacttattatcaagacttatagcttattctttctttgacaaaaagccttctattaatttgcaagaagacattgttgatctaaaaagactcgttgctgcttaaatcgaactcacgttaaattagcattggtcttttttataaattcaatattttttgtaaatacggtctgaggataagattgtaatatcctatctaaaatatcttctacttgtgtgtccattcttttatcatttaatttcttattagtaagcttacctttttattttcaaaatagggttttaagtatgcaaaagtatgattacacattgcacacaccacacttacccccactaattatgcgaataactcagaaaaatctaactgagaggcatcatccgtgttagggagggttgctactttttccaattgcaaaagaaaagcatagccctctcggaatttttcttccttttctacttcttttttcctcagacctattatatttactttgtattttccattagcaataggatacttagcagccttataagctatctgtttttctgcctcgtaggtgagataataataggtttctatggctgtagatccctccaagtccttgtaattccacgcttctaattgctcaaagctgactacccaaagcgccccatcctttatttccaaacaaaatgtctctttagtaggaataaagtcccattcctcaagagtttgcctattatcacctattgtaaagaaaacttggtaatagtacgaatgaatatgagagataggaataaaagccccttttgctgcaaattcataaaagagaggagggttcttatcgaaataagagagcattttcctagaacgaatcttatgctccttgcattgttcgtggaatagttgcgccgagataatagctataccatatccgctggagcttatgggcttatctgtctgtatcattggctttattattcttatattaaaaagttaagagccgtttattgctgtattatatgatttttctctatcaagtcctctttttttatctatatgccaaaaaaggaaaaacccttctttactaactttacccctctatcggtgtgatagtaacttcataaagctgctcaaaaagctgttctacatagctggcttcagccttgcgtacctctacaaggagcgtgcagttctgttctaaggtttgggaaacaatagtgaggttcctatccttaatgattttcatcaccttattcatatccttataatcaaagacaatctggtaagtaaggtcaatggtacgttcctctatttcagcctcttgaagggtgagctgagcggtagttttgtaggcggtaataagtccgctcacacccaacttgatcccaccaaaatagcgcactacaatcagtagaacattggtcagctcaaaggattgtatctgcctatagataggcagccctgctgtgccactaggctcgccatcgtcatttgctctataggtaaagtgctctttgcccaactgataggcatagcaccaatgccgcgcagaaaagtgttctttcttgatgacctccaagtgcatttttacttcctcttcggtagtaatagggtacaaataacctataaacttactgctcttatccttatagataatatcggtaacgggttgtgtgatggttttataggtatctgtcatagggagtaaagaatgaaaagtgagaataaagtgcaaagatacaaaaaaagccccgaagatagtcgaggcgctaaatgttttcacaacggaataatccttattgtgagttgctttcaaatatgggacaaagatacaacattttttctaaacgacaaagattaattcagaaatttttcttaaatttgtagttgattaaaaacaatataaaattataaatatatgaaacgaatattaggcttagacttaggctctaactccattggttgggggcttattgaacaagattttggacaaagagaagggaaaatcattgctgctggaagtagaattatcccaatggatcaaggacttttaggagattttgaaaaaggtaacaccgtttcccaaacagcagaacggactttttatcgcagtgttcgcaagctccgacagcgacatttgcttcgtcgtgaacggctccacagagtgctccatatcttaggtttcctgcctactcactatgataagcagattgatttttctaaaagatatggcaaattcataggaaatgtagaacctaaattggcttataaggaaggaaaattcctctttatggatagttttcaggagatgttgagtgattttaaatcacatcagcctgacttattctataccaaaaagaatggagaagaaagcaaaattccctatgactggacaatttattaccttaggaaaaaagccctttcacagaaaatcagcaaagaagagttggcttggattattctgaacttcaatcaaaaaagaggttattaccaattacgtggggaggaagaagcggaaaatcctaataaagaagtaacttattactccctaatggttaccgaggttaccgctgaagcacccaataaaaagggagaaatctggtattctatacaattagaaaatggttgggtataccgccgtacaagcaaaattcctttagataattggagaggtaaaagtcgtgattttattgttactacagaactcaaagaagatggaagtgtaaaacgagacaaggagggcaaggaaaaacgttcattccgagctcctgacgaaaacgactggaatctacttaagaagaagacagaacaggatataaatacctcacaaaaaacagtaggtacttatatctatgatcatctcctgcaaaaccctaatgaaaaaatcaaaggaaaattagttcgtaccattgagcgaaaatactacaaagaagaactaaaggctattttagaaaaacagatagctctacagcctgaactatttacagatcaattgtttgccgattgtattcgagaactctatagcaagaatgaagcacaacaacgaaaccttgctgcaagagattttgtacatctgttagcagaagatattattttctatcagcgtcctttgcgcagtcagaaatcaactattgctaattgtagtttggagtctcgctcctatattgacaagaatagccatacccgtaaagaagcctccttgaaggtatgtcccaaatctaacccttattatcaagagtttagagtactccaatggttacaaaacctcaaaatatacgaaatagagagcgatcgagaggtaacccatgaatttataaagaccttagaagacaaacagcaactctttgattttctaatggctcaaaaagagattgattgtgaggaattattgaaatatttcctgagtctaacttatccaaatgccaaggaaaaagcactaaagagtgagctaaagaaatggaaagatacttatcgctggaactatgtatatgatataggagaaaaatcgtctaagaaatatcctatgaatgagacaagatatgatcttaagcgacatttagaaaaagtagccaacttgcctgatgattttctttcctcagaggtagaatacatgctatggcatctgatctattcggttaccgataaggtagcatatgagaaaggtctaaagaaatttgctcaaaaacatcacttagatgaagattcttttgtggagagtttcaagaaattcaaaccctaccccagtgaatatggtagtttttccgaaaaagctatccgaaaactacttcctctgatgcgttttggctcttattgggattttaatcatatagataagaatactcaaaaacgtatagaagaccttataacgggggtagaaaatgaggaaatacgtactatcctcagagaaaaagctgaaaagtaccaacttgaaaaggaaacagatttccaaaacttacctctttggctggctcaatatatagcctataaccgacatgctgaggcttcctctcttgagaaatggacttctatgaatgacttggagacctacctcaatgagttcaagcaacattcacttagaaaccctatagtagaacaagtagttaccgaaaccctacgtgtagtgagagatatttggcaacaatatggacaaggaaaagccgatttctttgatgagattcatatagaactcggtagagaacttaagaaaaccgctaaagaaagagaagaactatccaaacaaaaccaaaagaatgaggacaccaacctacgtatcaaggcattacttgcggagttaggtgaagatagtactatagagaatgtacgtccctactcacttatgcaacaggaattactcaaactatatgaggaaggcgtatttagttcctctatggaaatcgaagatgatatagagaaaatacacaagaaagctactcccagcaaagcagaattacaacgctataagctttggttagaacaaaaatacaagtccccttatacaggacaaatcatctctctgaaaagactctttaccgaagattatgaaatagagcatattatcccacaaagccggtattatgatgatagtctttccaataaagtaatctgtgaatcagccataaataagctcaaaggtaatcagttaggattggaatttatcaaaaatcactatggcgagaaagtacatgctgccggtaaggaagtaagtatatttaccgaagaacaatataaggaatttgtcaagaaccactatactaataactcaggaaaaatgaaaaaacttctcttagaggatattcctgaaaagatggtggctcgccagatgaacgatacgcgctatatcagtaagtatatttcggaaattctctctaagatagtacgtgctaacgagcgagatgaaggcgttaattctaagaatgttatcttatgtacaggtaagattaccactgcacttaagcaagattggggcataaatgatgtatggaatgaccttattttacctcgctttgaacgtatgaatgaccttacccagacctcactatttacctcctataatgaaaagtatcaaaaataccttcctactgtacctatggaatatagcaatggtttccaaaagaagcgtatagaccaccgtcatcacgccatggatgctatcatcatagcttgtgctacccgagagcatattaactatatcaataaccaacatgctttagaaaaaggaaaaaacaaagaagaaaaacaaaagtctcgtatagacctaagaactatcctttgtgagaaaaaatacaatgataatgccgaagaaaactacaattggatattcaaaaaaccttgggatacttttactcaagaggtacgagctgccttagaaggcattgtggtaagtttcaagcaaaacttgcgagtaatcaacaaagccaccaactattatgaacgttgggtagaggaaaatggtaagctcattaagaaaatggtcaagcaggaaggcactaattgggctatccgaaaacctttgcataaggaaacagtttctggaaagattaccttggaaagagaaaaagtaagtaaaggaaaaatcctcactgccactcgtaaggctatagatagtacctttacagaaaaggtaattcaaggtatcaccgatacgggtattcaaaagatattgctcaactatctcaagtttaaaaaaagccctgaaatagccttctcgccagaaggattagaagagctcaataaaaatatctctctctataacgatggtaagcctcacaagcctatccgtaaggtacgcatttttgaacaaggtagcaaattcccattaggagaagtaggaaataaagccaccaaatatgtagaagcggctaagggtaccaacctatattttggcgtatatcaaggaaaagacaagcgttctttcgcaaccattccgcttaacgaagtgattgaacgacaaaaacaaggactctcctctgttcccgaatataatgaaaaaggagatcccttactctttagcctatctcctaatgacttagtatatatacctatagaaggagaaatcatagaagatattgatttccaaaacctttctaacgaacaaaaagaaagaatatataaggcggcaagttttacaagaaatgaatgcttttttataaaatcaagtatagctttccttatcaagaactatgatgccaaaacaaaaattggagaattaggtagccagaataaattggaagtaactatttgcaaaggaataagaatcaaagaagtctgtatcaagctaaaagtagaccgtttggggaatattagtaaagcataaaaagtttaataacaataagctatgttatatcgttcgtttttattcctaaagtagaataaaagagaaggttttttctttttgaacttttgcgataaccaacagacaatcaattccttttaaaaattgaggttgtttgaggtcacaaagttacgaatttgaaagcaattcacaaccccacttcggaagctttgaggtctattctcgttgtttgagatcacaaaattacgaatttgaaagcaattcacaacccgaaatagcagctacctatcgccccagtagttgtttggagatcacaaaattacgaatttgaaagcaattcacaacgggtctccgtgattaggtcgctggtagcaacgttgtttgagatcacaaaattacgaatttgaaagcaattcacaacctgagcacactcagacttcaagactattccgttgtttgagatcacaaaattacgaatttgaaagcaattcacaactgcagggtctattacatatttaaagaaatgttgtttgaggtcacaaagttacgaatttgaaagcaactcacaacggttcttgtcatcttccccgccgaggatacgttgtttgaggtcacaaagttacgaatttgaaagcaactcataactaaacttgggtcttctacttcatcgcaaagttgtttgaggtcacaaagttacgaatttgaaagcaactcacaacaatatttacaagctcttaaaaagcgtaaagttgtttgaggtcacaaagttacgaatttgaaagcaactcacaacggttagttgtcgcgcgctcatttcgagagagttgtttgaggtcacaaagttacgaatttgaaagcaactcacaactatgtagagcctactgctaatcccgtaacgttgtttgaggtcacaaagttacgaatttgaaagcaactcacaactcggctgagagctcaacaaaagcccagacttgttgtttgaggtcacaaagttacgaatttgaaagcaactcacaacgcagccaaaccagctttatatctaagaagcgttgtttgaggtcacaaagttacgaatttgaaagcaattcacaacgaaaatcccaattctaaaaactttctaatgttgtttgagatcacaaaattacgattttgaaagcaattcacaacaataatgagcttctaaatttaaatcttttgttgtttgagatcacaaaattacgaatttgaaagcaattcacaactatgctcctcgaaggcttttataattttggttgtttgagatcacaaagttacgaatttgaaagcaattcacaacaatacgcacctataaaacaaaaaggttcagttgtttgaggtcacaaagttacgaatttgaaagcaattcacaactataggggtcacaaaaataggtgtaatcgggttgtttgagatcacaaaattacgaatttgaaagcaattcacaacaaaagctctaagtgatacggagatagatgagttgtttgagatcacaaagttacgaatttgaaagcaactcacaacatgttgtagtctgctttgattaacaagaatgttgtttgagatcacaaaattacgaatttgaaagcaattcacaactgtgttactgtcgatgagcaacactacagagttgtttgagatcacaaaattacgaatttgaaagcaactcacaacgatataaatgatttaaagattatctttaatgttgtttgagatcacaaagttacgaatttgaaagcaattcacaacgcggttgcatttcacttgaataaccgagctgttgtttaagatcacaaaattacgaatttgaaagcaattcacaactattatatatgatggaagtaaataggaagagttgtttgagatcacaaaattacgaatttgaaagcaattcacaacagggtgttgaatgaaataccacgcttgagggttgtttgagatcacaaaattacgaatttgaaagcaactcacaacaagtattagactggctgaagtataattacagttgtttgagatcacaaagttacgaatttgaaagcaattcacaacttacagaattagctacagctatatccatacgttgtttgagatcacaaaattacgaatttgaaagcaactcacaacgttgcttttgctttactgaccatttttgagttgtttgagatcaaaaagttacgaatttgaaagcaattcacaagtaggaataataactaaagtgcaaagatacaaaaaaagccccgaagatagtcagggctctaaatgttttctaaaaggatataattaacgtgagttcgacataagaaagttacttttttcttgcaagaaagggatat

SEQ ID NO: 1448 - DNA, 8551 bp, synthetic construct
  misc_feature 1..8551: note = Synthetic
  source 1..8551: mol_type = other DNA
gaacatgcagtaataccaagtgtgaagcggcaatttgctgtgcatcatgatggtgccactccggatggtcgtttttgcacggcaatccatgcattcccaccgattaatcgtgctcagccaactcaatcgcttcgacgcgcactttcggcacacaagcccgttcttctctcgcatttttttcatgtggtgaacgcatgccaactcatctggaaactgtttaaagaagtcttttgctgtcataatcatcatattttcagcaaacctcaggccccgctccgtaatctatttatgttctacattcagacggacatacattgtttccaaacaatacattcgaagtatattaaagtgctttaaccccttgtgctcatgaagattttttcatctatacttctgttccttcatctttttgctatcgattatgactacctcgaaccatggacggcagagcagctacagtcggccaacacggccggaagtgtagattatatgaacaatgctgagaagacggtcgtcctttatatgaatctggctcgattatatcccgatgattttaacaactacgttctggagccttatgctgcaacgaaaagacttttggatctcaaggccaccaagtctttgcagaaagatttggcatcagttaaaaacatagaggcattgcaaccctctgaaatcctcagtcaatttgcctctgcccatgctacggatatgggtaaaaaaggcagaatgggacataatggttcaggtggggccacgttaaagaaaagattgagtcctctggagatggaatttcccaagatggttgcagaaaactgtgactatggaaaccacgagcctttagatattgttatgaacttactcattgacgatggcgtaaaaggatacgggcaccgaaataacatcctcgatcgcgacttaacccatgtaggtgtgagtatcaagccccataaaaactttgaggtcaattgtgttatggattttggggggtagtagcattcaaggcggtcagcttatccaatgactctttgctttccaatatcaaatcatcaataattctaccgactggttttatttcatccaccaattctgatgattttccggctacccacagcgttttatagtttcccggtttgatggagtcttccaactttttcattccggaatactgcacccacattttgaaatacttgcgtaccgttctgttcttggtgagttgcttttccatgtagttctgcttgtagccaatttttttggcgtagtcggtattaattacagttgcgggtgttcctgaaatttttgaagacatcacaatatcgtccatcccggcacggacgatggcggacttatacgcctcatttaccggacactcgttagaagcgataaatcgcgttccgatgtaggcggcatcagcgcccaaagcaagagcagatacaatgcctgcacctgtggcaatccctccggatgcaataacaggtttatcgctatatctttttttcaaagccggcaccaatacgtttaaaggagtatttccagaatgccctccagctccctgacccacagcaataaacccatcgcaacccaggtcgtagactttctgagcgtattttatattggtaacgtcacaatacaccttagctccatatttatgggccttttcgatcaccttctttggggaacccaatgaagtaatgtaaatgggtactttcttttctacacagatgtccaaatgtttgtcgaacatcgggttactccgctgagcgatgaggttaactgcataggtgcccggatgtcgtgatacctgttcgttcaattcatcaagcacggcttcaagctctcctttttctctaaaattcaagctcgggaaagaccccacaatgccttttttaatgccggcaatcaccatttcctggttggaaaccagaaacatgggagccataaaaagtggaaacgacaggccgagttcttttgcgaaaggggtgttcatactacagttttaagcgtgctaaagtaagcggacggagccaatgtaaataggttacatcccgttttcgaaaatttgtcagatgtttataattttaaccctttctcatgaccacaaccggacaccgaaacgacatcacaaagcagcataaaaaaagcctcctgattatggacaagaggcgacccaaatgttttcacaacggaataatccttattgtgaatggttttcaaactgattcaaaagtacaaattaaatagaaaatgaaacgaatacttggactggatttaggaactaactcgattggatgggcattaataaaccttgacttcaatcaaaaacatggagaaataattggactcggaagtcgcataattcccatggatcaaggtgtgcttggaaattttgacgccggtcaatctcattcacaaactgcggatagaacaaagtttagaggagttaggcgtttatatcaacgaaataccttgagaagagaaagaatacaccgagtactaaacataatgggttttcttccggaacattataagaatgatattgactttgagcaacatcccggtcagttcaaacccggaaaagaaacaaaactaaactacaagaggaatgaaaaggatcgttatgaatttctatttatggaatcttataaagagatgctttctgaatttagattaaatggcgtaaatgaaaatattccttttgactggaccatttactttttaagaaaaaaagccctttatgagaaaatatcaaaaaatgaactcgcttggataatattaaacttcaatcaaaaaaggggctattatcaactgagaggtgaggaagaagtagaaaaccataatgatggaaagaaaaaaacctttgagatacttcaagtcaaagaaatcattgaaaccggtgacattataacaagtaccggggctaaactttacaaagtaatcttcgagaatgactgggaatatgacaaatcaattgttaaggtcactgaatggcagggaaaggttaaggagtttatagtaacaacttcatccttaaaaaacggagaaataaaaagaacttataaagaagtcgattccgaagatgactggacagctattaaagcaaaaacagaaaaagatattgagcaatcgggaaaacatattggacagtacatctatgaagcactgctaaaaaacagaaatcaaaaaataagaggaaagctcataaagactattgaacgaaagtactataaagctgaattagaggcaattcttgaaaaacaaaccgagtttcacccggagctgagagataaagaattgtacaaaagatgtatcaatgagctatatcctgagaatataggacaccaaaaaaatgttcaagacaaggatgaatttttcaaatatctttttatagaagatattattttttaccagcgaccactgaaaagtaaaaaatctaccataggaaattgtcaatatgaaacaaggtattatatagacaaggatacgaaagagaaaaaggaggctccgttgaaaggcatcccaaaatcacaccctttgtttcaggagttcaggctctggcaattcttgagcaatcttaaaatctatgaaaaagaggggtttgaacagggcaaaactgttttaaataaggatataacgacaaaactattacctgatgaaaatgcttgggttgcgctgttcgattttttaaacgagctaaaggaagttgagcaacatcaggttttaaaatatttcagcgataaaaaactgattcccaggcaaacaaaggaacaccctgagctcaggtggaattatccagaagataaaaaataccccatgaatgaaactaaagcactgttcttgggacgactaaaaaatgtcaaaggaatccgcccaaatgatttcttgacccccgatattgagactcatttatggcatataatctattcggttaaagataaaaatgaatacatgaaagcccttggaaaatttgcggatagatatggcattaacaaggaatcatttgtcgaggcatttatcaaaatacctccatttagcaatgaatatggtgcctattccaacaaagcattgagaaaactgctacccttaatgcgaatgggaaagtactgggatgaacataagattaaaagcacaactcttgaaagaattcacaaagtcctttcaggagaatacgacccgacaattcgggatcgcgtaagggagaattttttccactttaagagcatagattcttttagaggtttgccgacatggctcgcaagctacattgtatacgatcggcattctgaagtgaaaacgatatcaaggtggaaaaaacctagcgatttagatgagtatctaatgcaattcaagcaacatagtttgaaaaatcccattgtagaacagatcgttatggaaacactccgtgtagttcgtgacatatgggttcatttcggtaacggggctgaggggtactttgacgaaatacatcttgaattaggtcgatcaatgaagaaccctaaacaaattagagagaggatttcaaaaaagaacgcggaaaatgaaactacgaatcaaagaatcaaatctattctcgaagaactcatccatgatggaatagaaaatgttaagtcgtattcaccgagtcatcaggagatcctcaaaatctatgaagagggagtatattcaaattcaccggaagaatacagtaaaataaaacttgaagaaatagacaagatcagaaagacggtttctccctcaaaaagagaaatccaacgctataaactttggctggaacagggttatgtttccccttatacaggagaacctattgcactcagtgacttatttagtaagaactatcaaatagagcatattattcctcaatcgaggtattttgatgattcactaaacaataaagtgatttgcgaaagcatcattaatcctaatccttacaaagacaatcaaaccggatatgaattcatcaaaaatatgggtggaagtctggttcctgaactttcaactaagcaaaaaactgtgaagctcttcacactcgatgagtatgaacagcactgcaagaggtattttagaaagaatagaaagaaattgacctatttgcttagtgaagaagtgccggaaggatttattgaacgtcaattgaacgacagcagatacatcagtaagttcgttaagagtctactaggcaacctgattcggcaagaagatgaacaggaggctgctccaaaaaacctgataactgtttctggagccattacctctacactcaaaaacgattgggggttaaacgacaaatggaatgagctggtagctccaagatttcaacgattaaacgaattgaccgagactacagattacggatattgggataaaaaaataaattcttttcgatgtcaggtccctgagtcaattgaaagagggttcaataaaaaacggatcgaccatcggcatcatgcactggatgcattagtgatcgcttgttgtacaaaagaccacatcaactacataacctcccttaataccgaaaggaataattattcgctggtttcaaagttgcgagaatcagaagaaatatatgtcaatggtaaaaaaaggaaggtggcacaagcctttaaaaaaccctggaaggattttccaatagaggctaaaggagctttagataaaaccgttgtaagctttaaacagaatttgagagttattaataaaacaaataacaaaacatggaaatgggtagaagaacatggtgtcaaaaaaaagaagcttgtctcccagacaaaaggggacaactgggccatacgtaagccgttacataaggatacggtttcaggaaagatagacatggatgtgcccaagggtaaagtagctacagcaacgcgatcggcattaaccaccatcacaaatcaaaagcacatcgataaaattgtcgataaacaaatcagagaggtgattctacccaatcatcttaaaaattataaagatgaaaaaggactacccgattttgaagctgcgtttagcccaaatggtatcgaagaattgaacaaaaacatgaccgctttgaataacggaaaacctcactcgccaatctttaaggtacccatgtatgaaatcggaagcaagtttcctgtctccgaaaatgaaaaaagtccaaagaacaataaatacgttgaagccgcaaaaggaaccaacttgttctttgcagtgtactggaatgataaaaagaaaaagagagagtacgaaaccattccgctcaatgtagtcattgaacaccaaaaacaagtggcacaccttcccaaaaacgaacggactcaggtgccacccaacccggaaaaaggaaagctactttttaccctctcacccaacgatttggtctatgttccaaccgatgaagaaattgaaaacccagggatcgttgatactaataaactaactcctctgcagataatgagggtatataaaacaatgagcagtagcggtagacagtgtttctttgttcgaaatgatattgcgatctcaattcaaaacaaacttgagttttctgtcttgaataaaatggagaaggatatttatgggataatgatcaaagatcgctgttggaaactgaaggtagatcgcctaggccgtataatccttattcagcgataacaatccataaagttttctatctcgttccactgaagatcaaacgcgcctcactctctatccatccggtatgcctccgcgctaaaagcgaactgttgtgggttggttgatccggcaacggcatcgctataaggccactgacctttcgataaagcttgaagaggcccgattgaactgagttaagccgtcgccgtccttgtgatcagttggacagtacggtccgaaattgaaagtggaccatcggctaccgcgcagattttttattctgcacggttttcattttacactatgtaaattgcactttgtaaacgaccatttgtggcctaacttagggtaagatgctgcaaaacaagcctttcaaacttacgggatatcacctttcttttcgcggtggcgggccttaccattctaatcctaaaacctgaaaaaactacacgatgatcaaacgcaccttacttttcagcaacccagcctacctcagcaccaaaaatgaacagcttgtcgtacgatatccggatgaggatattccagagcggcaggtacccattgaagacatcggatacctcgtgctcgaagacccccaaattacgatcagcaaccgcctgatggaaaagctcctgatgaacggggcggcggtcgtccattgcgatcagcggcacatgcccattggattgatgatgcccctggtagggcattcggagcagggcgaacgctttaggcatcagatcagtgcgagcgtaccgcttaaaaaaaacctttggcagcaaacggtaaaggccaaaatccaaaaccaggcctcggtgctgcgcagccggaatatcgctgccgataacatggcgcattgggctaaggaggtcggcagcggcgacagcgggtaccatgaatcgagagctgccgcctactactggtcaaaagtcaccggaattcaagactttacacgaaatgcaaaaggggatcctcccaatgccttactcaattacggctatgccatacttcgtgcggtggcagctcgcgcactcgtgagctcgggaatgttgcccacactgggtatttttcattccaataaatacaatgcctatgcactggccgacgacgtgatggaaccgtaccgcccaatggtagatttattggtgctggagctggtcgactcggatgctgatttggaggatttaacccccgctgtaaagcagcacttgcttcaactgccggccattgacgttcgattgggcggaaaaaaaggtccgctgatgaacgccatgagccgaactacccactccctttttgagtgttttgccgggctgagccggaagctgctctaccctgaagtagacctatgagcccctcattgtcgtccttaaatgcctaccgcagtatgtggattctcgtattgtttgacctccctaccgaaaccaaaaaagaacgaaaagctgccgcccgttttcgcaaaaatctacaggacgatgggtttcagatgtttcagttttcaatttatctgcgtttttgtccgagccgcgaaaacgccgaagtccatattcgaagagtaaaaaacatgttgccgaaggaaggacatgtgggcatactgcgcatcacggacaagcaattcggcatgatggaaatttttataggtacgaagcaaacagaaacggaaaagcccccgcaacaattggagctgttctaaaaatgtgcttgttttttttctttggaaaagagatgtaattcgcaacatatcagcctgttaggggcgggtatgttgcgaatcatctctaaagataaaagtttgaaagccattcacaacgtggaaaaggaagaagaaacgccggaccaagttgcgaatcatctctaaagataaaagtttgaaagccattcacaactttaggtagtgttggcaaacgttttaacagttgcgaatcatctctaaaga

SEQ ID NO: 1449 - DNA, 8274 bp, synthetic construct
  source 1..8274: mol_type = other DNA
  misc_feature 1..8274: note = Synthetic
gaatttggtccagtacaaatctcttcagttggccatttgttgcatcaaaaataaatttctaatgacaaatctgggctaatgaattgaataagtgcagaggaaaggaaaaaatatttactgattaaccggactttaaatatcaattacaaaagtcagtcttaaaaattcctaaaaaaaattacttagataaatttatgccataattgttgtctctatattcattacttattaagtttgtaacggaagtatgaatatcaaggcaacatataaagatatcattcccttctgttctcaattcttttttcctactggggatgctgatatggtgggtaagattatgcattctgtaaacaaacactgtttagtttaaaacaacaatcccgactaaaggtcgggactattgtaaatgttttcacaacggaataatccttattgtgatttgcttcaattagctgaacgaaacttaataatttttttaataattcgaaagaactatcatgaaaaacatactaggacttgacctcggcacaaactctattggttgggctttaattgataaagaaaataataaaattattgatatgggaagtagaattattccaatgagtcaagatattttgggagagtttggtaaaggaaattcaatatcgcaaactgcggaaagaacaaactatagaagtatacgaagattgcgtgaacgctatttacttagaagagagcgtttgcacagagtattaaatatattagaatttttaccaaaacattattctgatcagattgattttgaaacaaggctcggtaagtttaaagaagatactgaacccaagatagcttataaatcaactatagatgaaacaaatagtaaaagtcgttttgattttattttcaagaaatcttttgcagagatgttagaggattttcatcaatatcaacctgagctttttgcaaatgataataaaatcccttatgactggactatatattttctgcgtaaaaaagcattaactaaaaagattgaaaaggaagagttagcttggattttactaaactttaatcagaaacgaggatattatcaactacgtgaagagttggaagaagatacaaataaaaaagagtatgtagtttcattaaaagtaataaaaattgtcaagggagaagaagataaaaaaaataaaaatagaaattggtatagtattagtttagaaaatggatgggtttataatgcaactttctccaccgaaccacaatggttgatgacagaaaaggaatttttagtaacagaagaattggatgaaaatgggcaagtaaaaatagttaaggataaaaaatcagataaagagggaaaagaaaaaagacgaattatacctttgccttcttttgatgaaattaatttgatgagtaaaagtgagccagatagaatttataaaaagattaaagcaaaaacggaaacagctattagtaatagtggcaaaactgttggagaatatatttatgaaaacctgcttcaaaacccttctcaaaaaattcgtggtaagctaatacgcacgatagaacgtaaattttataaagaagaattaaaacaaatcctccaaaaacaaaaagaatttcaccccgagcttcaaaatgatgatttatataacgattgcgtaagagagttatacaaaaacaatgagggacatcaattcttattgagtaaaagagattttattcatcttctcttagatgatattatcttttatcaaagaccattgaaaagtcaaaaatctttaattagtaattgcacttttgagttcaagaaatataatgttggtaacgaagaaaaaataaaatacttaaaagcaattcctaaatctcatccattatatcaagagtttagattttggcaatggatttacaatttgcgtgtttatagaaaagatgacgatcaagatgttaccaatgactacttaaatgatccagaaaaatatgcagatttattcgagtttttaagtaaccggaaagagattgatcagaaagctttattaaaatactttaaattaaaagaatcaacgcatcgctggaattttgtggaagataaaaagtatccttgttttgaaacgaggacccttatctctacaaggttggaaaaggtaaaagatttaccacctaattttttaacagatcaaactgaacttcaattatggcatatcatttattctgtaacagataagatcgagttcgaaaaagccttaagcacttttgccaaaagaaataaacttgatgtaaccacttttgtagaaaacttcaaaaagtttccaccattcaaaagtgaatatgggagttattcaggaaaagctcttaaaaaattgttgcctcttatgagaagcggtagatattggaaatgggatgatattgatgaaaaaactaaaacaagaatagacaaaataattactggtgaatttgatgaagatattaaaaataaagtaagagaaaaatcaattaacttaaccactgaaaatcattttcagggactccaggtttggcttgcaagttatattgtttatgatcgccacgcagaagcagctacaataaataagtgggatactatagaacatttagaaaattacatcaaggagtttaaacaacattctttacgcaaccctattgttgaacaagttactcttgaggctttgcgtgttataaaagatatttggaaacaatttggtaagagtgctgagaatttcttcgatgaaattcatattgaattaggcagagagatgaagaatactgccgatgaaagaaaaagattaacaagtcaaataaatgataatgaaaacactaatgtacgtattaaagcactacttgctgaattaaaaaacgattccaacattgaaaatgttcgccccttttcgccaattcaacaggaactactaaaaatttatgaagatggggtattaaattctgaaattgaaataccagatgatatttctaaaataagtaaaacagcacaaccatcaagctcagagttacagcggtataaattatggttagaacaaaagtatagatcgccttatactggacaagtaattcctctggcaaaattatttactactgattatgagattgagcatataatacctcaaagccgttattttgatgatagctttaataataaagttatttgtgaagctgcagtaaataaattaaaagataatcaaacaggtttagaatttataaaaaaccatcatggagaaattgttcaaactgtatttgataacaaagtaaagatttttgaagaaaatgactatcgagattttgttaaaacacattatataaagaaccgatctaaacgaaataaattgttgatggaagaaattcctgataaaatgattgaacgacaaattaatgatacaagatatatcactaaatttattagtgctttgctttctaatatcgttagagcagaaaataatgatgaaggattaaactcaaaaaatttgattcaggtaaatggtaagattacttctttacttagacaagattggggaataaatgatatctggaatgatttaatcttacctcgctttttgagaatgaatcaaattactaatagtgatgcatttacgcgatataacgataaatatcaaaaatatttaccaacggttcctcttgagctttcaaaaaattaccaatcaaaacgaattgatcataggcaccacgcactcgatgctttgatcattgcttgtgcaacaagagatcatgtcaatttgctaaataataaatatgcaaaatcaaaagaaagatatgatcttaatagaaaactaagactgtttgaaaaggtcgtttatactcatcctaaaactggagaaaaaatagaaagagaaatacctaagaattttataaaaccctgggatacttttaccgtagacacgaaaaattttctcgataccattgttgttagctttaaacaaaatcttcgtattataaataaagccacaaatcaatatcaaaaatgggttaagcttaatggtagaaatgttaaaaaggaagtaaaacaatctggcattaactgggctattcgtaaaccattgcataaagaaactgttgcaggtaaagtcgaattaaaaagaataaaggtaccaaagggaaaaatattaaccgcaactcgtaaaaatcttgacacatcttttgatataaaaactattgaatcaataacagatacaggtattcagaaaattcttaaaaattatttgtctgctaaaggaaacgatccaacaatagctttttcaccagaaggtattgaagaaatgaataaaaacatcactcgatacaacaatggaaaaccgcatagaccaatttataaagcaagaatatttgagttaggtagtaaatttatattagggttaacaggtaataaaaaagcaaaatatgttgaggctgctaaaggaacaaacttattctatgcaatatatgttgatgaaaataataaaagaagttttgaaacaattcctttaaacatagttattgaaaggcaaaagcaaggattaagttctgttcccgaaaatgacgataaagggaataaattattgttctatctttcgccaaatgatcttgtttatgtacctgatgaggatgaaattataaatgagtcttacttggatgtatctaacttatctaatgaacaaaagaaaagactttacaatgttaatgatttctcttcgacttgctattttacacctaatcgaatagccaaagcaatagctcctaaagaagttgatttgaattatgataacaataagaaaaaactctttggttcttatgatacaaaaacagcaagtgttaatgggattcaaataaaagatatttgtatcaagctaaaagccgatagattaggtaatatttcgaaggcaaatagatgatcaaacgcaccttatacttcggcaatccggcttatctttctaaaaagaacgatcagcttattattaagttgccggaagataaaaataataccgaccaagaattggaggtaaacccaaatcaaaaatatcttgatcgaggtaatgtaaattccatcccaattgaagatattggtgtcataatacttgataatcaacaaattactgtatcacaagggttgctctcttcccttctggaaaataatactgcaatagtaacttgtaatttctcacatttaccgataggcttattcttgcctttggaaagtaacctcgttcaaagtgaacgatttcaatcacagatagaagcatccgaacctcttaaaaaacaattatggcagcaaaccataacggctaaaatctacaatcaggcggctgttctgcgtaatcataaaaagccaaatgataatatgaaacgatgggcaaaagatgttagatcaggtgacgctgacaatctagaaggcagagcagcttcatactattggaaaactgtttttccgcctgagcttgaatttaagcgggacagagacggtcagccgccaaataatttactaaattatggttatgcaattttaagggcagtggttgcacgcggtttagttgcctccggtttactcccaactcttggtattcatcatcacaacaaatacaatgcttactgtcttgcagacgatattatggaaccttacagaccttatgttgatgattttgtagtaacatttgttgaagacggagaagactttactgaattgactccttcaattaaaaagcagcttttaacaatacctgctcttgatatttttattgatggcgagaaaagcccgctaatggttggtatgcagaaaacaacatcttccttagtaaaatgttttaatggcgaagcaaaaaaaattatttatccgacaatgtttaattaaggtaaaatgctttatgaacttactctaaattcctcttttgaaatgaaaggttctttactgattaaataatacaatcattatcgggcattaaaagaaactttttgttaggaataaaaatgaaatatctgataataaaaaactttttctctcttctctttttaagagaagggatggggatgagttgaaataaaaaatgaataatcgtttaaatcaatatcgtattatgtgggtattagttttatttgatctgccgacagaaactaaaaaagagcggaaagcttatactcgttttagaaaagagatgatgaaagatggtttctcaatgtttcagttttctatttatgtgcgccattgtgcaagtaaagaaaacaaaaatgtgcacgtaaaaagaattaaaaaaattctgcccgaaaaaggtcatgttggaattttgtcaattactgacaagcaattcgggatgatggagattttttacggtaagaaaaaagaagaatccggatttaaggaaacacatcaacttgaacttttctaaattgactgattgtcaccctgttgttataaagggtgacaaaataatcagtcatatttctgatattaaaacaactaagcttgtttgcaaagtgatttttttgatcctgctattgctgtaagtccttatatttcaatgaggtaaaatacaatgagttgtttttaatatcctcaaagaactaattgaaagcaaatcacaactaaagcactattaacagcatctccgctcgtgttgtttttaatatcctcaaagaactaattgaaagcaaatcacaacgcgttcaacctgttctgcatattctttgttgttgtttttaatatcctcaaagaactaattgaaagcaaatcacaaccccctcgctgaagtattctaagtagttgggttgtttttaatatcctcaaagaactaattgaaagcaaatcacaacttcgtaaagctggataacagctcaggaatagttgtttttaatatcctcaaagaactaattgaaagcaaatcacaacgtacacccttgtagtctcactaaagatgtgttgtttttaatatcctcaaagaactaattgaaagcaaatcacaacagtatatcgcaaatattgatcttctgtcaggttgtttttaatatcctcaaagaactaattgaaagcaaatcacaacgtacctgcataaccaatcttaataactgaagttgtttttaatatcctcaaagaactaattgaaagcaaatcacaacgtcaacaaccggggtgaggtagtgggtgcagttgtttttaatatcctcaaagaactaattgaaagcaaatcacaactcgtaattacattctccggaattataaaccgttgtttttaatatcctcaaagaactaattgaaagcaaatcacaaccagcgtggacaaatcattttattaaataaagttgtttttaatatcctcaaagaactaattgaaagcaaatcacaacgattctcagcatcgacacaatgcttttatagttgtttttaatatcctcaaagaactaattgaaagcaaatcacaacttattataaaataaagctaaagcagattgcgttgtttttaatatcctcaaagaactaattgaaagcaaatcacaactggatagaatgcgtttgtattcttcacgtgttgtttttaatatcctcaaagaactaattgaaagcaaatcacaactgaacctgtcagggtctccgccctctggtagttgtttttaatatcctcaaagaactaattgaaagcaaatcacaacagactgaaaatgaaaggaataaatataatggttgtttttaatatcctcaaagaactaattgaaagcaaatcacaacaaccttgcaacttagcaagtaaagcaaactgttgtttttaatatcctcaaagaactaattgaaagcaaatcacaacattcaaagcatattgcttttcggcaagctggttgtttttaatatcctcaaagaactaattgaaagcaaatcacaacatcagaagtgttataataataataataattgttgtttttaatatcctcaaagaactaattgaaagcaaatcacaacatctcagcttttactatctcgtctctcatgttgtttttaatatcctcaaagaactaattgaaagcaaatcacaactgtttcaggtttagcttctttaagaagctgttgtttttaatatcctcaaagaactaattgaaagcaaatcacaactatttctcctttgttacgttaaattataaggttgtttttaatatcctcaaagaactaattgaaagcaaatcacaacctgccacataacgtacctcatcatatattggttgtttttaatatcctcaaagaactaattgaaagcaaatcacaacaaccttgcaacttagcaagtaaagcaa

SEQ ID NO: 1450 - DNA, 8232 bp, synthetic construct
  source 1..8232: mol_type = other DNA
  misc_feature 1..8232: note = Synthetic
aaaacttgcattttgtgttttttgtgtatttgtgttttagtggtaattttcacatttattactttttggagtaaaactcaagatttaaaatgaaaatgaatgacccaatggccaatgactattgaccataaatgacgcgacctgtcccttaccagtggttggaaagcaaatgactattgactattgaccaatgactattgactattgactattgaccaatgactaatgactaatgactattgaccattgaccattgaccattgactaatgaccaatgaccatttcaatcaccatttttcttccctcacccatttagctgatgtgatcataaaatgcctgtaataattatcaaggtcaatgacaaacaagcggctattgcgcaccatggcttctgagatcatgaaactttcacctatgtttaatgtcaaagtatcaatctcctttgaatacctgtacttatagaccatatcaaaatccagttctatccaatttcctacagctctctcactcttgccgatcagaccggaaataaattttctggtatagcctacatcaaacaaagcccttgaattgtttttgtcgcaggccttaaaaaatgaactgtctttttcatattcaattggcataaaaaaagtagggaaacaccctgttaacaacggaattgtagttattttcctgtcgtcgaaataaagtttattcccacaacaatcgcaaattttagtgtgtatcataatgctggaagtaattgattttattgagtaattagccttcatacgtaataatttcacataggttcatttttttcgttcgaatatttcgttttgatgtgaaaaaaatgtaaaaaaaaatggagtttgacattgcttttaccattaaaaacagtgtgtatagtaaagataattaatacgataaaaaataattgcaaaaataattgcaaattgaaattttatggtccacagaaaaatatttttttttaaatttacactatcaaagtattcaataaaaaaaatgtttcttaatcttttaaatcttttaaaaaaaattaaactaattattaatcttaaaaaaattaaagttatgtcagcaagaatagcaagagcaattataggctgcacaaggaagcaacctaaaaacgtgttggacacagcaaacaatgttgtggagaaaatgtacgataataatgatatctacacaacgccaccgcgcacaaaaactgtactgtccgggtttatacaaacagccgccgcctcagaagcagcagctaaaaacaggggaaaactggaaattgaaacacgagaccaggatattggatttctgtttgatgttttgcaggatgagtatgtcccatacgttaatgggctttataaaggtaaccctgtaaaacttttactgtcaggactacccataagcagcgaccccgttcctcatggaataccggaaactccggtaattaaacgcgtggataatggtccggaacctcacagcgccaagatctttttggccaaaacaaccagtccgcttaaaaaacaaagagaaaaactgacttattgtgtttatatgagcactgatcccagtatgctgcccgaaagcttcagattggtgcttaccaccacaagccagcgcaaacttattgtaaaagggcttactcgtggtagcgaagtggcttttgccgtaacaagcagaaactcagcaggtgtctcaaaaatgtcagacgctgctaaatttataccaaattaaaccaaaagtaaacatggctttatttagcacctacaaattcattgttatttagcgtattagctattaaagtcaaataattctactttaaattccatcattggaaactttctttccgatgatggaatttttgtttccggttacgtaaacattctttgcgtcattggaaactttgtttcctgttacgtaaactttctttccgtcattgtaaactttctttccggttacgtaaactttctttccgtcattgtaaactttctttccggttacgtaaactttctttccgtcattcgaaactttctttccggttacgtaaactttctttccgtcattggaaactttctttcctattacgtaatctttgtttccggtcatggaaagatggattggggaatagtgaaatttttaaattttattcttacggtcaacagaggagtgaaacaaatatttggtatttgtgaaatttatttaattttacggagtgaaattgtaaaaccatttttcgcgatatgagaagtaagcgggaaccgttgcaagcgctatgaacaaagggatggacataaaaaaagcgattcttttgagggaaccgctttaaatgttttcacaacggaataatccttattgtgattcgcttttttcgtatgcagcaaaagtagaaaatatttattgaacaaaaacaagatttatgaaaaaaattttaggacttgatttgggaactaattcaattgggtgggcattggtaaaccaggacacaaaaaataatgccgggaacatcattgatattggaagcagaattatcccaatgtcacaagaaattttaggtgaatttgataaaggcaattctatttctcagactgccgaaagaacaggatatagaggtacacgccggttaagagaaagacatttattaagaagagaaaggctccacagggttctgaatattcttgattttctgccgaagcattatgcaaatcatattgattttgatcgccattttggtcaattcattgattatgctgaacccaaattggtctatgatgataaaggagaatttattttcaaaaaatcttttgacgaaatgctggaagattttaaaattcatcagccaaaattattgctcaacaaatatggtaaaccagccttaattccttacgactggaccatttattatttacgcaagaaagcattgaccaaaaagattgaaaaagtagagttggcatggctgcttctaagtttcaaccagaagagaggatattatcaattgcgtggtgaagacgacgaagaaacacccaacaaacttatagaatttcatgaattgaaagttgtaaaagttgaagacagcggtgataagaaaaaagacgatgtttggtataatgttattcttgaaaatggttggatataccgccgatcaagcaagattccattatttgactggaaagataagatcaaagaattcattgtaactacagatcttaatgatgatggaacttttaagacagataaagaaggaaaagtaaagagaagcttcaaagcagtgaattcagaggaagattggattgcaattaaaaaaagtacagaggataaaattgaaaaatcgcacaaaactgtaggttcttttatttacgatactttgcttcaaaatcctgatcagaaaataaagggcaaattggtccgaactattgaaagaaaattctacaaagctgaattgacagccatcttagaaaaacaaataaatgaacattcggaattgcaaaacaatgaactttatcaggaatgtttaaaagaactttataaaaacaataatgcacacagaaacagtattagcagcaagggatttgctcatttgtttctgaatgatattattttttatcaacgccctctaaaaagcaaaaagtccctgatcagtaattgcagatacgaaagcagaagatacaagaatgatgaaggaaaatttataccggtaccaataaaatgtattgccaaatcgcatccattgtttcaggaattcaggttgtggcaatggatgaagaacctaaaactatttttaagagaagatgattcagacgttacatcaattttcctgaaaactgaagaagattgggttgatctttatgaatggttgaataaccgtaaagaagttgatcaaaaagcatttcttaaatatcctgcattcaatttaaaaaaacaggctgagaaatacaggtggaatttcgtagaagacaaaagctatccttgcaatgaaacacattcacaaattcaaacacggcttgagaaagtggagaatgtgcctgcatattttttaaccaaagaaaccgaagaagctctttggcatatcctgtattccatagaagataaaattgaaattgaaaaagcattgaaatcatttgctctcaaacacaatttaggcgatgattttattgaacgttttaagaaatatccccgcattgaaaaggaatatggcgcttattcttacaaagcaattaagaagcttctgccattgatgagaatggggaaatattggaaagaagaaaatatacatccacaaacaagagaaagaatagaaaatatcctgaatggtgaatttgatgaaaaaataaaaaacagggtacgggaaaaagcaattctgttaaaggacataaaagattttaaaggattaccactttggttgaccggctatatagtttataacaggcattcagaagaaggagaaataacaaaatggcacacagcaaatgatatttcattgctcgaacagcattcacttcgtaatccgatcgtagagcaggtaatcaatgaaacactgcaagtagtaagagatatttggaaaacttatggtgaaggcaaagaaaatttctttgatgaaattcatatcgaattgggacgggaaatgaaaaatcctgctgataaacgtaaacaaataactttaaaaaacacagaaaacgaaaacaccaatcttcgtatcaaagctttattgattgaattattaaacgacagcaatgttgaaaatgttcgtccttattctcccggacagcaggaaattctaaaaatttatgaagatttcgttttaaattcagagagtgaaattcctgatgatattttaaagatcagtaaaacctcattgccttcaaaatcggaattgaacagatataaattgtggcttgaacaaaagtacaggtcgccttatactggtgcagtaattccattgaacagactttttacttctgattatgaaattgagcatatcattccacaatcccgattttttgatgattcttttggcaacaaagttatttgtgaaagtgaagtaaataaattaaaagataatcaactggggcttgagtttattaaaaatcatcatggggaaaaagtttctttgaattatggaaaatcagttgaaatattttccgaagaaggataccaggattttgtaatgaaacattatgcaagcagcaccggtaaaatgaaaaaacttttactggaagacattcctgaaaagatgattgaacggcagctaaatgataccagatatatcagcaaagttgtaaaaaacttactttccaatattgtgagggaagaaaatgaacaggaaacaacctctaaaaatgtactttcaagcaatggatcaatcacttcaattttaaagcaggattggggattgaatgatatttggaatgacattattacaccacgttttgtccgtcttaatcaaatcaccaatagtagtaactttggaaaaataaatcctcaaacaaataagtttttacctcaggttccatttgaattgcagaaaggatttagcaagaaaagaattgatcaccggcaccatgccatggatgcaatggtgattgcctgtgcaagccgcaaccatataaactacctgaacaatgaatatgcaaaagcagataaaaaagacacaaggtatgatttaaaaagcacgctttgtttaaaaaaatacaatgaaggaagtaaggataattataaatgggtgtttaaaaatccatggaataatttcgcattagatgcaaaagaaattttgcagacaacattagtaagttttaaacaaaacctgagagttattaataaaactgtcaatcatcatcagaaatgggtgacacaaaaagacggaagcttaaaaaaagaaatggtaaaacaaactttgggcgacaattgggcagtgagaaaacctttgcacaaagatactgtttcaggtttgattcaattacgtttcaaaaaaacagtttcgctttcatcagctcttgataatgtagaatccatagttgataaagaattgaaacgaaaaataaaagaacttttttcccaaaatcccgacaagaagaaaattcaaaaattctttaaagaccttgacaataaatggaacaagaaagatatttcaaaagtagaagtttattactgggaaaaggataatgttgcatcaagagttaaactggatgacagtttcaatgctgaaaaaattcagtctatcactgacacaggaattcaaaagatattattcagtcatttgaaaaatcatgatgaagttaaagatggaaaaataattgaacatcctgaattggccttctcccctgacggtattgatatacttaataaagaaattgtaaaacttaatgaagggaaaaatcaccagtcaataattaaagtcagaacttacgaacctaaaggaaacaaatttaatgttggtagcattggtaataaaaaagacaaatacgtagaggctgcaaaaggcaccaatttattttttgctatttatgttgatgaaaaaggaaagcgtaattacgagagcattcccctgaatattgtaatcgagaggcagaaacaaggattaatagcagttcctgataaaaatgaaaaaggtgattcactgctattttatttatctccgaatgatttggtttatgtgccgtctgaagaggaaaaagaaagaaggaacttaagtgattttcgaaatttaaataaagaacagttgaaaaaagtttataaatttattgatggttcaggagatttagcaaattttattcagagtcattccgcaacagtgatatttaatatctctaaaaaggaacaagaaaagagaggcttaaattaccccattcaaaatgaatttggagtgggaagtccacaatcaaaaaatcaaaaatcatttgagggtatcatgataaaagaattttgttggaaattaaaagtcaatcgaattggcaaaatcaccaatataatgggttaatcaaaaatattttttcatcctataaactgaaaaaaaatatcaataaccacaacaaacttttatcatctttgacgtatttaggtcattcaatttattttaatgctaaaacaaacattgaattttgggaatcctgcttacctacatcttgaaaatagtcaactggtgataaggcttccagatattgaaaaaaatacaggcgacacaaaacgctgccaggttgaaaaacgctggcaggttcaagcagccggaaacctgccggcgtttgaagaacccgccagcgtttttatcaaccccgatagcgttttatcaaccaaacctggcaatgtttaaaaaaaaataaaaaatatggaaaagacctctcatcttcttcatggcaaatattatcacatttacaacaaaggattaaacggagttaacctgttttataagaaggaaaattatctccatttcatgcagctttatgatgattatatttcaggcgttgctgaaacctatgcatggtgccttttaccaaatcactttcatttgctggtaaggataaaaactgaggaggaaatcggatattatttggttgacgaaacgctgccaggttcaaaaaacgctggcaggtttggatcaaaaaatgcagataggtttaaaactaccggaaacctgccggcgtttgcaaaacccggcagcgttttatcatccagaaaacctgaccccacccatcatttttcgcacatgtttaacgcatttgccaaagcaataaatgaacaacattcaagaacaggttcattatttcaaaagtctttcaaaagaataatggttgataatacggactattttaaaaatttgattctttatattcataacaaccccgtgaaacatggctttgtcgcatcatgttccgattatccctggtcgtcctacggttcagttatttcaataaagtcaacaaaaattgaaagaacaaaaatccttggttggttcaatgataaagcaggctttataaatgctcataacagaaaggatattgaaattgatgaaatttttatgatggagtgatatttaaacgctgccaggttttcaatcaatcgagtagacggctccgcccggtattgccggacggagtgcgcctctcacaccactgtacgtacgggtcgcgtatacagcggttcattaagatgtggagcaactttttcgtaatactcaagcatagcttcgtaacctcttttccgcaagcgttctaaagtaatagttgtagtaagaattgggct

SEQ ID NO: 1451 - DNA, 8108 bp, synthetic construct
  misc_feature 1..8108: note = Synthetic
  source 1..8108: mol_type = other DNA
ttttttaagaggaaagaggttttcaaattttaatttctgtttagtttgtttaataaaggctatacatttttcattcacatctacagcatcaacatgaattgcaccacgcgaacaaaattcgtaggcaatatttccggtaccgctaaaaatatctaaaacagttaatttctcgatatcgaaattgttttcaataatattgaataaactttctttcgatctgtcggttgtgggacgaacgggaagtccggttggagcatgaagcaaaatgcttttatgagttccgcttatgatgcgcaaagcaagctgttaatttgtaaataatattgttgctcctgaaactctctgaatgaagcaggataggagtataggtcaggtcgtttcattaattcaacatgtgaaatgtatttcttcatcagtccaactaaacttcctgtattgctaaggtttccaaataaattcacctgcaatttatcttgatttaattttaataattcggtaacagataaaatgaaataaacgatatcagtatcagcttcaattttaaaagtattaagaaaatttaagtcgttattttttaaatgagcgatctcgatataagtttcatgtgcatgaacaaagagcgtatctttattttctttttgataagaagaataaaatagctgtaataaaatttctgtttcatgaataatttccgactgagggaaaattgattttaacgcatcataaaaaatttcattcatggcaaaaatactcaccatatttttttgcaaacggttaaacaaaactttttgatttttttgcaaaggaatattcagttttaaaaatgattctgctttttcacctgcaaataatgcctccggaataagtgcatgacaattgttttctataattatttttatactgctgtattcttgattgtcaatttctaaagcattaagaagagttttgatctcagttgaattcttgctgaaaatatcatcttttacctctaaaacacgcaagccaaaaacggcatttgtattttttgaggccaatactattttaatcgtatcagacgaaaaatgaataaacaatacactatggtgcatattgctttccattgcatctcggtcgatatattttttaatagtaaaagcttcttgtgtctgcattaattgttactttcgcggtggtcaaaaataattaaaactaattaaaatacactatgtggaaacccgctgaaaccaattataaagaaatcattgaaaagaagatttcaaacaaccaatttatgcattttttaggttttaaaattacacatattgacgcaggggcagttgaaggagaattagatttagtaaagcaccatatgcaacaagctgattttttgcatggtggtgttacttctacagttgccgatattgttgccggatttgcagcttttactttgataaaggaatctcaaaatttagtaacggtagatttacgtgtttcctttttaaatccaggattgggagaaaaattatttgcaaaaggatttgtaataaaagcagggcaaaaacttttttttagcgaagcagaagtttggatggaacatcattcaaaaaagattttaatcgctaaagccagcggaacatttgccgttatcaatcctgaagattttaagaaataggtattaccaatttttaattcatcaaaacagataaacatctcattttatcttatgtaaaaaaaaagatcccgattgctcgggaccgttttaaatgttttcacaacggaataatccttattgtgatttgcttcagaatttgtccatcaaatgtaaaaatttaaaacacaattgcaacaattaaaagttatcaacaaatgatattttgttttaaataatttgaagattgcttatcaaatttaaatactatgaaaaaaatactcggactagaccttggaacaaatagcattggttgggcgttgattaaccaagatgatgaaaataaaaaaaatgaaatcattaaattaggttcacgaattattccaatgagtgaagacattcttggaaaatttgatagtggagttactgaatcagatacagcgaaaagaactagttttagaggtgtgagaagattaagagaaagacatttattaaggagagaacgacttcatagagtattaaatattttaggatttctacctgaacattatgcaaaggaaattgactttgaaaaaagattcggtcaatttaaaaaagaagcagaacccaaaattgcttattgcattaatgaaaaaacaaaagcattcgagtttgtatttaaaaattcatttgctgaaatggttgaggtctttaaaaaataccaacctcaattattagaagatggaaagaaaatgccttacgattggacaatttattatttgcgcaaaaaagcattaacgcagaaaattgataaaggtgaattagcttggctacttttaaattttaatcagaaaagaggatattaccaactaagaggagaagatgaagaagatgctccaaacaaattagttgaatttcactctttattagttactgatgttattgatagtggcgacaaaaaaagcaaagatgaaatttggtataatgtacatttagaaaatggatggatttatagacgaacaagtaaaatacctttagaatggaaaggaaaaactaaagagtttattgtgacaactgatttaaacgaagatggtacaataaaaaaagataaggaaggaaaggaaaaacgttctttcagatctccttctgaagatgactggactttattaaaaaagaaaacagaattcgacattgataaaagtaaaaagacagttggttcatatatctatgataccttacttgaaaatcctaaacaaaaaataaatggtaaattagttagagttattgagcgtaagttttacaaagatgaattgaaacaaatattagaaacacaagtaaaacatcatcctgagctacaagataaaaacctctttgctgaatgtttggaagaactttatgaatacaatgaagcacatagaaacagtataggtaataaaggttttgagcatttatttttaaacgatataattttttatcagcgaccattaaaaagtaaaaagtcgttaataagcgattgcaaatttgaaagcagaacttatttattaaatggagaaaagaaaacagaacctattaaatgtgtttccaaatcacacccattatttcaagagttcaggttatggcaatggatgaagaatttaaggatttatgaaaaagaaaccgataaagatgttactgatgaaatattatcaacggaagataattggataaatttatttgaatggttaaatgatagaaaagaagttgaacaagagcaattaattaaattttcacttttaccgcttaaactaaaaccaaaagtattaacaatagaagccacaaaatatagatggaactttgttgaagataaaaaatatccatgcaacgaaacacgttcacaaatagtaactcgattagcaaaagttgaaaatgtacctgtcaactttttaacaaaggaaattgaggaagcactatggcatattttatattcggttaatgataaactggaaataccaaaagccttaaaatcttttgctgtcaaacataatttaggtgatgactttgttgaacaattcaaaaaatttcctccttataaaaatgattatggttcttattcagcaaaagcaataaaaaaattattgccattaatgcggatgggtaaatattggaatgaagaaaatatacatccgcaaacaaaagatagaattgacaaaatacttaatagcgaatttgatgaaaccataaaaaatagggtacgagaaaaagctattaacattaataatataaatgattttataggtttaccattatggctttctagttatattgtttacgatagacattcagaagatggtgaaataaaaaaatggaaaactattaaggatttagaaaattatttgaatcctaaattggaaggtagttttcaacaacattcacttcgcaatcctattgttgagcaagtaataactgaaactctccgagttgtaaaagatatttggagtttttacggaaaaggtgcagacaacttttttgatgaaatacatattgagcttggtagagaaatgaaaaaccctgctgacaagcgcagcgcaatgactaaacagattaccgaaaacgaaaatacaaatcttcgtataaagtcattgcttgctgaattgatgaatgatataaccgttgaaaatgttcgcccatattcaccaagccaacaagaaatattgagaatatatgaagatggtgcattaagctatgagtctgaaataccggatgatattttaaaaataagcaaaactgcacaaccatcaaagaatgatttaatacgttataaactttggcttgaacaaaaatatcgctcgccttataccggtgaagttattccaataggtaagttgtttactactgcttacgaaatagaacatatcattcctcaatcaagattttttgacgattcgtttagtaataaagtcatatgcgaatcggaagtaaataaactaaaagataaacaacttgggttagaatttattttgagtcatggaggagaaaaagtttcattgaactatggtaaatctgttgaagttttaaacgaagaagcatacaagaatttagtaaatgaacagtattcaaaaaactacaataaaaagaaaaaattattgctcgaagatattcctgaaaagatgattgaacggcaaatgaacgatacaagatatatcagtaaaatggtaaaaaacttgatgtcgaacattgttagaaaagaaaaagatgatgaaggaacaacttcggtaaatgtattgtcgagcaatggacaaattacttctatgctaaaacaagattggggtttgaatgatatttggaacgaactaattgctccacgttttgaaaggttaaacacattaaccaacagtacaaactttggaactattaatcctaaaacaaaaaagtttctgccaactgtaccattggaattatcaaaaggattcacaaagaaacgaatagatcatcgtcaccatgcaatggatgctttagtaattgcttgtgctaaccgaaatcatatcaattatttgaacaatcaaaatgcgttagcaacaggaaagagtaaagagcaaaaacaagaaacaagagaagatttaaagcacttgttatgcgataaaaaatataacgaagagtcaaataactcatataaatgggtatttaaaaaaccttgggaaacatttactcaagaatcaaaacaacaactattaattacaatagttagctttaaacaaaacttgcgtgtaattaataaaacagttaataaatatgaacattgggaaaacaaaaatggttctttagaaaaggttaaagtaaaacaatctaatggtgatagttgggctataagaaaaccgatgcataaagatacaattgccggtatagtgaaccttcgctttaaaaaaactataacactttcagcagcaattgatcaatgggaaatgttggttgataaaaatctaaagacaaaaataaaacaactaattaatgaaggattagacaaaaagaaaattcaaaaattctttacatctcaagaaaataaatggatgaataaagatgtttcaaaagtggaactatattatttcagcaatgaaaaagagaatgatattttggtggcttcccgtgttaaattagatgatactttcaatgcgtctaaaattgaaagtattacggatactggtattaaaaaaatccttttaaatcattttaacaaagagaaatatcaaaatgctacagacgaaaagggaaaatcaattgctcctgaaacattggctttttctctagatggtattgatgaactaaataaaaatataaaagaactaaataatggcaaatttcatcaaccaatttataaagttagaacatatgagccaaagggaaataaattcaatataggacatacaggtaataagaaagataagtatgttgttgcggcagatggcacaaatcttttttttacaatttataaaagtgaaaaaggtgatagggcttatgatgcaatacctctaaatattattatagagaatcaaaaacaaggtgctttacagtatcacaagccaaaattttgttcaactcctgaattaaatgaagttggtgataaactattgttttttttatcccctaatgatttagtgtatttaccaaattctgatgaaagagaaaacccaagtttagtaactcttgaaagtataaactcagaacaagctaaacgagtttataaatttatagatggttcgggaacaactgcaaattttattccttatgtttctgcaactacaatatttaatatgaataaaaaagaacaggcaaaacagggtctaaattatcctattcaaaatgaatatggtttaggaagtcctcaatcaaaaaatcaaaaatcaaatgaaggagttatgttaaaagaattttgctggaaactcgaagtaaatagaattggagaaatcattagaataataaaataattacatactgaatatagcaagagtatagctattactgacagattcctaatattaatgaaaagaaatacatttgtggttattcacaccaaagttctgatgaggttaaattaagattaggttgtgatttgctttcagaatttgttctttctaatattgataacagtatttatttacatttaaaatagttgcaataggttgtgatttgctttcagaatttgttctttctaatattgataacagtatctaatgttcggttgggattgggattttggttgtgatttgctttcagaatttgttctttctaatattgataacagttgtgcttaagttttgcaattctgatgatgtgttgtgatttgctttcagaatttgttctttctaatattgataacagtcaaataatcttatgtcctctcaatacataggttgtgatttgctttcagaatttgttctttctaatattgataacagtttccaagtgtaacaggatataaggaacaaggttgtgatttgctttcagaatttgttctttctaatattgataacagtgaataattttattgtcccaaagtgtatttggttgtgatttgctttcagaatttgttctttctaatattgataacagtatttatcacgcactgctccacacccacctcggttgtgatttgctttcagaatttgttctttctaatattgataacagtatactcattctcatttagaggggagtttaagttgtgatttgctttcagaatttgttctttctaatattgataacagtagattgatgcaaaacctttgtcggtcattgttgtgatttgctttcagaatttgttctttctaatattgataacagtaatccttgctcacttcggcgttcgttcatcgttgtgatttgctttcagaatttgttctttctaatattgataacagtagaccccatggtttgtaattgtttatcaatgtattagattgaaaattagaaattaaaaatgttatcaattaagccgaagtattttataaatgcttcggcttttttatttgtaatgacacaaatttttttaacttcagaatatgttccctgcctgccgaagcaaaggctatgagcggcaggcaggtttctaatattgataacagtagggttactttcatagacgaactcctccccgttgtgatttgctttcagaatttgttctttctaatattgataacagttgcgcttaagttttgcaattctgatgatgtgttgtgatttgctttcagaatttgttctttctaatattgataacagtattaatcacggtactatgatcccttttgccgttgtgatttgctttcagaatttgttctttctaatattgataacagttttgttcctgctccttttgtgattgcagtagttgtgatttgctttcagaatttgttctttctaatattgataacagttttgccaaataataaccctattgcctttaagttgtgatttgctttcagaatttgttctttctaatattgataacagtctgaattataatctacatagt

SEQ ID NO: 1452 - DNA, 8075 bp, synthetic construct
  misc_feature 1..8075: note = Synthetic
  source 1..8075: mol_type = other DNA
aaactaactaaatatatttagaaaaccaatagttttatacaaaaaaaatagtagctttgggaaaaataataatacgatgaaaaaaatattaggattagatttgggaaccaatagtataggttgggctgtgttaaatgctgcagatgataactctttaaaatatatagaagcagctggcagtagaattattccgatggatgcagctatattaggtgattttgatagaggtaattcaatttctcaaacggcagagcgaacaagaattcgtggaatgcgtcatttacgagaacgatatttgcttcgtcgagcaagattacatagaattctgaatttgttaggcttcttaccctttcattatgcgcaagacatagatcgatatggtaacttttcagctgatatggaacctaaaatagcttggcgtaaaaatctagaaggagaattagagtttatttttatagaatcatttaatgaaatgctggaagactttaggaaaaatcagcccgaattagtcgcagataataagaaagtaccttatgattgggtgatttattatcttcgtaaaaaggcattagaaaagaaaatatctaaagaagaattagcttggattcttttaaactttaatcaaaagcgtggatactatcaattacgtggtgaagatgacgatgaatctatgaaaactgccaagacacggcagtactttgataagcaaattattaaaaatataattgatactaatcagacttataaagggcaaagaatacttattgttgagctacaaaatggagataaaggtaaaatctttaaaaaagaaattccagactggatagggcaagaaaaaaatattatcgttactgtagatattgataaagatgggaatgataaatatgaggaatctgggagcttgtcgtgtcgatttaaaattccaacagacgcagaatgggaatccgagtggaaacttataaagatgaaaacccaaaaagatttggatgaatctaataaaacagttggtacttatatatatgattcgattttgcaaaatccgacgcagaaagtacgtggaaaattagtgcgtacaattgaacggaaatactataaagcagaacttaagcaaatattggaaaaacaaactgaatttcattcggaattgcaggataaggatttatatattgagtgcttgaacgaattgtattctaataatgatacccatcggaacgcgattactgaccgagactttgtttatttgtttatgaatgatatattattctatcagcgtccacttaagagtaaaaagtctttaattgataactgtccatatgaaagaaatatatatatagataaggagacgggagagataaaatattcacctattaaatgtattgctaaatcacatccgttgtttcaagagtttcgtttatggaaatttatatctagtattagcagttatcaaagagaaaatgttgttgaagttgttgataaacggttagatttattttcttcacaatcaacttctgttcagaaattagtcacagatgtagatgttactgataaatttttaacatgtgagaatgattatgtggctctttttgaatggctgaataagaagaagattatagatcaaaaagaatttttgaaatatcgtccgtttggtctaaagggagatatagataattatcggtggaattatgtggaagataaatcatatccttgtaatgaaacacatgcaatgattttgacttattttgcaaaagcaggtatttcagaagatattctaactaaggaaatggaagaagcgctatggcatattttgtattctgtagaagacagacaagaaattacgaaagctttaagaacctttgcttccaagtatcatttaagtgattcttttgtgaaggtatttagcaatattcctccttttaaaaaagagtatggttcttattctgctaaagcgataaagaaattactttctttaatgcgaatgggaaaatattggagtgaagatgctattgatgtgaatacaagagagcgcatagataagattgtaacgggtgaatatgatgagaaaattagagatagagtaagggagaaaactatccgattgaatgatatcaggcatttccgtgcattaccggattggttggcatgctatgttgtatacgaccgtcattcggaaactagagaaataactgaatggaaatctccagaagaaatagatgaatatatacggaattttaaacagcattcactaagaaatccgatagtagagcaggtgatcacagaaatgggagagatcacagtacacggtaagattatcagttttgatacaattgcgtactgtgcgtgacatctggaaacaggtaggttgtattgacgaaattcacgtggaattaggccgtgaaatgaagaaccctgctgataaaagaaagagaattacatcacagataatcgaaaatgagaatgcaaatttacgagtgaaagctttgcttacagagtttgtgaatcctgagtttgagatagaaaatgtacgcccttattcgttgagccagcaggatattttacgtatttatgaggatggagtattaaacagtgtagcggaagtacctggcgatatagcgggaatattgaaaaagttcaatgagaatgatgcaaagaagcgtcctacaacaagtgaaattcttcgctataaactatggcttgagcaaaaatatcgttcgccttatactggtgaaatgattcctctcagtaaattgtttacatcagcttacgagattgagcacgttattccacaatcgcgatatttcgacgattcttttagtaataaggtaatttgtgaagcggaggtaaataaacttaaagacaatgcgttgggttatgagtttataaagaaacatcatggggaaaaagtagaattgggatttggtaagatagtagaaatattttcagttagtgtatatgaacaatttgtgaaggataattattcgcgaaatcgtgggaaaatgaaaaaactattgatggatgaaataccggagcaatttatagaacgtcaattgaacgacagtcgttatattagtaaagttgttaagacattattatccaatgttgttcgtgaaaaggcggagcaggaagctgtttcgaagaatgttattgtttgtacaggaggtgtaactgatcgcttaaagaaagattggggaataaatgatgtttggaataaaatagtgttacctcgtttcctgcgtttgaatgagttgacaaattcgactaattttacagcgaaaaatgctgctggtaatgagattcctgcgatgccgcttgaattacaaaaaggatttaataaaaaaagaatagatcatcgacatcatgcgatggatgctattgtgattgcatgtgctaatcgtaatattgttaattatttgaataatgaatctgcaagtagaaaggctaagataagccgtcatgacttacaagctattctatgtgataaggtgaggacagatgataaaggaaattatcaatggagggttaaaaagccatgggatacatttacacaggatgtatatgttgcattggaaaatataattgttagttttaaacaaaatctacgtgttataaataaaacgagtaattattattggcattacgagaacggaaagaaagttctagtaaaacaagtaaaaggtgatagttgggctattcgtaaaacaatgcataaagacactgtatttggagaggtgaatttgcgtaaagtgaaatcggtatctttaaatgaggcgcttaagaatccacagtttattgtggaaaaggacttaaaaagacaattgttatctttacttcaacagaattttgatataaagaaaataaaaaaatactttgaggagcataaagatatatggagtgatatatctttgtctaagatgaatatatactattttacaaaagaaactaaggaccggtattttgcaactcgcaaacctttggatgcaagttttgataaaaagaaaatagaaagttgcatcacagatactggaatccagcaaatattacttcgtcatttagaattaaaagaaaatgatccggagcgagctttttcaccagatggcattgacgaaatgaatcgcaatattattcaactgaataaaggtaaaggtcatcatcccatagctaaagttcgcgtttatgaaaaggctgataagtttgaggtaggacagcgaggcaacaaatcttctaaatttgtggaagcagcaaaagggacaaatttattctttgctgtgtatgaaactgaatatccggatgaaaaaacgaattctattgtacgtaaaagaaattatgcaacaatacctttgaatattgctattgaaagacagaaaagaggattatctacagctccagaagatgagaaaggaaatgtcccctcttttgtcttatcacctaatgatttagtttatcttcctacttctgaagatatcgtgaatggtcatattactcaaccgatagataaaagtaggatttataaaatggtctcttcttctggaagtcaatgtttttttataaagcataatatagctaatataattgttgataaatacgaattttcacctcttaataaaatggaaagggcaatctccaatgagatgattaaggagatttgtattcctgttaaagttgataggttgggaaatattgtcaaattaggtaaatctgaatagtgttagttcttaattttgaaatgatctaaatagtaagcttatattcaatggaagaaaacaagaaaggtgagatacttttatatcaaacaatagatggagtttctaaaatagaagtgactgtatataatgatatagtatggttgctagatcaggtggcagagctatttcaacgtaataagtcaacaatatcgcttcatattaaaaatatatttgattgtggtgaactacagatagattcaactgttgcaaaatttgcaacagttcaaaaagaaggtttgtataaagtagcatttgttttaggtagaaattcattttattgaaaattaaaaaaagagcgaaaaaaaatgaagatataggatacgttataattattatactatttaacaccttaaaactaatacaatgataaaaaaaactctttattttggaaatccggtttatctgtcattgaggaatgcgcagttagtaataaaattaccggaaatagagaaaaatgatatattgccagagaattttaagcaacaatctgaaataacaaaacctgttgaagatataggaatagtggttttagataataaacagattactattacatcaggagtacttgaagcattgcttgagaacaatagtgctgttataacctgtgatagcaaaagcatgcccgtgggattgatgcttcctttatatggaaatacaactcaaaatgaacgctttcgtcaacagttggatgcttcagtaccattgaaaaaacagctttggaagcaaactattaagtcgaaaatagataatcaagcctctgttttggagaagtgtactgcggaagaagtgaagtgtatgcgtatttgggcgaatgatgtgaaaagtggtgatcctgataatttagaagcacgtgctgctgcctattattggaagggactatttgctaatgttaaggggttcactcgtgaacgcgaaggcatttctcccaataatctactaaattatggatatgctatacttcgtgcaattgtagcccgtggattagtgacaagcggattacttccaactttgggtattcatcatcataatcgttacaatgcctattgtttggctgacgatataatggaaccttatcgtccttatgtggatgagttggtttttgggttggttcagttgcatgggagtaatttggaattaactaaagaaataaaagcttgtttattgactatccctacattggaagtgaaaataggtggaaagcgtagtcctttgatggttgctgttggacaaacaactgcatcattgtataagggttttgatggagaattacgtcgtataagttatcccgaacgttaatggatcgttttagtgaatatcgtattatgtgggtacttgttctttttgatttaccaacggagacgaagaaagataaaagagcctatgctgattttagaaagaatttacagaaagacggctttactatgtttcaattttctatttatgtacgacattgtgctagtagtgaaaatgcagcagtacatataaaaagggttaaatcttttcttcctgaatatgggcagattggaattatgtgcataactgataaacaatttggggatattgaacttttttatgggaaaaagatacagatggtgaatacgccaggacaacagttagaactattttaaaataaaaaatcccgtagaaaaaacgggattttttgttaaatacagcttcttttttatttcctatattaggctttagtatgttgtgctacagttagatatgtagattctgctgtattcaatggctcaaagatactaatttgaaagcaaatcacaacgatacgatatccagccgtgtaaatgttttggctgtattcaatggctcaaagatactaatttgaaagcaaatcacaacgccaaaatgagccttaatctgatcacgatagctgtattcaatggctcaaagatactaatttgaaagcaaatcacaacaccactgggattgttgccaagtaatggtagctgtattcaatggctcaaagatactaatttgaaagcaaatcacaacgctcccattcggatatcagtaccttgataagctgtattcaatggctcaaagatactaatttgaaagcaaatcacaacataataatgggaatgttactactattccggctgtattcaatggctcaaagatactaatttgaaagcaaatcacaacgcgtccgtgatattggtttttacctgcacgctgtattcaatggctcaaagatactaatttgaaagcaaatcacaacctctcctttgtttgatggtacggctattaagctgtattcaatggctcaaagatactaatttgaaagcaaatcacaacgcataggtagtgttcgccaacatttggtcgctgtattcaatggctcaaagatactaatttgaaagcaaatcacaactctagctctttgttttcgacgataggacagctgtattcaatggctcaaagatactaatttgaaagcaaatcacaactatctgttgctgattttgaaattacttcaggctgtattcaatggctcaaagatactaatttgaaagcaaatcacaacccattgtcgcctagtgtattttttcctaaagctgtattcaatggctcaaagatactaatttgaaagcaaatcacaactgtggagtcgaagaaagacgatcaggcgtgctgtattcaatggctcaaagatactaatttgaaagcaaatcacaaccgttggctctttattattctgctggaaatggctgtattcaatggctcaaagatactaatttgaaagcaaatcacaacaacaatatactgattcttggtctctaaagagctgtattcaatggctcaaagatactaatttgaaagcaaatcacaacagtattgttatttcgttactcttacatatgctgtattcaatggctcaaagatactaatttgaaagcaaatcacaactaatgatcttgtagataaggaaacaggtgagctgtattcaatggctcaaagatactaatttgaaagcaaatcacaacgataggtgtatctttcccgtctgcatctggctgtattcaatggctcaaagatactaatttgaaagcaaatcacaacctatcgctccctgtatggtgtagacacgagctgtattcaatggctcaaagatactaatttgaaagcaaatcacaacctgttgttgcgagtttaagaatctgaggagctgtattcaatggctcaaagatactaatttgaaagcaaatcacaactaatacctatatttatctatgcatcaatgcgctgtattcaatggctcaaagatactaatttgaaagcaaatcacaactacctttgtagcgtattcaaaaa

SEQ ID NO: 1453 - DNA, 7923 bp, synthetic construct
  source 1..7923: mol_type = other DNA
  misc_feature 1..7923: note = Synthetic
tgctgggcatcggtttccgttttcacgacaaatcgccccgcctacgctaaataacagacaaaaaacgccaatatcttcgttttttcagaatctcttcagaatctcttccgtactttgcagtggaaaatttaaggaatctattttatacggaaggatatgaaaaaagtaattttattggctacaattgttcttaatctatttatattcaacgccaaagcgggcgacacagacttcaggacatggacaaactggaacgtgtcctataacgtcaacgacaaactcgatgtcaaaggcggattggaatacagaacaaaaaacaatgcttcggccaccgatgtgtgggctctcaaggcggaaaccaactataagttgctgccattcctgaaagctggtgtcggctacgaatttcacatgaaacacagaacggaccactggcaaaaacgccaccgctacagcctgtcgctcaacgaatcgtggaccgtaggccgcttcgacctctcgctgcgcgaacgcttccagcacaccatcagcgaccacaacgaattccgcctccgcacccgtgcacaggcaaaatataaagtcaacgactggctgaaaccctacgcttccatcgagatgtacaacaacctgcaccgcggcgacaacttcgagataacccgcatgcgctaccgtgtcggcatggagctgaaaatagccaaaaacgtcaccaccgacctctactacctctaccaaaagcaacccgacaaagcctacaacatcaccggcatcgacatcaatttcaagttttaatgcaacaatcatcccgcctccagcgggatatttttttgtcttcatataaaaaatcagggcgagttgccccgcctataaaaaatgagcggttgagcccatttgattgagttcaaccactttatacgctaaaatttattggaatcagaaccgataaccaaacgttatcaacaaggcccgattcttattattttcatcttcaaaactcttctttatcatattgacaaatccatactgacttgaaaggtttatcaaatatttacctttcaattccataccaaccccgatttgaataccaacatcacaacggttcatcattgcttcattttctccttctattttcttaaacaagctgctactgatttcggcaccaccacccgacaatgacatcttgccgcctaaacccagtccgacatacggacccgcatttacaacaaatgcattgttatttttaatcggagctttaacggctataagcaaaggaatatccatatagagtgggttaatctttgcgactactccctgttctgattcacgacaacctttactcgtaaaattcaaaccagtctggaatgcccataaattgttaataggacaatcaatacccaaacccactgaaaagccagccttcatacttgcgccgctattggtaatgtttgccattgacagacctgcatgcacatcatacttcgcccgagagaaaccggtaatcgcaaagagtcctaaaaccacagttaataacagttttttcatgatagttatttttttcagagtaagattcctgccccctaagaaccttaattgttatttacaaagtgtagggacaactttttaatcagcacactcctttcttagatattggcaacattgaaacaaataaaatgtagttccgcacttgtcagtaataaacacatcatattttattcaaaaatatgcaaaatatttcaaaatatcaaatttaaatacaattaatttaataaaaacctaagatccgcaatgtaaacattgtaaaccaccgacattcccccaaaacagccggtataaattccaagttccaagagcgcataataaaaaatcagggcgagttgccccgcccgtaaatgtttcacaacggaataatccttattgtgatttactacaaattagtgttacaaatgtaaacactatttttctcaaaaacaatagtgcttaactaaatttattttactatctttaaattctaataacttaacgtaagggaatataaaaaacacaacgatatatgaaccccaaaagaatattaggccttgacctcggccccaacagcattggatgggcaacaatactcgaaaccgacaattctaagaccatagaaagtgccggaagtcgcattattccaatggatgctgcaaaattaggtgatttcgaaaaagggaatccacagtcacaaaccaatgaacgtaccaccttcagaggcacacgccgcctgcgtgagctccacctgctacgacgtgaaagaatgcttaaggtgcttcatctcttgaaatggctgcccgaacatttcgaacaagggattgacttttccaacaacggcgccaaatttttacaagacaaagaaccgaaaattgcctggcaaccaaccaccgacggacgatatgagtttttctttaaagaagctttccgtgaaatgttggccgattttgcgcgcatgcaacccgcattagttgaagaaggtaaaaagattccttacgattggactctctattttttgcgcaagaaagcgctgaccgaaaaaatccatcccacagaattggcatggctgctgcttaattttaaccaaaaacgtggttattacgaattacgaggagaaacagaagaaaaaaccgacaaactggaagagttttatagtctgaaagttgtcaaagtcgagaaatccgacgaaaaatcgaaagggaatccatggtataacatacatttggaaaacggttggatttatcgccgccaaagtgcacagcctctcgattgggagggcaaggtgcgcgacttcattgtcacaaccgaccttaatcccgacggcacgccgaaactcgacaaggaaggcaacgtaaagcgctcattccgtgctccaaacgaagacgactggaatttaaagaagaaaaagacggaaaacgaaatctcgatttccggaaaagccgttggtgaatacatttacgacaccctacttcaaaatccgaagcaaaagataaacggaagcctcgtcagcaccattgaacggaaattctataaggaagagctacggcgaattcttgaaacccaaagccgtttccattcccagctcaacgacagcttcatttacgaagagtgtcttccaacgaggcgttccgcaagaatatcagcggaaagaatctgatatatatgttcatcgacaatatcctgttctatcagcggcctttaaaatcaaaaaaatcgctgatagccaactgcgaatttgaatcctattcattcgtaaaagacggcaaaacgcagactgtacccattaaatgcatcgcgaaatccaacccactttatcaggaattccgcctatggcaattcctgtccaacctccgcatcctccaacgcacgaaggaagtggacggcaaactctctgtcgatgtggatgtgaccggggaatttcttcccgacaacgaagcatgggccaaccttttcgacatactgaacgaccgaaaggaaatcgaccagaaaacactcctcacagctgttggtatcaacaaaaagaaacaagccgaataccgttggaactatgtagaggacaagaaatatccctgcaacgaaacccgccatctgctgctttctcgctggaataaggccggactcgacaaggccatgcttacctttggcacatcctttattccgtagaggcaaaggacgagtcaaaaaaggcactctccacatttgcccataaaaacggattgccggaaattgaatttgttgaagccttcctttccactgcggcttttaagaaagactacggagcctattcccgcaaagccatcaaacggttgctgccgctactccgccgtggtaaatattggagtgccgaaaatattgataccgccacaaaaacgcgtattgaaaacattatcgatggcgttgccgacgattctattaacgaacgcacacgcgaaaagctcactgccttttccgacatcacacaatttcaaggacttcccgtatggctcgcctcctatgtggcgttcaaccgccattctgaatccgatcaacagacaaaatgggattcgcccgacgacattgacacgttcttgaggaatttccgccagcattcgctacgcaacccgattgtcgagcaagtggtgacagaaacgctccgcaccgtacgcgacatttggcgcaaatacggacaaatcgatgaaatccacatcgaaatgggacgcgacataaagcagacagcagaagaacgcaaacgccgttcggccatcatacagaaaaacgagaacacaaacatacgcatcaaaatgctgctctccgaatttttcaatgagggaaatgatgtcgaaaacgtacgtccgatgtcaccgatacaacaggataaattgagaatctacgaagagggggtactcaattccgtcgacggtattcaggacaacatagaaaccatactcaaaaagttcaacgaatccgaccccaaaaagcaaccgaccaaggccgagatccgcacttaccgccagtggctcgaacagaactacgtgtcgccctacaccggacagccgattcctctcagcaaactgttttcttctgaatatcagatcgagcacatcattccgaggtctctctacttcgacgattcattctctaataaaataatttgcgaatcagcagtcaacggccggaaaagcagtatgctcgcctataatttcatcaaggaatgcggtggagaaattgtgcagttgggcaacggcaagtccgtgcgcattctgaaagtggaagaatacgaacagctcgtaaaacgcgttttcgcatccaaccgcaaaaaacagcagaacctgctggcaacggatattccggacgatttctcacaacggcaactgacagatactcgctacatcagccgcttccttttggccctactctccaacatcgtgcgtgaaaaagatgaaaagggacaatacgaatcaacttccacatctaaaaatgtcattccttgcaacggtagcattaccgaccgcctgaaaaaggactggggagtaggcgacgtttggaaccgcatcattgcaccacgcttcgaacgcctcaacggcatatatggcgacaatcgttttggtgattggacaaacgtcgacggaaaaaaattcttccgcacgcaaatcccactcgagttgcaacgttccgtcaacaaaaagcgtatcgaccaccgccatcacgcgatggatgccattgtcattgcctgcacttcacggcaaatggtcaactacctgaacaacagcaatgcccacgaccatgacaagcgtattaacctgcgaaatgccgtatgcagcaaagccaaaaccgacaccgacggcaactaccgttacctcgtcaaaaagccgtggcctacatttacggaagacatggcctacacgctttctcaaatgctggtaagcatcaagcagaatctgcgcatcgtgaaccgctgcagcaaccggtaccaacgctatgaaaacggtaaaaaagtgaccgtccggcaaacgaaaggcgaaatgcttgctatccgcaaaccactgcacaaggattccgtgttcggccaagtcaatctccgttccgtaaaaacagtgtcgctcaacgtcgccctcgaaaatccgtcacgcattgtcgacaagcagctgaaaacgcttgtacgccaattggcggcacagcagatgtccgtcaagcagattgccgattacgttaaaaagcagaccgatttcgacgttaagaaagtggatgtctacattttctccaacgaaaccaataccccgctcgttgctatccgcaaacctgtcgacacgtcgctgacacaagaaaaaattctcaaatcggtgaccgacaccggcattcagaaaattctgcttcgtcatctcgaagccaacgacaacaagccggaatttgccttctcgccggaaggagtcgaagaaatgaacaaaaatattgtacagctcaacaacggacgattccatcagcctatatacaaggtaagaatttatgaaccaaaagggctgaaattcaatattggtacaaccggtacgaaagctacaaaatttgtggaagcagccaaaggcacaaacctcttctttgccgtctatctcgactctgacggaaagcgcaactatgagtctgtgccgctgaatatcgtggtcgaacgccttaaacaagggatgtcacccgtgccggaaaccaacgagaatggcgaccggctactgttccacttgtcgccaaacgacttcgtttatgtgcctaccgaagaggaacttgaatccggaagagttaatatgcctatcgacaattcgagaatttacaaaatggtatcggcttctggcagtcaatgtttctttgttccatattttatagcatcccctattgttccgacaaccgaacttggtgcaaacaataaatccgaacgatcgtgggacaatataatgattaaatcagtgtgcatacctataacaatcgaccgtttagggcaactctccaatgcctctacacttattcgataagaacctaatctacggcaacgcgcaacggaacaacgtttctgctgcgcgttgcttttttattcatttatttaaacctctccattatgaaacagacactctatttcgggaatcccgcctacttgtcaatgcggaactcccagttagtcatcaaaatgccggaagtggaaaacgccaaaggcattagcgacgaaatgaagcaaagcagcgttaccaccaaaccgattgaagacatcggcatactcattatcgaccacaagcaaatcacgcttaccagtgcactcataagcgcactgctcgacaacaattgtgccgtagtcacttgcaacgctcaaagcctgcccaccggcttgctgctacccctcagcggtaataccacccaagccgaacggttcacccgacagatacaggcatcactacccttgaaaaagcagttatgggcgcaaaccgtaaagcgcaaaattctcaatcaagctgccgttctttcgaattttaccgacgcggaaacggcatgtatgaaagtatgggcagaaacagtgagaagcggcgaccctgacaacttggaagcccgcgcagcagcctactactggaaagtgctctttccccacattcccgatttcacccgtgaccgggaaggagtgcctcccaacaatttgctgaactatggctatgccattctgcgtgccatcgtagcaaggtcgctcgttgcctccggactcctgcccacattgggcattcaccaccataaccgctacaatgcctattgtcttgccgacgacatcatggaaccctaccgtccctttgtcgacgctttggtactaaacacaatgcaacgccacagcgatattcaacaacttaccaaacccattaagtacgacctattgtcggttgcctatctcgacacattcatagatggagcatgccgacctctgacaaacgccgtagctcagacaacggcttcactctacaaatgtttcgcaaatgaaatccgccaaatagcctatcccgattatgaaccgaatgaatgaatatcgaattatgtggattctcgtatttttcgatctcccgactgaaacgaaaaaagaacgcaaagcggcagctcattttcgaaaagatcttatcggcgacggattcaatatgtttcaattttccatttatatccgtcattgtcccagttgggaaaacgccagagtgcatattaaacgagtcaaatcgtttctccccgaaacgggaaaagtatgtatcttcaccatcaccgaccgccagtttgaaaatattgaaattttctatggcataaaaaagcaaaaatccattacagcccccatgcaactggaactcttttagaaacagaaaaacccgtcttgacaacgggtttttctatctgttccgaacattttattttttcggaagattt

SEQ ID NO: 1454 - DNA, 7776 bp, synthetic construct
  misc_feature 1..7776: note = Synthetic
  source 1..7776: mol_type = other DNA
gcgatgctcctgatgtttttgagagctgtaagaatccaaacctaggcaataacgcaggatggaaacctctcgaaacgatcgaagagactattgatgtactaaataccatatttatcggaaaagaaggggtttgggctatcgtatcaaaagagactcaacaagtcattggctccattggcatcattcctgatcccaaaagagaaaacccacatgctcgcatgctgggttattggctaaaagaagagtgttggggacaaggcttcatgacagaagcagtgcaatccgtattgaattacggatttactcaaatggatttacatttgatcacggcaaattgttatcctcacaatcaacgctcacaacgtgtattagagaagaatggattcgtatacgaaggacggcttcatcaagcagagctaatgcatactggacaaatagaggatcatttgtgctattatcttgaccatcattccttttcaaacaaaaacaatagtttatgatagtagtaacaaaagatttatatacgctcaggagttgggaaggtcaagatacggaatccttaaccttgcaccttaataacaagaagatctgggataactgtcgggatggattgcctcatccttatacaaaagaaaatgcccgctgcttcatcagccaagcacgagaaaaaactgaaatatcggatttctgcattgtggttcatggtgaggcaatcggcaatataggttttgtgagaggaacggatgtggaacgtttcaatgcggaagtcggttattggatcagtgagagatattggaaccaagggattacctctgaagcgttagccgatgcgatccagtattattttgagcatacggaggttattcgtatattcgccacggtgtatgaatataatctggcatccatgcgggtattagagaaagtgggattcaagaagactggcatcttccgaaaagcttgttacaaaaacggacgattcatcgatgcgcatcattttgagatcgtagcggatgagaaattagttgggaacaaagacttataatccatttatgcaaataagacaattacaggtaaacgaatacgataaggcattaaccttgtctttggacgtgttcatccaatgtggcaagaatgacttcgacgaagagggattgaaaaccttcaagagtttcatttacaataaggatctggtaaatgagctaaccatttacggagcattcgagggtgagtcattaataggtctaatcgcgacaaaaaatgaaggaaagcatatctccttattcttcatcacgcctatgtatcatggaaaaggtatcggcaaacgattattcgaggccgctatccaagataagccagtctcggaaatgacagtcaactcctcttcctatgcaatcccaatctaccggaaattcgggttcgaaccaatctgcgaagaacaaactacacatgggatgaagtacaccccgatgaagcgaacgataacccgtccctccttcgaggacttcaatgagcttcttctgctttgggaagcgtccgtacgtagtacccatcatttcctaaaagaagaggatatcttattttataaagaacttgttcccggatatttcccattggtagaactttatatcatccgaaatgagcgaggaaagatcgccgccttcatgggcttaagcgatgagcttatcgagatgcttttcgtacatccggaagagcaaggcaaaggattaggtaaacgacttatccaattcgccttgcaagagacacccatccgaaaagtcgacgtaaatgagcaaaacacaaccgcacttcatttctatcagcatctgggattccaagtgataggaagagacgagacagattcctccaacaagccattcccgatacttcatcttcaagctacacttccttaaaaatttaaggtaatcgtgtagcctatcatgactatatgcgtagcctaacgaaggcattcttatcaaaaaacaggactagttacacataaaaaaagcccaccgataaaggacgatgggctagaacctaaatgttttcacaacggaataatccttattgtgatttgcttcaaattagtatagcaaagaaataaagaatatatttataaagcaagtatttcttgataatttattttatctttgaaaaaatcgttaacacaatactagtcatgaaaaaaatagtaggattagatttaggtacaaatagtataggatgggcattaatcaatgcttatatagatgaatataataaagaacacttatatggtatagaagcttgtggcagtcgtattatacctatggacgcagccattttaggaaatttcgataagggaaattctatctcacaaactgcggatcgaacaagctatcgtggtatacgtagattgcgtgaacgccatctattaagacgtgagcgcctgcatagaattctcgatttactcggctttttaccaaagcattattccgattctctcaatcgctatggcaaattcttaaatgacatagaatgtaaattaccttgggtaaaagacgaaacaggttcttacaaatttatctttcaggagtcttttaaagagatgttggccaattttaccgaacatcatcccatacttatcgcaaacaacaaaaaagtaccctacgattggacgatctattaccttagaaagaaagcattaacacaaaaaatatcaaaagaggaactcgcttggattcttttgaactttaatcagaaacgaggatactatcaacttcgaggtgaagaggaggaaactccaaataaactagtagaatattattcattgaaagtagaaaaagtcgaagactcgggagagagaaaaggcaaggacacctggtataacgtacatttggagaatgggatgatttaccggcgcacaagtaatataccattggattgggaaggtaaaactaaagaatttatagtcaccactgatctagaggctgatggtagtcctaagaaagataaggaaggaaatataaagcgttctttccgtgcgccaaaagatgatgattggacattaattaaaaagaagacggaagcagatatcgacaagatcaagatgactgtcggcgcttatatttatgatacacttctgcaaaaaccagaccagaaaatacgtgggaagctagtacgtactatcgaacgtaaatactataaaaacgaactctatcaaatactaaagacccaaagtgaatttcatgaggaattacgagataaacagttatatattgcttgccttaatgagctttatcccaataacgaaccacgtaggaatagtatttccacacgagatttctgtcatttatttatagaagatatcattttctatcaacgtccactgaagagcaagaaatcattgatcgacaattgtccctatgaggaaaataggtatattgataaagagagtggagaaatcaaacatgcatccattaaatgtatagccaagtctcatcctctctatcaagaatttcgcctttggcaatttattgtaaacctacgtatctacaggaaggaaacggatgttgacgtaacacaagaattactccctaccgaggctgattatgtcactttatttgagtggctgaatgaaaagaaagaaatcgatcaaaaagccttttttaaatacccgccattcggctttaagaaaacaacttcaaactatcgttggaattatgtggaagataaaccttatccctgtaatgaaacccatgcacaaataatagctcgtttaggaaaagcgcatatcccaaaagcttttctttctaaggaaaaggaagagacattatggcatatattatattccatagaagataaacaagaaatagaaaaagccttacactcttttgccaataagaataacctaagcgaagagtttattgaacaattcaagaatttccctcctttcaagaaggaatatggctcttactcggctaaggcgataaagaaattgcttccattgatgcgaatgggtaaatattggagtatcgaaaacatagataatgggacaagaatacgaattaataaaattatagatggagagtatgacgagaacattcgtgagagagttagacaaaaagctattaacctaactgatattacccattttcgagctttgcctttatggttagcttgttatctagtttacgatcgtcactccgaagtcaaggatatagttaaatggaagattcccaaggatatagatctctatttaaaatcgtttaaacaacattcgttacgcaacccaatcgtggagcaagtgataacggaaaccttgcgtaccgtacgagatatttggcaacaagtaggccatatcgatgagatacatattgaattaggacgggaaatgaaaaatccggcggacaagcgtgcccggatgtcacaacaaatgataaagaacgagaataccaatttacgcataaaagcactattgactgaatttttgaatccggaatttggaatagagaatgtacgtccatattcccccagccagcaggatttattgcgtatttatgaagaaggcgtactaaatagtatattagaattaccggaagatataggaattatattaggaaaattcaaccaaacagatactctaaaacgtccaacacgctcggaaatactacgttacaaactatggttggagcaaaaatatcgttcaccttatacaggcgaaatgataccattaagtaaattattcactcctgcttatgaaatagaacatattattcctcaatcacgttatttcgatgattcacttagcaacaaggtgatctgtgaatctgagataaataaattgaaggataggagcctcggctatgagtttattaaaaaccatcatggagaaaaggtggaattagcttttgacaagcctgttgaggtactttccgtggaagcctatgaaaaacttgtgcatgaatcttattcacataacagaagtaaaatgaaaaagttactcatggaagatattccagatcaatttatagaacggcaaccgctatattagtaaagtagtaaaatctctgctttctaatatagtgcgtgaagaaaacgagcaagaggctatctccaagaatgtcattccttgtacaggaggtattaccgatcgattaaaaaaggattggggcatcaacgatgtttggaataagattgtacttcctcgtttcattcggttgaatgaactgactgaaagtacccgtttcacttctatcaataccaataatacaatgatcccctccatgcccttagagttacaaaagggattcaataaaaaacgtattgatcaccgccatcatgcgatggatgccattatcattgcatgcgcaaatcgtaacatcgtgaactatctcaataatgtgtcggctagtaaaaacacaaagataacacggcgagatttgcaaaccctattatgtcacaaggacaagactgataataacggtaattacaaatgggttattgacaagccttgggaaacattcactcaagatacattgacagctttgcagaaaataacggttagctttaagcaaaatttgcgtgtgatcaacaagacaacaaaccactatcagcattatgaaaatggaaagaagatagtctccaaccaatcaaaaggggatagttgggctatccgtaaatcaatgcataaggaaacggttcacggagaagtaaatttgcgtatgataaaaaccgtatcatttaatgaggccttaaagaaaccacacgcaatagtagaaatggacttgaagaagaaaatactcgctatgctcgagttaggctatgacactaaaagaataaagaactatttcgaggaaaataaagatacttggcaagatattaatccatcaaaaatcaaagtctattactttacaaaagagacgaaagaccgctattttgcggtgcggaagcctatagatactagtttcgacaaaaagaagataaaggaaagcattacagatacaggtatccaacaaattatgcttcgacatttggaaactaaagacaatgatcccacattggcattctctccagatggtattgatgaaatgaaccgtaatattcttatattgaataaaggaaaaaagcatcagcccatttataaagtgcgtgtctacgaaaaagctgaaaagtttactgtaggacaaaaagggaataagcgaactaaatttgtagaggcagcaaaaggaaccaacctgttctttgctatctatgaaacagaagagattgataaggatacgaaaaaagtaatccgtaaaagaagttatagcacgattcccttaaatgtagtgatcgaacgccaaaagcagggactttcctcggctcctgaagatgagaatggtaatctacctaaatatatactctctcctaatgatctggtatatgtaccgacacaggaggagattaataagggggaagtcgtaatgccgatagatagggatcgaatatacaaaatggttgactcaagtggcattaccgctaatttcatcccagcttcaacagccaatttgatttttgctttacctaaagctactgcagaaatctattgtaatggtgaaaattgcattcagaatgaatatggtattggtagtcctcaatctaaaaatcaaaaagctataacaggtgaaatggttaaagaaatatgttttcccattaaagttgatagattaggaaatataattcaagtaggttcatgtatactaactaattagattttatcctatgattaagaaaacattttattttggtaatcctgcttacctatcacttcgtaaccagcaattagttattaagttaccggagatagtaaagaatgatactgtgcccgaaagcttcaaacgacaatcagaaattactaaaccaattgaagatattgcagtgatagttcttgacaacaaacaaattactattacccagggtgtattggaagcattactagagaataattgcgcagttattacatgtgatggacgaagtatgccagtaggcctcatgcttccgctttatggaaacacgacacaaaatgagcgctttcgagatcaattagacgcttccttacctttaaagaaacaactttggcaacagactattcaagcgaaaatcaacaatcaagcatcagtattatgctcttgtaaaaacgaagaaataaaatgtatgcgaatatgggccaatgatgtacgtagtggagatcctgacaatttggaaggacgtgcaactgcttattattggaagtatctgttcggacacatagaaggttttacaagagatcgggaaggtatacctcctaataatttattaaattatggttatgctatccttcgtgctattgttgcacgtggactagtcacaagtggtatgttacccacattgggtattcatcaccataaccgatataatgcttattgcttagccgatgacatcatggaaccttatagaccttatgttgatgagcttgtatttggtttgataagaacaaagggtatatcacccgaaatattaacaaaagaatggaaagcatcacttctttctattcctacattagaagttaagattggaggtaaacgaagtccgttaatgatcgctgtcgctcaaacaacagcctctctttacaaatgtttcagtggagagcaacgaagaatcgtgtatccagaacggtaataatcatggatcgatttagcgaatatcgtattatgtgggtgttggtattatttgacttgcctacggaaacaaaaaaagaaaagaaagcttatagtgatttcc

SEQ ID NO: 1455 - DNA, 7697 bp, synthetic construct
  misc_feature 1..7697: note = Synthetic
  source 1..7697: mol_type = other DNA
gtctacagtatattttctctaccattatttagagagtaacaatcgctcgttaaagtatgaggccgccatgaacgaaatgcacctcaaccaacttaaggctcaattgaatccgcactttatctttaatgcgctcaatagcatgagggctttggtagatgaagaacctactaaggctaaaatagccattacacagctttctaacattcttagaaactcgctgattacggataaaaaacgagtggtaaacttcagaaatgagctaaatacagtaaaggattacttagcgttagagggcattcgttttgaagaacgattgaagataaagtataaaatagacccacggtctgaccattttgatataccacctatgatgatgcaaacgttagttgaaaacgccattaaacatggagtttctaacctaatggaaggtggccttattgaaatacagtcgaatgtaaccgattctatgctcaccattaagatcagaaacagtggtcagctgagcggaatccagaaaaaaacaaccaatagaacgggtgttgggttaataaatacgaaggaaaggcttaaattaatctatggcgacaccgccacgtttaatatttataacgaaaatgataagtttgttgtgactgaagtgaaaatacctcagcgcatataattaataatctatgagagcactaatagtagacgatgaaagattggctcgtaaagagctaaccaaccttttgcaggagtttcaggagattgaaattgtgggagaagcggtgaatgctgaggatgcggaagaaaaaataaacagtctgaagccagacttgttattcttagacattcagatgcctggtaaaactggttttgaactattggagtctctagattctgtgcctgatgtagtatttacaacagcttatgatgagtatgcgctgaaagccttcgactataacgcaatggattatttgctaaagccgattgagccagacagacttaaagaaactgtgagtaagttaattgctcgtcagtctaaaaaagaagaagaaaaaacagaaactgagccttctaaactaggccctagcgaccgagtatttgttaaagatggagataagtgctggtttgttaagctagaaaacatccgcttgttcgagtcagacggaaattatatcaaaatttacttcgataattttaagccaatgattcataaatcattgaatgcattagatgagaagttagatgacagatcttttttccgtgccagccgtaagcatattataaaccttacttgggtagaaagtattgagtcttggtttaacggaggcttaatggttgtactcagaggaggagacaaagtggaagtaagccgtaggcaagctgcccgatttaaagaaatgatgagtttataactcgttaaagaaaacctcgcgctcgcgaggttattgtgtgtgtttattggccctgacgttacgcgtcagggtttttttgtggtcaattcttttaatgaagctgtagcctaaaagcaacaactttcaataaccctaccaacctaaaattgattaaaccataaaaaaccacttgtaaataccaatttttataaagtacttctctgcctgttctgaaagacacacctgaaagacctcacgtttattggaacaaaaaaagcgacccgtagaggccgctttaaatgttttcacaacggaataatccttattgtgactagttctcaaattgtatttcaatctaaaaagaactttttaaatataaaatagcacatcatgaaaaagatttgagggcttgatctgggaaccaatagtattgggtgggcgcttattgaacaagactttgaaagtaaagcagggaaaattagtggggcgggtagtagaattatacctatgtcccaagacatattgggaacatttgaaacaggccagtcatattctcaaaccgctgaccgcacacattacaggtcaataagaaggttatatcagcgaactaagctaagaagagagagacttcatcgaagccttaatgtactgggatttttacctgaacactacaaaaacgagattgactttgaacaaaggaaaggtcaattctaccctaataaagagcccaaaatagcctattacccagaacaagtagccagtaaagtcaaataccaatttctatttaagagctctttcttagaaatggtcgaggactttaaaaggagaggctataatggagcaataccttatgattggaccatctactatttgagaaagaaagctctagaaaagaaaatagaaaaggaagaattagcttggttactattaaacttcaatcaaaaaagagggtactatcaattaagaggggaagaggaagatactaactccaataagaaagaagaattctatgaattaaaggtaagcagtgttgaacaaactcatgacacctcaccatcaggcacttagtataatgttcaccttcaaaatggctgggtttacagacggaaaagcaaagattctctaaaagactgggaaggtttaaacaaaaagttcatcgtcacaactcacctgaatgcagatggtagtgaaaaattggataaagatggaaatgtatctcggagctttcgcgctccaaaagaagatgattgggggcttgtgaaaaagcgcacagagtctgttttagaaaaatctgggcttcatgttggtgaatttatttatgaaagcttattagaaaaccccgaacagaaaattagaggtagccttataaagacaattgaaaggaaatattacaaaaaggaacttgaggctattcttgataaacaaacatcctttcatagagagcttaggaatgatgcgttatataaagaggctactctagaactataccctaaaaattcagctcacagatcaaacatcaagcaacgaggcttcaagtatttattcatagaggatatcattttttaccaaagacctcttaaaagccaaaaacacctaattgctcattgccaatacgaaaaacgaacctataaaaacaatggtggagaaaccattgaagtttcactacagggagcaccaaagtcccatcctagttttcaagaatttcgtatttggcaattcatttctaatctccggttttatgacaaagaagaaatcgttgaaggacaagaagttagtattaccgaaaagctattgaaatcagattctgattttgctgaactttatcattggttatctcaccagagagaggttgaccaaaataaaacactaaaatacttcacacagaaaaagctcattccaaagcaaaagaaggataatccaacaatccgatggaactttcccgaagataaaaaatatgaaatgggtgagtttaaagctcaattattatcaagactagaaaaagtacgcaactgccaacccgataaatttttaacccaaaagaatgagcttgacctatggcatataatttactcagttaccgataagaccgaatttgaaaaagcacttgtaacatttgcggaaaaaagagagcttgattcagagtcgtttgttgaaaacttcaaaaaatttcctccatttaaaaacgattatgcctcgtactcattaaaggcaatcaaaaagattctaccccttatgagaagaggtaaatactggaaagcagaaaacctaggacctcaaaccttacagagaattgaaaaaatcgttaatggcgaggcagatgataaaattagcattcgcgcgagaaaattggcgttgcacctaaacgacaccaaaagttttcaagggctacccacttctttagcctgctatgtggcttataatagacattctgaaaatgaggaaaatcagaagtggcagactccttctgacattgacaaatacttaaaagatttcaaacagcatagtttaagaaaccccattgtagaacagcttattacagaagccctgagagtggtaagagatatttggaaacattatgggcaagggcaaaaagatttttttgatgaaatccatgtagagcttggtagagaaatgaaaaaccctgccattaagcgtaaaaaactttctcaaaagattcaagaaaacgaaaacaccaattacagaattaaagaagttctaaggaacctaaaggagaacaatatagatgctaaaccctactctccaagccaccaagagatacttaaaatttatgaagaaggggtttaccaatcgatagaaaatgtcgaagatgagatagagaaaatccgcaaaaataatacacccagttctaaagatataaataggtataggctttggctagaacaaggctatatatctccttatacaggtgaagttattccattaagtcaacttttctcgaatcagtatgaaatagaacatattatcccaaggtcaaggtttttcgatgattccttagccaacaaggtaatttgtgaaagtagtgtaaatgcccttaaggataacaaaacagcactcgagtttataactaaccatgggaatgaaaaagtagaatttgctggaaaaacagtagaaatattaagctcagataagtatacggaacattgtaaaaggtatttcaagcggaaccgaacaaagctgaaaaacctattaagttatgatgtgccagaagggtttatcaatagacagttaaacgatagtagatttatcagtaagtatgtgagaaaccttcttagcaatattgttcgggaagaagaggagcgagaagccatttctaaacacatactaaccataccagggtcaatcaccagtcagttaaagcaagattgggggcttaatgaaaaatggaatgaggttgttactcataggtttgaaagactgaataatttaacgggcacaacagactttggcttttgggacaataaaatcaacgcatttagaataactgttccgaaagaactcagcaaagggttcaacaaaaaaagaatagaccataggcaccacacattggatgcattagttattgcagcatgtaccaaggatcatgtaaactacattacctctcttaacacagaaagaaataaccacagcctagtatccaaactaagaaacactaaaaaagtgctgatcaatggtaaagaaaggagaatagccaaggcctataagcttccttggtcttcttttcctcttgatgccaagcatcaattagaaactactgtcattagttttaaacaaaacttgagggttattaacaagagttctaacaaaacttggcaatggagaaatgttaatggagaacaaaagaaaaagcttataccacaaaccaaaggagatagttgggccataagaaaatccatgcataaagccacggtttcagccaaagttgaaagtgttggaaagggtaaaatcaaaactaccaaccgaaccccgctcggtgagatcaagggcgaaaaacatgttgaaaaaatttatgatgcaaggatacgtgaggtaatcattccaaaccatctaaataagtacttagatgaaaaaggtaagcctaattatgaagctgcatttagccagtcgggaataaagcaactcaatgagaatatagaagtactcaatgagggcaaaccacacgcccccatatacaaagtccctttgtttgaagttggtagtaagttccctgtttctgaggatgcaaaatcgcctaaaaaccaaaagtatgttgaggcagataaaggcaccaacctgttttttgccgtatattggaacgaagaaaagcaaaaaagaaattttgagactgtaccactccaccaagtaattgtacatcaaaaacaggttgcctctttgcctactgaacaacgaacctcagtaccgattaagccggaactaggtctcttcctgttttctctttctccaaatgacctagtttacgtacctacagaagaagagatagaaaacccacatttagtagaccttaaaaacctttctaaagatcaaaccaaccgtatctataaaatggtaagctcaacaggcaatgagtgtcatttcattccacatcatatttcgaggcttattatgaaatataatgctaagcaaaaagtcggtgaatttggaagtctgaataaggcagagaaagctataacgggtgaaacaattaaagagaaatgtttaaaaattcagataaactctctaggtaagcttaaaactgaaagaatcgcataattagaggacaactttaagctttccaagggtgtttaaaagagcctctaaagccataaaacagaagcacacatgcaaacagaaaagttatatcatatttataaccatgccaatggtagcgaaaacctttttcgggagacagagaattacctttacttcttacggcagtgggacaaatacattagcccaatagccgaaaccttagcttactgtttaatgcccaaccattttcattgtttggtgctaataaaaaaacaagaggagattgaagcaacttttggaaagttcgaaactttccaaaagctagagtacctcttgagcaaacagtttgctaattttttcagtagctacacacaagcttataataaaagatacaatcgaaaaggaagccttttcgcacctaacttcaaaaagaaggaaattacctctaatgattacatcaccaaggtaattgcctacatacacaccaatccaatccaccacaggtttacccaagatttaagaaagtggagctttaccagctattcgagcatgctctctactaactctacaaaattagctcggacaatggtactcgattggtttggtggtaagaagccattcgaggactttcaccaagcttatataaacacgattcccggtgaagaaatgaatatttaaaaaataagcttttcaaaagcttagagctgttggaaagttcaaacgaataagcctatgataaaacgtacactcttatttggtaacccggcccacctttctacaagaaaagagcaactagtagttaagtaccctgatgatgatcaaaagaaaaccatgcccattgaagatattggcgtagtgcttttggagcatccacaaattaccattacacacacgctaattagcaagctcttgggtaaccaagttgctataattacctgcgatgctcaacatttgcctcaaggtttaatgcttaacctgaatacccatcataagcaggtagctcaaatgcgacaccagctttcggcaactcaagtattaaaggataggctatggaaacaaacaattcaagctaaaataaagaatcaggcagcactgctaaaaatgaataacattgctgctgaaaatatggagagatgggccagcaaggtacagaatggcgaccctgaaaactttgaaggtcgcgcagcagcctattattggaaatgtctatttactgatcttattcaaaactttaaaagagggcgatatgaaggtgaacctaacaacttactcaattatggttatgccattctaaggggagccatagctaggtctttaatgatttctgggctactaccgaccatgggttatcaccatagcaatcaatacaatagttattgtttagccgatgatctaatggaaccttaccgtccatttgtagaccaattagttttagaattgataagaacagaagatagctataccgaactgacaccgtcactaaaacaagacttacttaaggttccagttctcgatgtaattctgcacgtcgtagactacgaggacttcgcgtgggccgtcggcgacaatggcggg

SEQ ID NO: 1456 - DNA, 7665 bp, synthetic construct
  source 1..7665: mol_type = other DNA
  misc_feature 1..7665: note = Synthetic
aaaaaggtaaccataaataaaaacctcagctggattggtacaaacgcattctcgggctgccctatcaagtggaccaagataaaagggaagaacaacgactttttcgttaaagacaaccatttatacgccaaaaataggaacagaatatactgagcaactcacaagttatgagtacttttgcaaaaaattaccattatgtttcataaatacctcatttctttaagcctgttgctgccctgcatcaatgctatggctgagaatgtaaccaaaagcgtaacttctactagtgttaatacccttaagacccaactgcctatggccgaatggggaacaattaacgaactcaccattacaggtccgatgggcgccgccgatatttcctttttaagcaatgtggctaaggcgaccaacaaccttaaggttttgaacctgtcgggagttacagatttgttggaaatcgagaaaggtgcgtttagcggcattaaaagtttagagtcggtatcgcttcctgcaagtttgaacactatatcagaaaaggcgtttatggactgcaccaacctcagctccatcagtttttccgaagggctcaccaccatcaacgacagggcgttctgtaacgattccctgttgacctcaataactttcccttctacgctgggcgatttaaacgtgaccgccctcgacggttgcgacaacctgcaagagatcaaggtgacacccggcaaccaagtttactcttccatatcgggtgtactttacactatggacaaccccaccatcataaaatatccggttgcgcgtgtcgacgaggagtttaccatacccgacggcaccaccaacattggcgacaacgcttttgccaactgcaaactgctgaaatcggtagaaatgcctgaatcggttaagtcgataggcaaaaacgccttcctcaactgtaagggatttacaaacgtgctggtaggtgacggtgttaccaccattgccgattttgcctttttgggttgcgaaaacatggtggctgtagctttaccaaggtcattaaagaccattggcgacggcattttctccagatgttgcaacatcacttccatccgctgtgaagccgatgtaccgcctacctacagcccactcatcaacaacccgtttgttacagaagatgcaaccatctgctccatcaacctcgccacttgcgttttaagcattccggctaaagcgcgaaccaaatacgaagaggctaaaggttggggtaccttcgctaacatcgaaggctttcaagtaggtaaataacgatattctaacttgctttttagaagggcgtgcaacaatgcacgcctttttttgtgctgttgaagaatgaagggggaataaaaaagcagggtgagttgccccaccctgaatgttttcacaacggaatcatccttattgtgaattgctttaaaattcactacaaatatataacttcagaattgaaatttcaaagctttgctgatatattttgaatcctaactacaaataaatcgattctgtcttcacgaacgcagaaaacgacatacgctatcatttttttcgttatagtgttgaattataacgaacttttattaatttcaagtactaaacatgaaatgaattgattaaatatatgaaaaacatcttaggattagacttaggtaccaacagcattggttgggctatgatagaaggcaaggttgaagaagggcaaaacagcctgactcccgtacagattaaaggtgcaggctctaggattattccaatgacccaagacgtactgaccaactttgcaaaaggcaaagcaacgtcacaaacgaaagatcgtacaaaatttcgtggaactagaagacttcgcgaacggcaactactaagaagggacaggctgcaccggattctcgacctcatgggctatctgcctgcgcactatgctgaacagatagacagatacgggcacattttggacgagaaagagccaaagttggcgtggtttcaagacgaaaccaaggcttggtgcttccttttccaagactctttcaatgaaatgcttgccgacttcgctaagaaccaacccaatttagtggcaggcggtaaaaaaataccctacgattggactatttactatctgcgtaaaaaagcactgacccaacccatctcaaacttcgagttggcatggttgctccttcatttcaaccagaaacgtggctattatcaactgaggggtaaagatgacatgccggaagaaagcgagaacaagaaggttgaatatcttgttgctgaagttgtacacgttgaagaagataaaaacgaaagcagcaaaaaggacgaaatctggtataacgtgcatttggacaacggtatgatctaccccagaaaaagcaagcaaccccttgacagctgggtagggaaaaagaaggaatttatcgtcaccacaactatacaaaaagacggcacctcaaaaccctccttttctgctccaaaggaagacgattggggcctgatgaaaattcgtaccgagaagaatatcgatgcatcgaaaaaaacggtgggtgcctacatatacgacacgctactcgacaaccctgaccaaaaaatcattggaaaattggtgaaagtggttgagcgcaaatactacaaagacgagttgaaacaaattttggaaaaacagcgtgagttccataaagagttgctcgacaagaaactatgtgaacaatgctacgagaatctctattcccacaatcctgatcacaggaagtcgatgttggcgctttctgaaaaacgcggtgaagggtactttacaaccctgtttatcgatgacatccttttctaccaaagaccgctgaaaagcaaaaaatcgctgatttccgattgtcagtacgaataccacacttacaggaaggacggtaaagaggtgagagcctaccaaaagtgtattgccaaatcgcatccgctctttcaagagttccgtttgttgcaattcttgaaaaatctacgcattatcagacgcgaggattgggaatacggaacaccggaaggcgaactctttccaaggaaccaataccggacggacattgacataaccaacgaggtgctcaacacggaagagaagtgggagcaactctacaactatctgaaccagaagaaagagataaaaatgaaggacctgctctcgtggccggtcttgaaactgggtaaaaatccggaaaagttgtaccgctggaactatgttgaagacaaaacatatcctggtaacgaaactcatgcccaaatcatctcctatttggtgaaagcgggtattgcctctaacgctctaaccgaagaagatgagtatctattgtgggagattctctactccgtaaacgcaaaagacgaacttgaaaaagcgttagaatccttcgctaaaaagcatggatttgacggaacctttgtggatgtcttcaaaaaaagccctgcattcccaagcgaatatggttcctattcggcaaaggcaattaaaaagttacttccgctcatgcgtttcggcaacaaatggaacgaggacaatatctgcacttcaacgaaagaaagaattgaaaaactcataactggcgaattcgatgaaaagctgagcgataaaatacgtgaaaagattggaaacgaacttggcaattcgcacaaagacataaaagacttcaagtttatgcctctttggcttgcctgctacattgtttatggcagacactcggaagcccaagatgtaaacaaatgggagtcgcctgaagacattgatttgttcttgaagcagttcaaacaatactctctccgcaatcctattgtagaacaagtggttttggaaacattgagaactgtacgcgacatttggcggtactacggttctatcgatgaaatccacctcgagatgggacgcgacctcaaaaatccggccgacaaacgcaaagccatgaccgaacgcaacataaagaacgagcaagacaattaccggatcaaggctttgttgacagtccttgccaacgaacttaactacgagaacgcacgcgatttctcgcctagccaacaagaaattttacgcattttcgaggaaacggctattgaaagctacaaggcaacggaagggaaaggcgaccttccggaacacattaagcttattattgagaaattcaaagttattgacgagaaaaaaagaccgacaacgtccgatgtcaaaagatatgccctatggttagaacaaaaataccagtcgccatacaccggccaaccaatacaattatctaggttgttcacttccgactatgagattgagcacgtcattccacagtctcgttacttcgacgacagtttcagcaataaagttatatgcgaagctgcggtaaacaaactgaagagtaatatgcttggtttggagttcatcaagaaattccatggtcaaaaagtggaaatcggtaacggaaaattcgtcacaatcctttcggaagacgactataagaaactggttgacgaaaaatacaagtcgcctaacttgaaaaccaaacgcaacaaactgctgatggacgatattcccgacggatttattgaaagacagatgaacgacagccgctacatcagcaaactggtgaagggactgctctcaaatattgtacgtactacagattccgaaggcaacttggagcctgaggctgtttcgaaaaaccttatcactaccaacggtgccattaccgatatgctgaaaagggcttggggtgtaaacgatgtctggaacaagattattctgccacgtttccagcgtatgaataagattgatcctgaacatacctatactgccatttcggctcaagggcacgagattccgtcaatgccggcggtataccaatatggcttcaacaaaaaacgtattgaccaccgtcaccacgcaatggatgccattgttattgcctgtgccaaccgcgacattgtcaactacctcaataacgacagcgcacgcgatggtggcaaacgccgttacgaccttatgcacaaactctgtaacaaaaagaaggattccgacggctatgagcgtatgccacgcctaccttggtctggtttctgcgacgacgtttacaacactttagaaggtatcattgtcagctttaaacaaaacctgagggtactcaacaaggccaccaacaaatttgtgcactacaacgaggaagggaagaagattgttgactgccagaaaggtgtaaactgggccgttcggaaatcgatgcacaaagatactgtctttggtttggtcagcctcaggaaagagaaaacggtgaaactgaaagaggccctttctagattagaccgggtcaccgacaaagacctgcgcgacaagctgaaagaacttgtggctaaacacttcacagaaaaccaaattaaagtgcactttgaggagcacaacgatgtttggaaagatgtagacacaaagaaaattcctatctattattacacggaagaagaaggaaatgaacactactatgcaacaagaggaatgaaagatttagtttcagactttgataaagtaaaaacattagatgaagcaaaaaagaaaatagagaatattaccgacattggtattcagaaaattttatggaaccacattgcacgttgtgaaaataatgtggaatacgcgttctcgcctgaaggtatcgacgacatgaactcacatattgtggaattgaacgatggcaaaccacacaaaccgatttacaaggtaagaaaatatgtaaaaggagaatataaatttgcgatcggaaaaagaggaaacaagaaggctaaatatgtagaaagtgacaaaggaaccaatctattttttgctatatataagggacaagaagcagatgactttaactttgtaaccattccatttaatgaagtactgagaagacaacaacagcatctaagtatttcagatgagacagatgaaaatggaagaaatttacaatgtattctaagtccaaacgatttagtgttactgaaagacaatagtacaaacactaagaggattttcaaagttgtcagcgtagcaaactaccaatgtcactttatacctaataacgtatcatgtcctatagtagaaaatgtagaatatacacctaaaaacaaattcgaaaaagacgatgtttcaggattaatgataaaagcacactgtgtgcctataaaagtagaccgcttaggccatatagtgtctatagataataagcctgtagatcatgattaagaaaaccctctatttcggcaatcctgcttacttgtcttttaaagacgagcagttggtcatacgccaagaggaaacgaacctggaggggcagaaaagcgagtacaaacggactattccgattgaagatattggcattatggttttagaccacagccaaattacgctgacttctgtcattcttaccaagctattggaaaacaatgtggctctggtgacttctaaccaaagccacatgcccttcgggttgttccttcctctggaaatgaactcaacacagcacgaacgcttcacacaccagctggaggcttcgcttcccctgcgtaaacaattgtgggcacagaccattcaacagaagattaggaaccaggctaccgttttaagccaaattacgggcgaaagttgcaaaaatatgctggtgatggccgacgctgttaaaagtggtgattctgaaaacaaagagggacaggcggctgcctattactggaaaaggctgttcgaaaaacagtaccccaacttcacacggcaacgcgatggcggacaacccaacgcactgctaaacttcggctatgccattctgcggggaataatagcaagggcactggtttccagcggattgttgcccaccatgggacttcaccaccacaaccgctacaatgcctactgtctggccgacgacattatggagccttaccggccttacgtcgaccaagttgttttgcgctgtgtaaggaccaccagcgtatttgaggaagaaatcaccaaagagcagaaagtgatgctgctgggtattccaaccctcgatgtgaaaatagacggcaaacgtagtccgctaatggttgcggctacgcaaacagccgcatcgctctacaaatgtttcagcggagaaatcagaaaaatcagctatccggttatggaaacagaagaataagcagcatgggtgtacttagcgaccgttttaacgagtatagagttatgtgggtattagtctttttcgacctgccaactggcactgctaccgaaaggaaggcggctgccacatttagaagcaaactgataaaagacggatttaccatgctgcaatactccatatacgttcgccacagcagcagttgggaaaacgcagatgtgcacgaaaaaagggtaaaaaattttcttcccaaatacggtagtgtttgcattctgcaactgaccgacaaacagtttgggaacatggtgatgtataccaatgccagtcctactcctcccccatctggtggcatccaattagagttgttctaacaaacagatagaaaagaaaaagacggaccgctggtccgtcttttctttttagtatatacccatttttaatttctattttcacctttaacctattgtttcacttttacttacaccaaatacggtgtatataccggtttaaaggt

SEQ ID NO: 1457 - DNA, 7560 bp, synthetic construct
  misc_feature 1..7560: note = Synthetic
  source 1..7560: mol_type = other DNA
aaagcattcagttttccaaaagacggcattttactttataaaagacggcattttacattgtaaaaggttatctattgcaatgtaaaagatatgattttattgatgtccggtaaataactacaatgttttattcctaattaattctaattgtgcctccattacaactatctctttttgattagcgggcttgattttaaaatccaagcgatactgccataaaatcggaagtatcgctcggatttaaatacattattaggttttacctgaagcaataattattttaaaactttgtattaattaagaaaaaaacactatctttgaaaataaaaaaggcgaagataaaatctccaccttgaatgttttcacaacggaataatccttattgtgaattgctgaaaagcgaagcaaaggtaatgataatttctcgtataaacaatttttttaataaaaaagtaaatatgaaaaaaatattaggcttggatttgggaaccaatagtataggttgggcagttgtcaacggtgatgttgacaacgagggacgaatacaattaaataaaatagaaagtgcgggaagcagaattattccaatggatgctggcatattgggggattttgacaaaggcaattctgtatcgcagacaaaagaaagaactggatacagaggaacaagacggttgagagaacgctacctgttgcgacgtgaacgtctgcatagagtcttggacgttatgggatttctgcctaagcattatgctgagcaacttacccgttacggaaaattcctcaatggaacagagcccaaacttgcatggtttaaggacgataacggcaaacaacaatttttgttctcacaatctttcaatgaaatgttgaaagagttttatgctgttcatcctgaattggtggaggaaaacaagaaaataccatacgattggacgatatattaccttcgcaaaaaagctttgaatgcccctttgaaaaaagaggaattagcatggctgttgcttaatttcaaccagaaacgaggatattatcagttgcgtggagaagaagacgaacagactcacaacaaacaggaggaatatatggtcttgaaggtcatcagagtcgaggctactgaagataagcgtggcaaggatatatggtataatgtatatcttgaaaacggaatggtttatcgccgttcaagcaagacatctattgatgattgggtgggaaagaccaaagaatttattgtcacgacactacttgacgataaagggcagcctaaggtagacaaggaaggacaggtgcgtcgttcgtttcgtgcaccgcaagaggatgattggggattattgaagaaaaagactgaagcggatattgaaaggtctggcaaaactgttggctgctacatttatgattcgcttttggcaaatcctgcccaaaagataaaagggaaacttgtacgtgttgttgagcgtaaattctacaagcaagagctgaaggctatactggaagctcaaaagcagtttgttccagaattgcgagacaaagacttatatataaaatgtgtggaggaactttatccttccaatgacacatatcgaaacaatataagccaaagggacttcgtctatctgttgatggatgacattctgctttatcagcgtcctttaaaaagcaaaaaatctttgatttctgattgtcaatttgaggatagagtatataaggacaaagaaactggcgaaataaaacatattggcataaagtgtgtctcacggtcacatcctcgatttcaagagttccgtctgtggcagtttatcagcaatctccgcatctatgaacgcagcaaaatcgttgatggaaagcttaaagtagatgttgacgtgaccgaaactctactgaaggatgaaatcgactatgaacgtctgtttgaatttctcagtagtgtcaaggcaataaaacaggacactctgttctccaagttcttcaagatgaagaaacagaacggtgccttcgcttacagatggaattatgttgaagacaaggaatatccttgtaatgaaacccacgagatgattgtgtcacatattaaaaaagcgggaatagatgagagtttccttaccatagaaaaagaagaaatactgtggcatatcttatattctgtttccttcaagcaacagttaagaacagcacttggaacatttgcggaaaagaatggattggataaagatgcctttacagagcaatttataaagacaccaccatttaaaagcgaatacgccgcctattccctaaaagcaataaacaagctgttaccactaatgcgaatgggaaaatattggagtgcagacaacattgacgccaagacaaaagaaaggataaaccatattatagacggtgaatgtgatgatgatataaaaaacatcgtgagagaaaagtctataaatttgctttccgtcgaccatttcaaaggcttacccttgtggcttgcctgctatgttgtatacaaccgtcatagtgaaaccgcagatactgcgcggtggaaacgtccggaagacattgacaactatctgagacatttccgccaacactcgttaaacaatcctatcgtagaacaggtggttatggaaacattgcgcacggtaagggatatatggaaaaaagaaggacatatagatgaaatccatattgagatgggacgtaacatgaaacttccaaaggagaaacgtgctcaaatgacacagcgtataatagaaaacgaaaatacaaacataaggataaaatacttattgcaggagtttgccaatcctgatatgggcatcagcggtgtccgtccctattctcctgctcagcaagaactgctccatatatacgaagaaagcgcattggattctgtgaaagataaagagcctgacattgtggagcttatcaataagttgagtaaaatagagaataagccatcacacaatgatgggttgcgatacaaactgtggctggatcagaaataccgttctccttatacaggtgaggcaatctccttagcccgtctgtttacatcagaatatgagatagagcatgtcatcccccagtcacgttattttgataactcgtatgccaataaagtgatatgcgagtcggaagtaaacaaacttaagagcaatcttcttggttatgaattcattatgcaacatcatggcgagaaggtagaactttcatccggtcgaactgtcactatattcgagcctcaggagtacgagcgttttgttaaagacaattattcgtcaaatcctcataaactcaagattctgattatggatgacataccagacgggttcatcaaccgacagctcaatgacagccgatatataagcaaattagtaaaagggctgctttccaagattgtgcgtgaagaaggtgaagaagaggcaacttcaaaaaatgtcattgtttgtacaggaggtgtaaccgaccgtctgaaaaaggattgggctgtaaacgatatttggaacaggattatccttccacgatttgagcggctgaaccagatgtgcggaaaggaactttacacaaaactcaacacatcaggtcacctcattcccgatataccgcttgagatgcagcgtggcttcaacaagaagcgtatagaccatcgccatcacgccatggacgccatcgtcattgcctgtgccacaaggaatatagtaaaccttctgaacaatgaatcggcaaaacatgattcaaagaccacccgttatgacctgcaacatacagtatgccacaagcaaagtacagatgctaacggcaattatcagtgggtagttaatatgccatggacgacattcccctctgatgtcatggaaacgctgcagcagattattgttagtttcaagcaaaacctaagggtgataaacaaaaccaccaacaagattcaaaagactgtaaacggtaaacacgtgcttgttcttcagacaaagggcgacaattgggcaatacgcaaaccactacataaggagaccgtatttggagaggtaaacttgcgcaagataaaggaagtcggattaaaagacgccatcagtagtcccaatgctattgtagattgtgatttgaagaaaaaaataaaggctatggttgaattaggatatgatttgaaaaaaatcaaagcgtattttgatgacaacaaggatatgtggactgacatcaatccgaagaaaattccagtttactatttcacaaaggagacaaatgacagatattttgcaacaagaaagcccatcgaccaaagttttgaccgcaaaaagatagaaaatagtattacagatacaggaatacaaaaaataatgttgaggcatcttgaaaacaacgacagtaatcctgagatagcattctctcccgaaggaattgtggagatgaacaagaatattcgtacgcttaacgacggtaaatggcaccagcctattttaaaggtccgtgtttatgaacaagctaataagtttgctgttgggacatcgggcaacaaatataaaaaatttgttgaggctgccaaaggaacaaatcttttctttgctgtgtatgaggatgaaaatggcaagcgcagctatacctcaattccgcttaatgttgtcatcaaccgcatgaaagcgggacgtcccatagctgatgaagatggagtgattccaacattcgtgttgtctcctggcgaccttgtttatttaccaaatgaagggaaacaagtatccattgagtcaattgataaaaacagaatatacaaaatggtgagttgttccgactaccaatgttacttcattggaaatactattgcctccccaattgtaaacaagtatgaatttagtccattaaataaagcagaaagggctattaccggagagatgattaaagaaaagtgtatcccgataaaaattgaccgcttgggacaaataataaaaatcggctattgagccacctttgcctatgattaagaaaactctttattttggcaatccggcatatctttcacttcaaaacgggcaacttgtcatcaagttgcccgaagtggaagttaacgcatcgttaagcgatgatttcaaggcacgctctgttgttacaaaacctattgaagacatcgcatacgtggttcttgacaataaacgtataaccatcacaagtggagctatgcaggcattgcttgataacaactgctccattatctcatgtgattcgcaaagtatgcctgttggattgatgttacctcttgccggaaacaccgtgcaaaatgagcgtttccgttctcagcttgacgcatcattaccattgaagaaacaattatggcagcaaacaattcaacaaaagattgccaatcagacagcagtcttggagcgttgttgcccgttggtggaaactggttgtatgcgaagatggattaccgatgtcaaaaggggcgatgtgtataatgttgaaggaaaggctgcggcatactattggaagaatttatttaaggcacacgttgataattttatcagagaccgcgaaggtatgcctccaaacaatctgctaaactacggctatgcaatattaagggctgtgatagcaagggcacttgtgtcaagtggcttgttgccaactctcggcatacaccatcataacagatacaatgcttattgtttggctgatgatattatggaaccatatcgtccgtatgtagatgggctggtgttcgacataataattaaaaaagatgtaaacctcgaactgacgcgggaaataaaagcagagctgttagctataccaacccttgatgtagttataaatggacggcgaagaccgctgatggttgctgctagtcagaccacagcctctcttgcacgatgtttcataggagaaattcgccgcatttattatcctgtaatataatcttttatgttttcagaacgttttagtgaatatcgtgttatgtgggtgatggtgttattcgatttaccgactgaaacaaagaaagagcgcaaggcgtcagcagatttccgtaaacgtttgatgggcgatggctttacaatgtttcagttttcaatatatgttcgtcactgcgcaagcatagaaaacgcggaagtacatattcgtcgtgtaaaggcaatattgccagaatatggtaaggttggaataatttgtatcacggacaaacagtttggagaaatacagttgttttatggaaagaaaccatccagtcctaatacgccggggcagcaactggagctgttctgattttcaatcgatgatttaatgcctgacagaataaaaaaaatcccgccacaaaagggcgggactctaccaatatcacagtatttttattttctattttcattcgcatatatttagtaatcaaccactttcaacaaagtatgttgtttttgatactgctaagtagaaacttttcaagcaattcacaaccattttccgcatgttatgatgtttataaagttgtttttgatactgctaagtagaaacttttcaagcaattcacaacgctctttacgctccgcttttgcgtgggaaagttgtttttgatactgctaagtagaaacttttcaagcaattcacaacctggtggtctttttaatgatatgcaggctcgttgtttttgatactgctaagtagaaacttttcaagcaattcacaaccttgtctttcctaatcttttcattttgttgttgtttttgatactgctaagtagaaacttttcaagcaattcacaaccagaagaacctaacaatgtgaaaaaaccacgttgtttttgatactgctaagtagaaacttttcaagcaattcacaacatgctgacttcgttttgcatctcaaagcagttgtttttgatactgctaagtagaaacttttcaagcaattcacaactacgggttcactaatatattcgtcttataccacactgccgcctgaaccatcacgtccttcagatcctctattatctgctcataattactctgtgtgacgttgatgtgctgctctggatgttgcccgtcgtggtcgcccgaagcaaggtgtatgatgcagaatgtgcggtcggtatcgtgtgtggctaccataccgcgctccttgagctttgtcactgcctggttgaacttatcaggagttgtcggcactacttgtaacacgctccagggataatcctttgccgtgaggagtgtctgcccttcctgcttactgagcaggaaggaatgtattttttttgatgttttcatttttcttgtttttgttgtttcggtgattccacacgcacactataagttgtttttgacactgcgaagtagaaacttttcaagcaattgaaaaactccatttaaataagccaaagaactattttggatacaaagataataattatttattttataacaagacaaagaaaaaataaatcatatttataaatacaaatacagacataataaaagtcccaaaacaatatgtttcgggactttttattaacttgaaaattaaattttgcggtgcgtacgggactcgaacccgtgacctcctggttgacaggcaggcattctaaccagttgaagtaacgca

SEQ ID NO: 1458 - DNA, 7478 bp, synthetic construct
  misc_feature 1..7478: note = Synthetic
  source 1..7478: mol_type = other DNA
agatggaaagcaggttagagactggctttatgttgaagaccattgtaaaggaatagatatggttattaataaaggcgttttaggagaagtttataatcttggaggatttaacgaagaaactaatataaatattgtaaaaatgattatagatatagtaaaaaaaataataactaataatgaaaatttattgtgcattttttacttatcaaggaagataagatttatgaaaaataaatgctcaaaatcaatttaaatggactacaacgaatatataacgacaataaatgtgttgaaaaacagaaaaaaatgcctgttcattgcaaaaaatggtttcaattttgctaaattcaaacatctaatttgaacaaaacgcttgtcttgatttaaaccaaacaaagtataatttatatgaacttcgatagtatttaaatttaccacaaaaaaataaatttaacctattggtgatctatataactgagaaataagggcataaaaaaaagcgaggggcctaagtcccccactttaaatgttttcacaacggaataatccttattgtgatttgcttcaaaacgtattacaaatataatataaaacacatataaaaaaaatctacatgaaaaaagttttaggattggatttaggaacaaatagtattggttgggcattaataaatgaaggctcaaatgatgaaaagtctagtattgaaggactaggaagccgaattataccaatgtcgcaagatgtaatgggtaattttgataagggaaactctatttctcaaacagcagaaagaacaaggcttaggggtgttagacgcttaagagaaaggcaacttcttagaagagaacgtttacatcgagtattgaatataataggctatttaccaaaacattatagtaagtctattgactttgagaaacattttggtcaatttagacctgatgaagaaccaaaattggcttacaaatacaatgacataactcaaatgaatgaatttatcttccatacatcatttagtgaaatgttggaagattttaaacttcaccaaccaaatttattgagtgatggaaagaaaatcccttatgattggacaatttactatttgagaaagaaagcattaactaaaaagattgataaagaagagtttgcttggctactgttacacttcaaccaaaagcgtggatattaccaactaagaggtgaggatgaagatgataaacaaactaaaaaagaagaatattactcactaaaagtggttgatgttactgcagaaaacggtagtaaagtaaaaagggatgaaatatggtacagtattctacttgaaaatggctggatttatagacgcacaagtaaaacgccattagattgggttggcaaggtaaaagactttattgttaccaccgattatgacgaaaatggcgaggtgaaaaaggacaaagagggaaaggagaaacgttcattcagagcaccattggaggaagattggaccttggtgaaaaagaaaaccgaagctgacctaagcaaaagtaacaagagtgtaggaagttatatttacgacacattattacaaaatccaaatcagaagattcgtggacaattagttagaactattgaacgtaaattctacaaagaagaactaagagcgattctaacaaaacaaaaggagtttcacattgaattaagggataatactttatatactgaatgtatagcaagcttatactcaaacaacgacgcacatagaaacaacgtttctaatagagatttcacctatctttttctcgacgacataatattttatcagcgtccgctaaagagcaaaaaatcgctcattagtaattgcccttacgaaacaagaaccttcctacgtaatggtgaaaagcagatagaagcattaaaatgtattgcaaaatcaaacccattatttcaggagtttcgcttgtggcaatttctaaaaaacctaaaaatttacgcgcgcgaaaaacttgtggacggaagattatgtactgatgtaaatgttaccgatgaatttttaaaaacagatgaagattggactaatttattcgagtggcttaatgaccgaaaagaaataaaacaagatactctgctctcttcttacttcaaaattaaaaaggcaaaaggagaagataaactaccattcagatggaactatgtagaagataaagagtacccttgtaacgaaacccatgcccaaataattagcagactaaataaatgctctattgcatcaaatgacattttatcttttgaaaaggagatggagttatggcatattctttattctgttgaagataaaattgaagttgaaaaggcacttaaaacctttgccaccaaaaacaatctaacaggtgaattctatgaccaatttaagtccttccctccgttcaaaaaggagtatggagcttattccgagaaagcaataaaaaaattgttgcctctaatgagaagaggcaaatattggaatgaggataacatccatcctcaaacaattgagcgtattaacaaaatcattaacggtgaatacgatgaaaaaataaaaaccagaattcacctagaattagagtcttataataatatcaacaattttgtcaatctaccgctctggttggtatgctatattgtttatgaccgccacgcagagtctggtgatgtgcaaaaatggcatacacctacagatattgaacgatttttgaaagaagatttcaaacaacactctttgcgtaatccaatagttgagaaggttatagccgagacattacgagtagttaaagacatttggatacaatacggcaatggagatagaaatttcttcaaagaaatacatatcgaattgggacgagagatgaagaatccagcagataaacgcaagcagatgactcagcaaatatctgataatgagaataccaatttacgtataaagtcactgctaattgagatgctcaacgacaacgaagttgagaacgttcgtccctactctccgagtcaacaagaaattttaaaactatacgaagaaggcatcctcaactcggagatagagattcccgatgatatattaaaaatttctaaacagaatcaaccgtcaaagagcgaactcgtaagatataaattatggctcgaccaaaaatatcgttctccctacactaatgaagtaataccgctaagcaaactatttacttcggcttatgaaattgagcacattattccgaaagcaagatactttgacgactcatttagtaacaaagtaatttgtgaggctgaagtaaatacggacaagggaagctacacagcctttgaatacattaaggcaaatggtggaaaaataattgatttaaattttggaaaaaaagtcaaacttctcagactagagagttatgaagattatgtgaaaaacaatttttcaaagaataggagtaaaatgaaaaagctgctaatggaagacattccagatgatttcattaacagacaattaaacgacagtcgctacataagtaaagtggttaaagccttattatctaatattgttcgagaagaaggcgaagaagaggcgacttcaaaaaatgtattatcgaccaacggaagcattacaaccaccttgaaacaagattggggtttaaatgatgtttggaacactattgttacgcctcgctttgtaagactcaaccaactctcaaacagcacaaactttggtgaatggataaacaaaggtggaaatagagtatttcaaacaaatatgcctttagaacttcaaaaaggatttaataaaaaacgtattgaccataggcatcatgcaatggatgcgcttgcaattgcatgcgctacgcgaaatcatataaactatttaaacaacgaatcggcaaaggctagcaaaaacgagacgagacacgaacttaaaaacctattatgttttaagcaaaaaactgacgataaaggtaactacaagtggattttcaaaaaaccatgggagacctttacccaagattctaaaacaagtcttgaaaaaattattgtaagtttccagcaaaacctaagagtaataaacagaaccaggaatacttatcagaaatggggcttagaagcagatggaacaaagaaaaaacgcaacgaaaatcaaaaagaaaaaatcaattgggctattcgcaaaccaatccacaaggacacagttggtggtttggtaaatcttagattcaaacaaacagtatcgctatctttagcaattgataagaaagagtttattgtaaacaaagagttgaaagctcaaattaaagaattgttagctcaggggaatgataaaaagaagattgttgaatattttaaaaaacaggattataaactaaacgctatagatatatctaaacctgagatctactatttcgacaatgaaaatatagcttcacgtgttaagatagatgactcttttgacgaaaagaaaatcaaaagtattacagatcatggtattcaaaagattttgctaaatcatttgaatagtgacaaataccaaaatcagaaagatgaatcaggaaaagttattgtaccaagcactctagccttttctgctgatggtattgacgaactcaataaaaatataacaactttaaacaatggacgctttcaccaaccaatctataaagttcgaacctttgaacccaaaggaaataagtttgctgttggtgttacgggtaacaaaaaagacaagtatgttgaaacagcaaaaggtactaacctatattttgccgtttatgttgatgaagagggaaagcgtatttatgagtctattccactaaatattgttattgaacgccaaaaacaagaaacatctcccgtacctgaaattaatgaaaagggagccaggttacttttttatttatcaccgaatgatttggtttatgtgcctagtattgacgaaatagacaatccatcattagtaaattggaatgatttaacagaattacaaaatctgaaaatatacaaaatggttagctcttcaggcacacaagttttttttaatcaagcaattgtagctagtcccattgtaaataaagttgaattttccgcactcaataagatggaaaaatcggtcgatggtataatgataaaagatgtgtgttggaaattaagtgttgatagactgggcttcataagaaagattgcaaaataaaactgtaatttctattcacggggtgactttgagtcaccccgtgaaaaaactaaataaacaccgcaatttctgacaaaacgaagaactagatcaaacaaataaattacaaacccacaaaacccctaaaccatgcaatttgaaacagaatacatctaccacatttacaaccaaggcaataaccgccaacgtatcttttttagcgacgaaaactatctctattttattgaaaagatgcgacagcatttactgccgcattgcgatatactagcatggtgtttaatgccaaatcattttcatttaatggtgagagtaaacacattaataattgatattcaagatagtgacggggtgacttcgagtcaccccgtcactaaacagcgttcttttaacgataacattgccatccttctccgctcttacactagagcaataaataagcaggagaaacgcactggctctctctttcgcgaagccaccaaagccgagtgtcttaacaaacccgatggtataacacccgcatttttcaatacctctcaaggtactcttatacaagttcatgattccaatgaagattacccgaatatttgttttaattatattcatcaaaacccattgaagactaaattagtaacgaatgctgaagattggcaatactcatcgtatcgcgatgtaatggggatacgaaacggaacactcattaatcgggagctgattaatgaacttggattattaaatattgtagcatattgacggggtgactttgagtcactccgtcaataaacacccaaaataattaaaccaatgattaaacgaaccctatattttggaaatccggcctatttaaagtgccaaaatgagcaaatggtaatcgacttaccaaatgcagagcagttatccgacaaagaaaaaaaaataacagtacccatcgaggatattggtgtagttatacttgaccactctcaaactactattacccatcacctcattcacaaactgctcgaaaataacacagctctcataacctgcgacgactctcatttgcccgtaggattaatgcttaaccttaatggcaatacattacagcaggaaaagcacgacgctcaaatttcggcctccctaccccttaaaaagcaactctgggcacaaaccatcgagattaaaatactcaatcaggctgcagtgctaaaaaagctaggcaaacccattgataatatgctctattgggctaaaagcgttaaatcgggcgatgcggccaatcacgaagcccgtgcagctgctcactactggcaaagtatgttcccagcagaattcgaatttaggcgagacgccgatggattagaacccaataatctttttaactatggctacgccattttaagagccataacggcacgagcacttgtaggctcgggattattaccaacttttggcatctttcaccgaaacagatataatgcttactgtttggccgatgatataatggagccttacaggccctacgttgataaacttgtactgaagattattaataaaaagcagcccccctttgaacttacccgtgagataaaagctgaattactaactattcctacccttgatgtggtgataaaccgccaaaagagccccctaatggtggccatgcaacaaaccacttcctcattagcgaaatgctatgcgggcgaacaacggaaaatagcctatcccgaaatgtaacagaattatgaacaaccgctttaatgcttatcgaattatgtgggtactagtattctttgatttgccaaccgaaacaaagaacgagagacgtttagcgggtctttttcgtaaaaacttaatgaaagatggctttgctatgtttcagttttccatttatgtacgtcactgccccactaaggaaaatgccgacgtacacatcaaacgtgtcaaaagctttttacccgatacgggtcatgttgtaatattttcgataaccgacaaacaatttggtatgatggagctcttttataaagccaaaccggaggcccgtggcgaaattccacaacagttatctctcttctaaaaaacaaaagaggttagaattaaaaatcctaacctcttttacttgttcacacccaaactgaaatccattttttatttcaaaatcaacacacaattatttgatttacaatttattgaccccacctatgttgtatttcagtgtgtcaaagatacgttttgaaagcaaatcacaaccatttacataattaatgataatatccattgttgtatttcagtgtgtcaaagatacgttttgaaagcaaatcac

SEQ ID NO: 1459 - DNA, 7368 bp, synthetic construct
  misc_feature 1..7368: note = Synthetic
  source 1..7368: mol_type = other DNA
aataccgatcctctttcaaaaggtatacctgaaccgtttatggaggtgtacttgaaatatccggaggaaagaagaaaaatgctactagagcaatgtcaaagtgcaatgtgcagagcattatttaacaattcacttgcacaagcttattgggcattatttgatagtgtttatacatcaattattcagaatcctgataaaaatatcaattatattgttgattcgattccggatgaagtgttagatgcgtgtacggattttgatgcattttcattaaagtattttattgccaaaattaaggagggggtgtcaaaatgattatacgaaaagtggctgttggtaacagtgaagaagcctttattgaagatactctttcagaagggctaaatatattactgagtgatgataatgataaaggtaaaactattattattcaatctatgctttatgcacttggaaataagcctattttcccgaattcattcaattacaaagattttgtttattatcttgaatttgaacataatagtgaaatatatattattgtgagatctggagatgaatatgttctaaaatactctgataaactaggaatttttgaaggaatgtcagagttgaaaagattttggaataacaatatttttcagctgcctatgattccatttcagggtgaaaaaagaattgttgatatggaactgtttgttcaattattctttgtgggtcaagatagcaaagatacatcgactatttttaatagtggattctaccataaagatgactttagaaatatgttgctctcatattccggtgatttttcatcagagatcacgcctaaagaaataataaagattaaagataaaattagaaagttaaaggctcgaagaaaagaacagttaaacttgtctgatttttataagacagttgcggttgcaccagagtatttgagcaaaattaaagatagagatgcgtttaataaacgtgttgatgaaatggactctataacggatttgattaccgaaattaagaaaaaaaggaatcgcttagctgccgaaaaatcattatggaatggaacattaaaagaacttaattcattgaataggaatattaaagtgggtgaattacgctgtatggattgtgattctaaccatatagcttataaaggaacaagtaaatctaaatattcctttgatatttcgacaccgttgatgagaaagcaaataatagaatctataaatgagaagatttctgattttacagaagaaataaaaaagtttgattttgaaatacaaaagcaacaagaggaactcaactctttgatggataatgaggatataaccatagaaaatattgttgcatataaaatgggatacaagagtgttgctgatattgaacaaacaatagacgatattgacaaagaactcgaacaatatgaatgtactctcaaagttggaaaaagcttttcggatgaagcaaaagaggaaagagaaaaattctatggtcgttttatgtctttaatgaatgagaaaaagaagcaaatagatatagaaagcgaaaaggaatacgaggatattttcacaaaacgaggcacagttgtttctggtagtgaagaaactgtattctatgtttcaaaattgttggcttctgttgaaatgacagatcatgattgtccaattataatggattcttttagagctgaagatctttctacagataaagaaaaacgtgtgttagaattgtttggcgaattaagaaatcaatgtattttaacaaccacattaaaaacagaagaaataggaaaatatgaatttctttttcagaattcttttaatgaaatgctggcagattttgctaaaaaacaacctgagttagttgcaatggggcgaaaggttccttatgattggacaatttattatttgcgaaaaaaggctttgagtgagaaaattactaaagaagaactggcatggattcttttaaactttaaccaaaagcgaggatattatcaattgcgtggtgaagaggaagaagaaaaaaagaatagattggaggatttttatgcgttgaaagttgtagaagtagaacaaacagacgataagaaagggaaggatatttggtataatgttcatttagagaatgggtggatatatcgtcgaagtagtaacgttccattggattggaaagataaaattaaagaatttatcgtaacgacggaactaaatgaagatggtaccccaaaagtggacaaagatggttgtgtgaaacgttcttttcggatgcctaaagaagatgactggaagttgcttaaaaagaaaaccgaagcagatattgaaagaagccataagacaataggatgttatatttacgatactttgcttcaaagcccccagcaaaaaataaaaggaaaattagtccgaacaattgaacgtaagttttataaagacgagttgaagctaattttggataaacagcaagcttttcacccggagttgcaagatagagaattatataaagcctgtcttgatgtactttacccaatgaatgtggctcacaaaaacaatgtggctaatcggggatttgtttatttgttcatggaagatatccttttttaccagcgaccgctgaaaagtaaaaagtcactgattgataactgcccttatgaagaaaatcaatatatagatgtgactacaggtgagattaagaaggcgccaattaagtgcattgcaaaatcgcatcctctctatcaggaatttcggttgtggcaatttattgctaatatccgtatttatcaaaaagagaaaaaggtggatggcaaattattgacggatattgatgtcactacagaatatttaagttcgaaagatgattatgtagcgttgtatgaatggctttgcgttcgaaaggaaatagagcaaaagacttttcttaagtatcccgcatttggcttgaaaaaggagattgaaaattataggtggaattatgtagaagggaaatcatacccttgtaatgaaacccggagtttgattttacattatttggaaaaagcaggtatttcttcaacttttttatcaacaaagatcgaagaatcgctgtggcatatactatattctgtagaggataggattgaattagaaacggcattacgaacatttgcttctaaatatcagctatcatgtaactttgtggaagtattcaagaagtttccaccttttaagaaagagtatggtgcgtactctgcaaaggcaataaagaggcttttgccattgatgcgaatgggaaaatattggaaagtggatgctattgatggaaatacggcagaacgtatagagaaaatactttctggagaatgtgatgagaaaatacttaataaagtccgggagaaaactattcatttatctgaaacttctgattttcaaggattgccattgtggttggcatgctacgttgtttataacagacattcggaggggaaagaagttgcgaaatggaagtctccggaagatattgatatttatttgaaatcatttaagcaacattccttgcgcaatcctattgttgagcaagttattactgaaacattgagggtcgttcgtgatatttggaaacgagtggagcagatagatgaaattcatgtggagttaggacgagaaatgaaaaacccgtccgagaagcgcaggcagatgactgaacggatgcttgagaacgaaaatgctaatatacgtattaaggctctgcttacagagtttatgaatcctgaatatgagatggaaaatgtcaggccttactctcctagccagcaagaaatacttcgtatttatgaagatactgttttgaatggggcaggagacatacctgaggatattgagattatattgaaaaagttcaaggagaatgacataaagaagcgtccgggaaagtccgatttcttgcgatataaattatggttggagcaacagtatcgctcaccctatacaggagaaattatacctttaggaaaactgtttactacggcttatgagatagagcacgtaatacctcaatcccggtattttgatgattccttcagtaataaagttatctgtgaatcggaagttaacaaactgaaagacaatatgcttggatatgaatttataaagaagcatgctggtgaaatagtagagctgggttttgggaaatcagtgaagattttttcagttgaagcatatgagcggtttgttggagagaattattataaagcagggagtaagaagagtaaattactgatggatgatattcctgagaaatttatagagcgccaattgaatgatagtcgttatatcagtcgggttgttaaaggattgttgtcgaatgttgtgagagaggaggatgcgaatggcgaatatgaatcagaggctatttccaaaaatgtgattgtatgttctggtagtgtgacagataggcttaaaaaagattggggagtaaatgatgtttggaataacattgtgtattctcgttttgaacgtttaaatcgtttgacagaaagtcagcaattcggacattgggaaaatcgggaaggaaagcgcttttttcaaaccgaactacctttggaatatcaaaaagggtttagtaaaaaacgtatcgatcatcgtcatcatgcaatggatgctatcataatagcctgtgctacccgtaatcatgttaattatttaagtaatgaatcggcttctaaacatgcccggatcgctcgttatgatttgcagcgtatgttgtgtgataaatctaaggcagatggaggaggtaattataagtggattatacagaaaccttgggcgacgtttacgcaagatgtttatcgtacattacttgatataatcgtcagttttaaacaaaatctgcgggtaataaacaaaatgacaaactattatcaagcttatgatgatgctggtaaaaaggttttcaaaaagcagaagaaaggagatagttgggcaattcgtaaatcaatgcataaagacacggtgtttggtcaggtaaatttgcgaaagataaaagaagtaaggctttctgttgctttggaaagtccagaaaaaatagtagataagaagattaaagagaaagttttacagttatttgcatatcaatatgataagaaaaagattgaaaagtattttaaggaaaatgcttccttgtggaaagaggtgaatcttgctaagattcctgtttattattttacagatgaatcttctgaattattggtagctgttcgcaaaaatttggatactggttttacagaaaagaaaataagagaatctgttacagatactggaatacagaaaatattattgaatcatttgagtaataaaggggataagcccgaattggcattttcgccagatggcattgatgaaatgaatcggagtttagtaatattgaatggtggaaagcctcatcaaccaatatataaagtccgtgtatgcgaacctttaggcaataagtttaaagtagggacaaatgggaataaagcggctaaatatgtagaggctgctaaaggaacgaacttgttttttgcgatttatgaaacagatgctggaaagcgtacttatgaaactattcctttgaatgtggttattgaaagagaaaaaatgggttggcttccagttccggagaagaataataagggggaaaaattattattttggttatctccgaatgatttggtttatttgcctacagaagaagaattgatgagtagaatactatcggataaactagataggagtagaatctataaaattgtaagttttacagggaataggttgtatgcaattccttataatgtatccaatatgatttgggataagaatgagtatactcaattaaataaagtggaaagtacagatatgaaagaatcaataaaggagatttgtatgccaattaatgttgatcgattaggacatataactgaaataattataaagtaggatgagcagtataaaactatttcaagataagaaaattcgttctgtatgggatgagacggaacaacagtggtatttttcggttgtagatgtagtagcagctttaactgatagtgttaatcctacagactatttgaagaaaatgagaaaaagagatgcatcattagctgcctacctggggacaaattgtccccaggtagaaatgatgacagaaagtggtaagagaagaaaagtattggctgctaacataaaaggcttatttcgtattattcaatctatcccttcttccaaagctgaaccatttaaactttggctggcacaggtaggatatgaccgtatacaggaaatagagaatcctgaattggctcaagaacgaatgaaagaactttatgagcaaaaaggttatcctaaagattggattgataagcgtctaaggggaattgctattcgacaaaatttgactgacgaatggaaggaaagaggtattactgaaaagagtgattacgcaatacttacagctgagatatctaaggcaacttttggcttaactccttctgaatataaaaagtataaggggttgatgaagaagaatcagaatttgcgtgatcatatgtctgatttagaacttatttttacgatgttgggtgagcgtgtaacaacagaaatttctcaaaaggaaaaaccggatacgtttattgagaataagcaggttgcacaaagaggaggaaatgtagctggagttgctcgtgaacaagcggaaaaagaattagggagaagtattgtatctaatcagaattttttgcttggttctgaattggatacaagtgaacctcaattgcctttcgatactgatgacgaataggggatagatgcttaattagaatttaccatgattaaaaagacgctttattttggaaatccagtgtatctttcattaaagaatgcacagttagtaattaaacttccggagattgtgaaaagtgagtcattgccagagacatttaaacagcaatcggaagtaactaagccaatagaagatattggaattgttgttttggatcataagcaaattactataacttcgggagtattagaagcgttattagagaataattgtgctgtaataacctgtgatagtaaaagtatgcctgtaggtttaatgcttcctttatatggaaattcaacccaaaatgaaaggtttaggatgcagctggatgcttctcttcctttaaaaaaacagctatggcagcaaacaatgaaagcaaagatagaaaatcaggcttcagtgctatatacttgtaaaaaagaggaagtaaagtgtatgaaagtttgggcgaatgatgtgaaaagtggtgatcctgataatttggaagctcgtgctgccgcttattactggaagtgtatgttttcggacaatgaaggg

SEQ ID NO: 1460 - DNA, 7279 bp, synthetic construct
  misc_feature 1..7279: note = Synthetic
  source 1..7279: mol_type = other DNA
  variation 6763..6901: note = n is a, c, g, or t
tggcatcgcggagacgcttacgactttttaaaatgcattaaaactattactgtactgatatacaattgaatacaagtgtaaaggaagagcgtttaagaccaatcatttcctaattaggatggtgcaaattacatttactataacagtattaacccccaacacaaaaggaaagtaatccaaatacagcgaagacgtatgaatttgacttataatatctaatcgttggaccatggttcaacgatatctcaaccatggtccaacaataagtagaccatggtccaacgaaagattgacccaggtccaacgattagttattcgtattgttcgtaattaatcttcgtttatataatggttaaaggtaacaaggaatatgactataaattaggttgttgcaattgatctattacgtgaataatggatcaaaagtgaaagataatttgtaaagtgaaacataaagtgaaggatattagtagaaaagtgaaggatatttattttaatatttaggataactatctgtaatctagttggatgagtttgcaagtgaaggaagtgaaggatattttcgcaaacttattgagaatttgatacacaacaaaggcgagttgccccgccttagttgtaaacacaacggaataatccttattgtgattagcttaaattgtatgtagcaaaaataatgtttattatttaatttacaaataaatatggaaataatttgtaaaattaattctattgattagttttacaattgacactattattttgtagaattaaattgaaaaccatgaataaaattttaggacttgatttaggaacaaacagtattggatgggctgttgtgcagaaagatgagcaaggatcttatgaaaaaattattaatgctggaagccgcatcattcctatggatgcagaaaccatgaaaaatttcaataatggaataacacaaacccaaacttcagaaagaaccaggttgcgtggtgtaagaagattgcttgaacgttcattgttgagaagagaacgtatccatcgtctattaaatactatgaactatcttcctccccattatgccgaaaagatagattttgtaaatagattaggaaagtttattggagaagaggagcctaaatatgcttacatggtagatgaagatggaaagttccaatttatatttaaagaatcttttaacgaaatgctgaaggatttccaggacaaacaaccagaattggtactcaataataaaaaagtgccttacgattggactatatactatttaaggaaaaaagcattggatagagctatatccaaagaagagttagggtggattattctccaatttaacaataaaagaggttactaccaacttagaggtgaagaagatgaaacactcaaggagggtaaaaaagaggagtattttgccctaaaagtaattcgggttgaagcagatagctcatctgccgggaaaaaaggagaagtgtggtataatgttctattagaaaatggatggatttacaggcgtacaagtaaaatacctttagattgggaaggtaaaactaaggagtttattgttacaacggatgtagacgaaaatggaaatgctttaaaagataaagaaggcaaagagaaaagaaaatttagggctcctgcagaaaatgactggactttactaaaaaagaaaacggagtctgatttagttaaaagtggaaagactgttggtacttatatatacgatacgcttttgagtagcccggatcaaaaaattaaaggaggattaatccgtacaatagaacgtaaattttataaatcagaacttattgcaattctgaataagcaaaaagaattccatccggagttaaaagataaaactctttacaataaatgcgtagaagaattatatagaagtaatgaatcacgaagactctctttatcaaattatgattttacacgatttataacagaggatgttattttttatcaaaggcctcttaagagcaaaaaatcactgattgaaaattgttcattcgaaagacgttactatctggatccaattacaaaagaattagcttatgcacctattaaatgtattgctaaatcacatccattgtttcaggaattcagactttggcagtttattaaaaatctacgaattatcgaacgtgaaaaaatagtaggagataagctgatgtttgaccaagatgtaactacagagtttctccctacccagaatgattatgttattctttttgattggttaaatgaacacaaggagattgatcaaaaggctttgctaaaatatcaggcatttgatttaaagaagaatatagataagtaccgctggaattatgtagaaaataaatcatatccttgtaatgagacccgtgctttattgaagacaaaactaaataaagcaggaaatatttcatccgaatttttagataatgatacattagaatcattatggcatattctttattctgtagaagataaattggaaattgaaaaagcactaacgtcttttgcgacaaaaaaagaattgagtgaagagcaaacagtagcttttgtcgaacagttcataaatattcctcccttcaaaaaggaatatggatcttattctgcaaaagcaattaagaaattacttcaactcatgcgtatgggaagtcgctggtctgaaaacgaaatagcagaatcaacaaagggtcgaatccaaaagctgattgacggcgaatgcgatgaatcaataaaaacaagaacaagggataaagctttaaagttaaatgaaataaatgattttcagggtttacctctatggcttgccagctatattgtatacgatcgccattcggaatctggtgatgttatgaaatgggaaactcctgaatatattgattattacttaaaacatgtattcaaacaacacggactccgaaatccgatagtagaggttgttgttgttgagacattaaaggttgtaaaagacttgtggaaaacctatggctcttttagtgaaattcatatagagttgggaagggaaatgaagaatcctgccgataaacgtatcaggatgacaaaccaaaatgtagaaaatgaaaatacgaatttacgaataaaagcacttttagcagagcttgccaatcagaaagacattgaaggtgtaagaccatattctccgtcacaacatgaaatccttaagatatatgaagaaggagtcttaaatatgctaacaaaggaagatccggattatgacacaataagtaaaatatcaaaaatggctctaccgtcatcgtcagatcttgttagatataaatgttggcttgagcaaaaatatcgttcaccttatacaggacaggttattcctttggcacgtctttttacttcagaatatgaaatagaacatattattccacaatcccgttattttgatgactcattttctaataaggtaatttgcgagtcggcagtgaataaagacaaagataatctgttggcatacgaatatattaagcaaaatgaaggcaaaataatagagattggtttagggaaaaaagtaaagctgtttactgcagattcatataccgagtttgtccaatcacattatgtgggttctgtagcgaaaaagaaaaagcttttgatggatacaattccagattctttcatagaaaggcaattaaatgatagtagatatattagtcgtgaaataaagaaattattgtcgagtgtggtaagagaaaaagatgaggatgaggctatttctaaaaatgtaattgtatgtacgggagcaataacagataaattaaaaagagattggggactgaatgatatttggaatacaattatttacccacgttttgaaagattaaatcagctaacaaacagtgataaatttgggcaatgggaaaataaacagggaaaaagagtttttcagattgagatgcctttagaattgcagaaaggttttaacaaaaaaagaatcgaccacagacatcatgcaatggatgcaattattattgcatgtgctacccggagtcatgtaaactatttgaataatgaatcagctcattcaaagtcgaaagaaaaacggtacgatttaagaagaaagctaagacatatagagattttggaaaaacaggagctaaaggatggtgttacttttacgaaaaagatcgaggttgcgaaagagttttataaaccttggcctacatttacgcaagatactcttggcgtacttcaatccattgtggttagttttaaacaaaatctgcgtgtagtaaataaagcgactaatagatatgagtgttttgtcaatggcaaaaaagaaattgtaaaacaatcaaaaggagagagttgggcaattagaaaaccaatgcataaggatacagtatcgtcagcagtttctttacgtaaaataaaatcggtacgtcttaataatgcccttgaagattggaaaaacatagttgataaaccattaagaaaagagatcggccttctttattctaagtatggagaaaaaggaagcaaatatattatcaagtattttaaggatagggataataaacacaacggtttggatgtgtcgaaggttaatgtctactactttgataacgattgtgctgcttctcgcgttacacttgatgatacttttaattctgcgaaaattgaatctattacagacactggcattcaaaagattttattaaaacacctgtcagcctataatgagataaaggaaaataaaattattgagcatccggaacttgcattttcagcagatgggttagatatattaaatgccaatataagagaattaaataatggcaagtttcataagccaatcaaaaaagtaagaacctacgaaactcttggtaacaaatttgccgtgggacaaaaagggaataaaaaaatgaaatttgttgaagcggctaaagggactaatctcttctttgctgtctattcatcggaagatggtgctagaagttatcaaacaataccattaaatgaagtggcagaaagacaaaaacaaggattaattcctgttcctgaaaagaatgataaagatgatcacttgttgttctggctttcacctggagatttagtatatgtaccttcaatagaagaagaggggcgtattgttgaggttgagaataatttgaattacatctttaatatttataaaatagtaagttttactggaaacagattatatgctattcaagcatttattgcaacaagcatagttgataaaatggagtattcattgctaaataaggtggaatttacaataaacgaaaatagatctattaaacagtattgtattaaaataaaaatagatcgattaggtaatattttgaatatatgattaagaaaacattgtactttggaaatccggcctatttgagtcttcgaaattctcagttagtgttacgattacccgaaatagaaaagaatgatacggtttccgattcctttaaaaaggagtcggaacgtactattccgatagaagatgttggcgtaattatattggatcataaacaaatcacaattactcatggactgctagaaatgctactcgataataattgtgccataataacatgcgactcttcacatcttcctgttgggttaatgctacctctttgtggaaacacaacacaaagtgagcgattcagagaacaaattgatgcctcaattcctctcaaaaaacaactttggcagcaaacaatcaaatcaaaaattgagaaccaagcttctcttttggaagaaaaaagaaaggtgattgtaaaaaatatgaggatatgggctaatgatataagaagtggagatccggataattttgaagcgcgagcagcggtttattattgggcaaatctatttcctcatattcccgattttactcgacatcgagaaggaattgctcccaactccttacttaattacgggtatgctatattacgtgccatagtagccagatctttagtgagtagtggccttttgccaactcttggcattcatcaccgcaataagtacaacgcttattgtttagctgatgatattatggagccctatcgcccctttgttgataaacttattgttggattgtcagagaaggatttgaaaagtgaaactcttacacccgaaataaaaatgaaattgctatctattcctgttttagatgtaatgattaatggaaaacggagtcctttaatgatcgcgatttcccagactacagcttctctttataaatgttttagtggagaggcaagaaagattagttatcccgaatggggttaaataattttttatattgaatatggaacgattcagtgaatatagaattatgtggatactcgttttttttgatctgccaactgagacaaagaaggaacgtaaaatctataccgattttcgaaagaagattatatcagatggtttcactatgtttcagttttctatatacgtaagacattgtgcgagtaaagaaaatgcagatgttcatattactcgagtaaaatcgatattgccagaaaaagggcatatagggattttatgtataacagataaacagtttgctggcatggagattttttatggtaaaaaagaaacgaaagctcaaccagttggtcaacagcttgaattattttaaagtagtaaatcccactcattgagcaggatttaccaaagaaacatcaactttttttgtttctaatttttggcttaaatatctatgcaacagatagatgtgaacatcctgttgttgctaataagccaaagnnnnnnnnnnnnnnnnnnnnnnnnnnnnnnnnnnnnnnnnnnnnnnnnnnnnnnnnnnnnnnnnnnnnnnnnnnnnnnnnnnnnnnnnnnnnnnnnnnnnnnnnnnnnnnnnnnnnnnnnnnnnnnnnnnnnnnnnnnnttttgcaagctaatcacaaccataacaaatgtcattgattatgaaacaaagttgttgctaataagccaaagatacaattttgcaagctaatcacaactctagtcatggaatgctgattatgtcttttgttgttgctaataagccaaagatacaattttgcaagctaatcacaaccaagtaacgtttatatgccatttatttgtgttgttgctaataagccaaagatacaattttgcaagctaatcacaactgaaaatggcattgggtgttatggagctgtgttgttgctaataagccaaagatacaattttgcaagctaatcacaaccatctgcctcctctttaagatttcgaattcgttgttgctaataagccaaag

SEQ ID NO: 1461 - DNA, 7021 bp, synthetic construct
  misc_feature 1..7021: note = Synthetic
  source 1..7021: mol_type = other DNA
atgcaaaggtacaaaagtttttttttatttattccgttgtagcaggatattttggatagcagtcatgcttctcatccacggacaatatcggtagagccaatttacttgtgttttttgaaaacatcggaagcatactataagaatatctctgtttttcaaaaaccaattataaaaaagaaaaacccaccgttaaaggacgatgggaagggacctaatgtgttcacaacggaataatccttattgtgatttgctaaaaattcattgcaaaattacaaattatttttcattttcaacctttttatcaatatttttttatatttttgcaaaaatagcacgaataataactaaaaccatacatatttatggataaaaagaacattattggacttgatttgggtaccaacagcataggttggtcggtaatcagagctatcaagaatgaagataatgaagaccacgaattctgcgcatctgaaattgtaaatgccggcagtcgtgtaattcctttagatgcagctatacaaggagatttcgcaagaggaaacagcatttcccagacagcagacagaacccgttatagaggcgtaaggagattgcacgaaagaagtttgttgcgccgcgaacgactgcatagagtattgggcattcttggttttctgccgaagcattatcaggagtcactcactcgatatggaaaattcaaggagaatactgaatgcaagcttccttggacaaccgacgaatccggcaagcagcagttcatattcaggcaatcttatgaagaaatgttgcaattgttctggcaagaacatcccgacttgatggagcagggattgagagtgccatatgattggactatctattatctacgtaagaaagccctgaccgaggcaatttctgggcaagagttagcatggattcttctcaactttaatcaaaagcgtggctattatcagacacgtggtgaggaagataatgaggataaaagcaagaaagaggaatattgtgccctgacagttacggatattattgatactcagcaaaagaaaggtaaagacacatggtatgatattattcttgagaatggaatggtttaccatagacctgcacatgaaatgcctgattggattggcaaaacaaaagaattcatcattaccacccaactgaatgaggatggaaccgagaaaacagataaggatggtaatgttaaaaggtcttgcagtatgcctgagaaaaaaaactggggacttatcaaaatcaggactcaagaagacataaagaaatctaatctttctgtgggcaactatatcttcaacgccctacttgccaatcctaaacagaaaatcaaaggaaaattggtgagaacgatagaacgcgatttctacaaagaagaactctgcgctatactgaaacaccagatacaattcattccggaattacaaagtaaggaattgtatgcacagtgtatcaaagaattatatcctcagaatgaagcatacaggacctccatttccaggcatgacttcgtgtacctatttataaatgacattatattctatcagcgtccgctgaaaacaaagaagactctcatctctgagtgtccgtatgaatatcacaactatatagatgaagaaggcaacaaatgcaagaagtacatcaaatgcattcataagtcgcaccctcttttcaatgaattcaggctttggcaatttattggcaacttgaagatatacgagcaacagaaagatgaaaatggtcgaatcattgatgataaggacataacggaatctttcctgcccgatgaagaatcacgtgtatctctgtttgactacttgaatgatattcctggaattacccaaaaggagctgctaacaaaatacttcaagataaagaaacctaaaggaaagaatgccgaactgccgtacagatggaattacgtgcaggacaaacagtacccatgcaacaccacaaggggagaaattctgtcaagactgaagaaagctgacattgacagttccttcctcgaccgtgatgcagaagaaaaactttggcatatcctctatagcgtttctgacagcaaagaactggaaaaagcattagagaaatatgcacgttcccacggcttggattcttcatttgtagaagtcatgaagaaattcccaccattcgaagctgaatatggcgcatattcaactaaagcaataaaaagactgttaccactcatgagaatgggaagcagatggaacgactgtgacattgacaaagatacactcaccagaatacataaaatcattgatggtgaggtagatgaaagcattacagaacaagtcagggataaagcgtcatcactcaatagcgtaaacgatttccggggacttccgctctggatggcatgctatgtggtctataacagacacagcgaagctacaaatgctgacaaatgggaaagtcctgatgacatcgacagatacctacataccttcaagcaacactcactgcataatcctatagtcgaacaggtcctgaccgaaactctgagaacagtcagagatatatggagaaaatatggccatatcgacgaaatccacttggaaatggcacgtgagatgaagaatcctgcagacaaacgcagacagatgactatgagagccctcgaaaatgaaaatgccaatcttagagtcaaagccctacttgccgaattcataaacccagaattcggcattgacaatgtgcgtcctttctccccaagtcaacaggaactattgagaatatacgaagatacagctctcaatagtgtcgatgaacttgatgatgacatttccgacattctcaagaagtttgctcaacaagagacaaacaaaagacctacccgatcagaaataaccagatacaaattgtggctggagcaacattacatctcgccatacactggacaaactattcctttagcacgactgtttacctctgattatgaaatagagcacgtcataccacagtctcgttatttcgacgattcactatcaaacaaagtaatctgtgaagctgaagtaaataaactcaaagataattctctgggttttgagtttatcaaaaagcatcacggcgagaaagtgacattaagaggtggaaaaaccgtaaaaatacttgaaatggactcctattgccagaatgtagagaaaatctacaagaacaataagggcaaaatgaagaaactcatgatggaggatattccagaggactttatcgagcgacaactgaatgacagtcgttatatcagcaaacttataaaaggattgctctctaatatcgtgcgtgagaaagacgaacaggaagcgacatcaaagaacctcatagtatgcaatggcaatatcacagacagacttaaacgtgaatggggaatcaatgatatatggaatcacataattcttccacgctttgaacgtatgaatgaaatcactgggtctgatcagtttacatcagtaagcgcttctggacacaagatacccgatatgcccctccatctccaaaagggattcaacaagaaacgtattgaccaccgccaccatgctatggacgctattgtcattgcatgcacgactcgtgaccatgtgagccttctaaataatgaagccgcatccccgaaaagcaatcagaacagatatcaactgtcgcgcaaactgcgaagatatgaagatgttctggtaaatagaaatggagaaaacaaaacgatatcagtagccaaggaattcaagaagccatggacgtccttcacacaagacgttgagaaagcattgaatggaatcattgtaagcatcaagaagaatacaagagtgattacaaaaacaagcaactactctcagcgctatgtcgaaggaaagaagaaatatgtatgccagactcaaggtgatggatgggctgtacgaaagcctatgcacaaagaaactgtgtctggcgaagtgaatctgagaatgatcaagacagcgaatctgaaggaagctctcaagaatcctaatagaatcgtcaataaagacctcaaggagaaactaaagaaatttatcactctcgggcattccgaaaaacagataaaagcatacttcgctgacaataaagagatatggagcgacatcgatctgaagaagataaagatgtattactttaccaaggaaacatctgatagatattttgccacaagaaaacctatcgacacttcatttgacaaaaagaagatagagggacaggtgacagataccggcattcagaaaatcatgcttcgacatcttgaacatcacaataacaatccggaaactgcattctcacctgacggcatcgacgaaatgaacagaaacatgagactgctcaacaatggacaattccaccaaccgatattcaaggtgcgcgtctatgaaaaggctgaaaaattcgctgttggacagactggaaacaaaaacaccaagtttgtagaagcagcaaaaggcactaaccttttctttgcagtctatcaagaagcatacattaacaaagaaactggtgaagaagagtacaaacgctctttccgtacaattccattaaatgaagccatagagaaaatgaaggcgaagttaccactcgatgacaaagctcttttcattttgtctcctaatgatcttgtatatatcccaactgagaatgaactctctactggtatcatttcccagccattagaccctaatcgtatttataaaatggtgtcatcttctggttctgactgtcattttattcagcatagagtagcgcaaacaatagttaacaaggtagaattctcaccactgaataaaatggaaagagcgatatcaggagaaacggtcaaaaaaatatgcatacctatatcagtaaacagattaggtgaaattataaaaataggagtatagcttatgatcaagaagaccttatattttgggaatcctgcttatctgtctttacgaatggagcagatggtaataaagttgccggaagtagaaaactccgacaatctgcccgaaacattcagaagacaatcagaagtgacacgcccaatagaagatataggaattgtcattctcgataataagaggattaccataacgcaaggtcttcttgaatccttgctcgataataattgcgctgtcattacatgcgacagcaggcgcatgcctgtaggactaatgcttccattgtgcggaaataccatacaaagcgaacgattccaacagcagatatcagcctcattgcctttacgtaagcaattatggcaacagacaataaaagccaaaatcaccaatcaggcaaaagtcctggctgtatgtagtttggcagagaccagatgtatgagcaaatggagcgaagacgtaaaaagtggtgatagcgacaatattgaggcaagagctgctgcatactattggaagaaactgttttctggaataaagggacttgaaacatttacccgcaatagagatggcatagaaccaaacaatctgctcaactacggttatgccatacttcgcgctgttgttgcaagggctttggtctccagcggtatgttgccaacatttggaatacatcatcacaaccgctacaatgcctattgcctagcagatgacattatggaaccatacagaccatacgtcgatgaaattgtttttcatattgtaacagattacggagcggataatctttctttgaccaatgagataaaagccaagctccttgccattcctactttagatgtcgtcatttcaggaaagcgcagtccattaatggtaggagtcacccaaaccacagcctccctatacaaatgctttagcggtgaatcaagacggatatcctacccggaacgataacctaagaattagatttattatggaaagattaagtgaatatagaattatgtggatacttgtgtttttcgatttgccaacagagacaaaaaaggataagcgtgcatatcaattattccgcaagcaactgcagaaagacggtttcagtatgtttcagtattccatctatgtacgtcattgtgcaagcatggacaatgctgaagtccacatcaaaagggtaaaaacttttgtacccgagtatggaagcgtggctgttatgtgtatcacagacaaacagtttgccaacattcagctcttcaatggttcaaaaattgcaaagatgcaatcacaaccacagcaattagaacttttctaaaactttaacacagaataaaaataattaactgtcaaacatacagaaacgcatcatcctttctgtagtttttcaatagtccggtttagtttacattttagtttacaaacaagaatgtgaagtttactattcagaaatagcaatcttcacattctatttttcgattctacataataacgtatatatctatattccaactaattacatagaatcagatgttgtttaccctacaaaggtacgaatttttcagcaaatcacaacgtgggtgacagcattttttactgtcacctgtaataatcaaatttaaaccaaacaatttttcgtaaagttaaacaacaaacgaaatattcgataccactggggttgtagtgtaaaatatggaaaagcattaattaattttgtagtggctaaatagatgatgatttattatattgtttttcatccattgatgttttatctttgttagcagttggactattcttcagacacttgtctccaattttgcttaaaatcccaagtcttcatctcgggttactctcgcttcgctcggtatagctttctatacaaattttgcttatacggtagattcgagcgattcaagaacaaaaaagtgccaaactacataataaagcatctgtctaaatccaaataatccgttttcaaagaacagtaccaagcaccatagttaaagtcacctaattaactatgaattatcaagcatagctattgcaatataaaagcatagcttttacctcctaataactatgcttttacctcctaataacatagcttttacatagagcacatccccaccctc

SEQ ID NO: 1462 - DNA, 6893 bp, synthetic construct
  source 1..6893: mol_type = other DNA
  misc_feature 1..6893: note = Synthetic
atgttcatagaaagtggcggcaatgacattgaatgaatgtagtttggccttttccactttgttgtaccatcgtgccatagccaatcgagcagcatctttaattgtgttctttgaaaaaatcatccgtagggaatggcacaaaccgtatgcggtttttatatcaggatattcatggaatagtatggcggcacgtacagcctgcctttgagtccaattgtttgcagacttgaaaagcagataacgtgagcgcataagcagctcctttcgcgtgtcgccgttcgcataacggaatggcagatactccttgccttcaagtttggcattttccatctcgtcattggcttgctgtatagcatccaaacggtgccttatgcgcctaaacctccttttaatacacaaaaaagtctgccgataaaggacgacagactagaacctaagagttttcacaacggaataatccttattgtgaattgctttcaaattattgatgcaaatgtaggatttttttctccgatatgcaaaatattcaagcaaaaaaatggccgaatagaaaaagattgcataaatttgaatcgaaaaccccatagaattaactgttatgaaaaatattcttggattagatttaggtacaaatagtatcggatgggctgtaatcagtcatgacggtatgtgttatagtggaataaagtgtgccggaagccgtatcatacctatggatgcagccacaatgggcgattttgacaagggtgttaccaagtccagcgcttcagaacggacacagcagcgcggaatcagaagattgaacgaacgttcattgttaagacgtgaacgtctgcatcgtgtgttggatataatgggtttcttgccagaacattattctcggaatttgactcgttatggcaaattcatcagtgaaaaagtgaaattggcttggactgacgaaggtcgtttcttgtttgatgcatcgtttaacgaaatgttgcacgaattccgctctcaacatccttcattgatggaaagcggtaagaaaataccatacgattggactgtctattacttgcgtaagaaagccctttcatatcctattaataaatttgaattagcttggatcttactcaatttcaatcaaaaacgtggttattaccaattgcgcggagaagaagatgatgaaaaagcttccaacaagtgggaagaatatatgtcattgaaggtgttacgagttgaagattcaggtgaaaaaaccggaaagtatacctggtatcgcgttcatctcgataatggtatgatatacaaccgcaaaagtaatattccccttgattgggaaggaaaaacaagagattttatcgttacgactgaattgaacaatgacggaacgcctaaaacagacaaagagggaaactttaagcgttccttccgttcgccgagcgaaaacgattggactctgatcaagaagaagacagaagccgacattgaaaagtcacagaaaacagttggaacatacatctatgaatcattgttacagaacccgactcagaaaatcaggggcaaattagtgcgtgttgtggaacgaaaattctatcgttcagaattaaaactaatattggaaaagcaatgtcgtttcctgcctgaattgcaagatgctgccctgttgcaagcatgtctggaagagctttatccgcacaacaggatgcatagggatattatttccaataaaggttttacgagtcttttcattgacgatatcatattttaccaacgtcctttgaaaagcaagaaatcccttattggcaattgtccttatgaatggcacagctatgtagacaaaacaaccggcaagacaaagactgtttataacaaatgcatagccaagtcgcatcctctttaccaggagttccgtttgtggcagttcttgtcaaatctgcgtatttacagtaaaggtacatacgagcaggatgtcaccacccgactgttgcccgatcaggaatcgtatgctgcccttttttcatggcttaatgatcgtaccagtatcaagcagaaagatttcttgaattattccggtttcaagctgacaaaaactgaacaaaagaactatcgttggaattatgtagaggacaaaacttatccctgcaacgaaacacgtggagaaattttaaaacgcatattagactgcaacttgcccgaaatattcttgaccaaggagcgtgaattgtcgctttggcatatcctgtattctgtagaagacaaagaacaatataaaaaggcattggaaaaatttgccgagaaaaattccattgattctgctgatttcgtagcagcttttgaaaaaatggcagcatttaaaaaggaatacggaagctattcggctaaagccgtttcaaagctgttgccgctaatgcgcagaggttcgtcttggtcggaaaccgaaatcgacaagaatactcttgaacgtatcaacaagcttattgatggtgaatatgatgaacaactttgcgaacaagcatatgaaggagttgcggggctatccgatgtctcccaatttcaggggcttcctgtttggctggcatgttatattgtttacaaccgtcattcagaagcaaccgacgtttcacgttgggagtctccggatgacatagacaagtacttgtctgattttcgtcagcactcgttaagaaatcccatcgtagaacaagtcgtattggagtgcttacgcactgtacgtgatatttggcgtcaggtcggtcatatcgatgaaatacacgttgagttgggacgcgaaatgaaaaatccggccgacaagcggaagaaaatgacagaaagcattttggaaaacgaaaaggcgaacttgcgagcaaaggccatgctgatggaactgatgaatcccgaaatgaaggtcgaaggagtgcgccctcattctcccggtcaacaagagctgtttcgtatttatgaagaaaacgtcctgaacagcgagaaagtacctgacgacatcacagaaattcttgcaaaattcaaccagacagataatgccaaacggcctacatcatccgaagtgaaccgttatcgcttgtggttggaccaaaaataccgttcaccatatacgggcgaaatgatttcgctaagcaaactgtttacctcggcttatgaaatagagcacattattccacaatcgcgttatttcgacgattcttttagtaataaggttatctgtgaatctgaagtaaacaaattaaaatcgaacttgttgggccacgagttcattaaaaagcatcaaggcgaaaaagtacagttgtctatggggaaaaccgttgaaatactttccgtagaagcttacgagaaattcgtaaacgagcattattcctataaccgggtcaaaaaggaaaaacttttgatggacgatattcccgaaaagtttattgaacggcagatgaacgattcccgttacatcagcaaattagttaaagccttgctgtcgaatatcgtccgtgaagaaggtgaaaaagatgccacttccaaaaatgtaatctcttgtacaggaggcattaccgaccggctgaaaaaagattggggaatcaacgatgtgtggaatggtatcatattgccacgtttcatcagaatgaatgaaatcgacaagaccaacagctatacggccattaatacttcaggcaatatcattcccgatatgccgtttgaataccaacgtggtttcagtaaaaagcgtatagaccatcgtcatcatgccatggatgccattgtcattgcatgcgcttcgcgtaacgttgtaaattacctgaataattcttctgccgcgaaagaatctgaagccgggcggatggatttacgcaacaaactgtgcaacaaaaactatacagacgataaaggcaactataaatggattatcaggaagccatgggaaacttttacgcaagacgtaaaggaaacgttgcaagacatcgttgtcagctttaagcaaaatctgcgcatcatcaataagagctcaaacagaaccctgcattttgaagagggcaagaaaaagctgcaaaagcaaacaaaaggagacaattgggccatacgcaaaccgatgcacaaagacactgtttatggagaagtaaacctgcaacgcaccaaggaagtctctttcaaggaggctttgaagcctgattatgctattgtgaacagggatttgaggaaaaaggttcttagcttgcaggcctcgggatatgatgtgaagcagatgatgaaatattttgaatcagaaaaagatgtctggcaggatgtcgattttaagaaaataaaagtccgctatttcaccaagacaaccaatgaccgctactttgctactcgcaagccgattgacagtagtttcaacaaaaagaagatagaagaaagcattaccgataccggcattcagaaaatcatgcttcgccatttggaaaacatgggtggaaaccccgaactggctttctcttccgatgggttggacgagatgaataagaacatcagggcattaaacaatggccggttccatcagcccgtttacaaggtcagaatctatgaaaaggccgacaagtatgccatcggtgaaaaggggcagaaagctaaaaagtttgtagaagcggccaaaggtacgaacttgtttttcgccatctatgaaaatgagactgttgataaatctacgggtgaaattcttcgtaagcgtagtttcacaactatcccgatgaacattgtaatgaatcgtttaaaacaagggctaagccctgtgcctgccaatgactgtggcaaggatgctaaatatgtgctttcgcccaacgacttggtctatgttcccactaaggcggagcttgaacacggcgttgatatggcctctcttgataaagaccgaatctacaaaatggtgtctgcagatcgtagcaacagccattttgtcaaagaatcggttgcaagcccgattgtcaataaggtcgaattcggaagtcataataaaatgcaatgcgctgttacaggagagatgataaaggaaatctgcatacctctgaaagtagaccgtttgggcaatatcatcaagatgggttaagtgatgataaagaagaccttgtgctttagcaatccggtatatttgtccttgaagaacgggcaaatggttattcgcctgcccgaagtagaacgcaatgacacgttcactgaacaggataaaaggcgattggaggtgacacggccggtcgaggacatcggcgttgttgtgctggatcatcgtcaaatcaccttaacccacggattaatggaagccctgttggccaataactgtgccttgattacctgcgacaatcacagcctgccggtaggtctgttgttgccgctgtgcggtaataccactcaaaacgaacgtttccgtacgcagctggatgcctctttaccactcaaaaaacagctgtggcagcaaaccgtacgccaaaaaatccgcaatcaggcacgcgtattgcaacgttgcggatatgacgacattgggtgtatggaggcatgggccgatgatgtgcgcagtggtgatcccgacaaccttgaagcccgcgcggcagcctactattggaagcacctgttccgaaagcatcccggttttatacgcgaccgggaaggatttgctccaaacagcctgctcaactacggttatgctattttgcgagccgtagttgcacgttccctggttgccagtggcatgctacccacattgggcatacaccatcataaccgttataatgcctattgtctggccgatgacataatggaaccataccgcccatacgtagacgaactggttgttgatatcatttctgaaacaaacgattatgatgaactgaccaagcaattgaaagggcggcttctgaccatacccgttattgatgtcttcatttcggggcaacgcagtccactcatgatagccgccggtattacaacggcttcgctgtataagtgctttgccggagaaatacgcagaatcacttatcccgaaatagtgttctgatgatagaattgtcacggctcagcgaatacagggttatgtggatattggtgttttttgacttgcctactgaaacgaaaaaggatcgcaaagaagccgccaattttagaaagctgttgcaaggcgacggcttttccatgtttcagttttccatctatgtccgtcattgtgccagtagcgaaaatgccactgttcatatcaaacgtgtaaaatcttttttgcccgaatatgggaaagtcggcattttgtgtattactgacaagcagtttggggccattgagcttttccatgggaaaaaggcaaagatgcccaatttgccgggcatccaattagagctgttttaatactgaaggaccaataacaattacttgccggcaaagaaaaacgtccaaaatgataacattaaattgcaaaatgggattcgttgtttcaagcgataggaatgattacaaaatgaaaaagccgcatctgatattgatgcggccttaatgtgtaacatctttttctgattctaaagttgcttgtaatttgctgtaaacgagaatcatgtatggattcaggtgtttatgcacttacaaagataataatttgaaagcaattcacaaccccagcctgtaccgcctccagcgttcccgtggtgtttatgcacttacaaagataataatttgaaagcaattcacaacagagcgtgtgcgtaaagattgggtaactagggtgtttatgcacttacaaagataataatttgaaagcaattcacaactgatgctgctgcggtgttatttccaccagcggtgtttatgcacttacaaagataataatttgaaagcaattcacaacccgcccaaaaaaggggaaatagaaacgttggtgtttatgcacttacaaa

SEQ ID NO: 1463 - DNA, 6800 bp, synthetic construct
  source 1..6800: mol_type = other DNA
  misc_feature 1..6800: note = Synthetic
aaagattaggcgtttatacagctgttgattatgtagacatcttaaaagaacttattgttgattggaagatagaagaagttaaggatttaaatgaagccggcgaaaaagccagagaatacttaatgagactacctgatagactaatcagaatagcagacagaataaaaaccccaaatctagaatataaatttagctggatattataatattacagattatcttcattaaaatgatttaaaccgatatgtatgtatcggtttttttgtttatgaaatttttaccagttattgaaaagccttaactctaattctgttgagttacaaattaatcatcccctgattaaaaaaataaacagcaaaaatattacactataagaaacaaaaaagccccgaagatagtcgaggcgctaaatgttttcacaacggaataatccttattgtgatttgctttcaacatcaaaggtataatttattttttaattacaaatacgggaaaccgtaaactgtaaaaaaaattatttatatatttatcttaaaaattaattaactactatgacaaaacatatattaggtcttgatttagggacaaattctattggttgggcattagttcaacaagattttgaaaataaaaaaggagaaattcttggaatgggaagtaggattattccgatgtcgcaagatattctaggagattttggaaaaggaaactctgtttcgcaaactgcagaacgaacaaaatatagaagtattagaagattacgcgaaagatttcttttaaggagagaaagattgcatagagttttaaatgttttagggtttcttccagaacattatgcttcaaagattgattttgaaaaacgatttggtaagtttcaagaagaagcagagccaaaaattgcatggaaaaatattgatgggcagttttcattcttatttcaaaattctttcaaagaaatgcttgaagattttgaggcaaccggacaaaatttaaaaataacatacgactggacaatttattatctccgtaaaaaagcgctttctcaaaaaattgaaaaagaagaactggcttggattctcttaaatttcaatcagaaacgaggatattatcagttacgtgaagaagaagatgaagataatcctaataaattagttgagttttattctttaaaagttgtaaatgttttggcagatgaacctcaaaaaggaaaatcagacatatggtattctttggttctagaaaatggatggacctatagacgctcaagtaaaacgccattatttgattggaaagacaaaataagagatttcattgtttcaacagatttaaatcatgatggttctgtaaaaaaagataaagatggaaacgaaaaacgaagtttcagggcgccatctgaaacagattggacattattaaagaaaaaaacagaacaagaaattgataattccaataaaactgtaggagcttttatatacgactcactattaaaaaatcctaaacaaaaaattaaagggaaactgattcgcacaattgaaagaaaattctacaaagatgaactcaagcaaatattagaaaaacaaaaagaatttcatcccgaattacaaaatgaagatttctataacgactgtattagggaattgtacagaaacaatgaagcgcatcaactcacattaattaaaaaagattttgtacatctttttctagaggatattattttttatcaaagacctttgagaagtcaaaaatcttctatttcaaactgttctttagaatttagaaaatataaagatgaaaacagagtagagcaaacacaatatttaaaagctgtcccaaaatctaatccttattatcaagaattcaggatttggcaatggatgtataatctaaatatttacagaaaagatgatgaaacgaatgttaccaaagaatttttaaatagcgttgaagacttcgaaaatctttttgattttttaaacaaaataaaagaagttgaccaaaaagctttactaaagcatttcaaacttaatgagaaaacatatcgttggaattttgttgaggataaaaaatatccgtgtaatgaaaccaaaacactgattattaacaagcttgaaaaagtagaaaatatttcagatgattttttaacaagagaaattgaacaaaaaatctggcatcttatctattctataaatgataaaatagaatatgaaaaagccttaaaatcttttgctaaaaaacatggtttagatgaaatttctttctttgaggcttttaagaaatttcctccgtttaaaagcgaatacggctctttttcagaaaaagcaattaagaaattattgcctttaatgaggctagggaaattttggagttatactaatatcgaagaaaattcaagaacaagactagagaaaattcttgatggagaatatgatgaaaatattaaagataaagtaagagaaaaagcaatcaatcttacgactcagaatgatttccaaggattgcaattatggctagctcaatatattgtttatggaaggcactctgaagcatcaattattggaaaatggaattcagcagatgacttagaagaatttttaagagaatttaaacaacattcgcttcgtaatccaattgttgaacaagttattacagaaacccttcgtgtagttaaagatatttggctaaaatatggaaatggtgtgaaagatttcttcaatgaaatccatattgagcttggaagagaaatgaaacttcctgctgaagacagaaaaaaaatcaccaaccagattacagaaaacgaaaacaccaatcttcgtataaaagctttattagccgagatggttaatgatcaatctattgaaaacgtccgtccgttttcaccgatgcagcaagagattttaaaaatttatgaagagggtgttttgaattcagatttagaaattgaagaggatataattaagattagtaaaactgctcaaccttcttcttctgatttaaaacgatacaaactttggctagagcaaaaatataaatcgccttatacagggcaaattatcccattaaataaacttttcacacctgaatatgaaattgaacatataattcctcaaagccggtattttgataacagttttagtaataaagttatttgcgaatcagctattaataaattgaaggataattatataggattagaatttataaaaaaactaggaggaactgtagtagaatgtggaaatggaaaatcagtaaaagttttaaagctagatgaatacgaagagtttgttaaaaaaaattacgccaacaatagaggaaagaaaaacaagctccttttagaagatatacccgaaaaaatgattgaacgccagttgaacgacacacgttatataagtaaatatatctcagggattctttctaatatcgtacgtgtagaagatggtagcgatgaaggtgtaaattctaaaaatatcgttcccggaaatggaaaaattaccacacaacttaagcaagattggggtttaaatgatgtgtggaatgatttgattttaccacgatttgaaaggatgaatcaattaaccaattcaactgattttactgcatggaatgaaaatcatcaaaaattcttaccaactgttcctattgagttttctaaaggattttcaaagaaaagaattgatcatcgccatcacgctttggatgctttagtaattgcttgtgctacaaaagaccacgtaaacttacttaacaatcaatctgcaaaatcagacactaaacgttatgatttaaaaaagaaattgatgaagttcgaaaaagtatgttataaccatccacaaactggtgagaaaatagaaagagaagtaccaaaacagttcttaaagccatgggaaaacttcacaattgatgcaaaaaattcattagaaaaaataattgtgagctttaaacaaaatctgagagtaattaataaggcgacaaattactatgaaagatttgtagaaaaagatggtgtaaaagtaaaagagagagtaaagcaagaaggaataaattgggctataagaaagtctatgcataaagatactgtctcaggtaaagtaaatttaccttggataaaagttccaaaaggaaaaattttaaccgctacaaggaaaagtcttgatacatctttcgatttaaaagcaattaattctatcacagatacaggaattcagaaaattcttaaaaattatttggacttcaaaggtagtccggaacttgcattttctccagagggaattgaagaccttaataaaaacattgaaaagtataatgatggaaaatcacatcagcctatcaataaagttagagtttttgaactaggcagtaaatttcagatcggtcaaaacgggaataaaaaagataaatatgttgaggctgcaaaaagaaccaatttattttttgcagtctacgaagacaaaaatggaaaaagaaattatgaaactattcccttaaatgaagttatagaaagacaaaagcaagggttatcagtagttgatttaaaaggagtaaatgatttttatttatgccctaatgatttggtctatgttccatcggaagaagaaattgataatatcaacaatatcgattttaaaaatatatctaacgaaagagtttataaggttgtaagttttacagggaatagacttttttgtattccatatacggttgcagcaactattgttaataaatcggaatacacccaactcaataaaatagaattcactaaagaaaaagaagtttgttctaagctaaaaatagaccgtctaggaaatatctcaaaagcataatattatggatcgttccgattttctcaaatcattaggtttaggtgccggcgggttaatacttcctaataacagttttattaatacaaaacttgttaaaatatacgacaactatgttagaggattatctcactacgattttagaaaagtacaaaaattaataaaagatggagaccaacttacgcttatacgtgagcctgaaaatatatacgatagttttgctattcaagtaaatctacatgaatatcgtttaggctatattgcggcttatgaaaatattatcctcgctaatatgatggatgcaggggttaatataaaagcttatgttagccagaaagatttagaacgttacccacatgaaggcttagcaatagaagtatttacagaactcattatccctaatgaaaagtttattgatagtttattagcgcaaaacagagctgatgatatagcggatatgtatcgtttaggagaaatttaaaacatattaaaacctattgaaaaactaaaatgataaaaagaaccctatacttcagtaacccagcttatcttaatctaaaagatagacaactacagatagacctcccccatttaaaaactttgggaacagaagaatctataaaattggtacctattgaagatataggtgttatcattttagacaatcagcaaataactataacacatgctagcatcgctgctttattagagaataaagtagcggtaattacttgcgataaaagccaccatccaacaggcatgctcctccctttggatggacatgatacgcaaagcgaacgttttagatatcaaatagatgcctcattacctttaaaaaaacaattgtggcaacaaactgtacaagctaagattttaaaccaggcagcagttttatttgaaagaggaatagcttgcgagaatatgattcattgggccaaagcagtacgctctggcgatccagataactacgaagggcgggcagcagcctattattggagaaacgtttttcctaaaaaattagacttctttaggggtagagacggcgaccctcctaataatttattaaactatggttatgctattttaagagctattgtagcgagagctttagtttcttctggactattaccaaccctaggcatacatcatagaaataagtataatgcttattgcttggccgatgatattatggagccctaccgcccttttatagataaaattgtgcttaaaattatagataatggcgagaatttcttagagctaaatactgctataaaatctcaattattaagtatagccagtattgatgtaagttttgaaaaaggaactagccctttaatggtaggcttacaatataccacagcttcattagcaaaatgctatgagggtacaataaggaaaataaactatcctattataaaagattttgatgccaaaagaataggatatttaaaaagtactgatgatacacaaataagctatgctgctgaaaaaaccacaaaatatgaaagtaaaaaaagtacagacgagcccgaattacctttttaggaaatgcgcttaaaccaatatcgcgttttgtggatattagtattttttgatttgcctacagagaccaaaaaagaaaggcagatatatactcgctttagaaaagatatcatgcgggatggcttcacgatgtttcaattttccatttacctgagacattgcagcagtcgtgaaaatgcggaagttcacataaaaagagtaaaaaaactgcttcctgccaaaggacatatcggaatcatgaccataacagataaacaatttgggatgatggaactgttttatggtaaggaagaaaagaacctgcccagcacaccgcaacagctagaattattctaaaacaaattctagcatttaaattttaaacataaaaaaatccggaagatatacttaccggatttttttaattcctgattttacatttaaactactgatttacaattt

SEQ ID NO: 1464 - DNA, 6761 bp, synthetic construct
  misc_feature 1..6761: note = Synthetic
  source 1..6761: mol_type = other DNA
tcttcatgcgtcaccttcgactccgtgttatcctcattaacacatgcagtatgcacggcaacagcaaaacaacccagcaaggctgttgccaaaacgtgaaaaatcttgtttgttctcataatccttattaatagtttgctatataaatccatcttatttatttggtatgcaaagatacgattaagcgagcaaaaaaacaaaaaaaacttgattattttgttataccgagcaaaaatatcttcgacaaagtcagaggtaaccagtttcacttgaccattgaccatttaaacttttgatgttcccatcgagcctgctctgaacttcttttatgaaggatgatccaaagatgatacgaagtaaacagctctttcccatactcttgccatactgttgagtaagcttaggagcagcttaggagcagcttaggagcagcctaggagcaggcaaggagcaggcaaggagcaggctaaagtatggcaaggagcagattttcagtcatatccaattctataaaacgcaaaaagtccaccgttaaaggacgatggaccggaacctaatgttttcacaacggaataatccttattgtgatttgctaaaaattagtgctgcaaagataaactttttctttgatagtaccaaatgtttcaaaagaaatttgtacttttgtggcataataaccgttggatgggctgtggttaatgcagacgaaatagcccgcgataataacacatcttatttaaaaccgattagcattagttcggcaggaagcagaataattccaatgtctgcagacatcttgggtgattttgagaaaggaaactctatctcccaaactgcagaaaggactaggctaagaatggttcgtcgaatacacgaacgcagtctattgcgtcgtgaaagaatgcttcgcgtattaaaaatcttaggcttcctaccgactcatttcgcaaataagattgatgactttgggaagttcattgatgaaagtgaacccaaaatagcttggacaaaaagagagaacggggagtacaattttatattccaagattctttcaaggaaatgctgaaagactttgcactccaccaacctcaactggtggctgatggaaagaaagtaccatacgattggacgctctactatctccggaaaaaagccttgaatgaaaggatatctatagaggaacttgcatggctattgttgcaattcaaccaaaagcgtggctattatcaattacgtggagaagaagaggacgaagacgacacaaagcgagttgagtttctttctcaaaaagtggtacgagttgaagcttccaatgacaagaaaggtgatgatatttggtataatgtatatcttgagaatggaatgatatacagacgttcaagccgatatgagcttgactgggtaggaaaagtcaaagaattcatcgttattacagatctggacaaagatggttctcccaaaaaggataaagagggaaatgtgaaacgttcgtttcgcatgccaaaggaagatgattggactttgataaagaagaaaacagagtttgatattgaaaacagcaaaaagactgttggctgttatatctatgacaccctattacaaaatcctaatcaaaagattattgggaaactcgttcgcactgttgaaagaaaatactataaagacgaactaatccagattttgagagttcaacaggaattaattccagaattaaaagatacagaactctacaaaagatgcattgaggaactttatccaaacaacgaagcccatcgcaacaatctctcaaaaccggactttgttaatctgttcgttaacgacattctgttttatcagcgcccattaaagagcaaaaagacgcttatagacaattgcccttacgaatatcataaagacaaagatggaaatgtttatccaatcaaatgtattgctaagtcaaatccgcttttccaagaatttaggctatggcagttcgttcaaaacttacgaatcattcaacgagagcgctttgttagtgatggacaactggatttgtttaataatgtagctacaggaaagttgcagacagatgtagatgttactactgaatttctaaagaccgaagatgattacgtaaatctctttgattggctcaatgatagaagttccataaagcaagatacactactcaactcatacttcaaaataaagaaggagaagggcaaggatcattatccctatcgatggaattatgttgagggcaaggagtatccttgtaacgaaacaagggctgcgatgataactggcttagagaaatgcaataatagttcagatgttctaacccacgaaatggaaatggctttatggcacattttatactctgttgaggacaagatagaaattaataaggctttaaggacttttgctgaaaagaatcatctatgtaatacttttgttgaggttttctgtaaaatgaaaccctacaaaaaggactacggctcatattcagaaaaggccattaacaaattgctcccattaatacgaatgggtaagtattggaaagaagagaatatcgataccaagacattggagcgaatagataagatcatcactggtgaatacgacgagacaataaaaaatcgcgttcgcgaaaaatccatctccctaaccagtattgaacaattcaagggcttgcctatttggttggcttgttatattgtctataatcgccattctgaggcaaaagaaatagagaaatgggagaaacccgaggatatcgattgttatctgaatactttcaagcaacactctctacgtaatcctattgtagagcaagtcatcacagaaacgttacgtactgttcgtgacatttggaaaaaagaagcgcaaatagatgagatacatgttgaattggggcgagaaatgaaaaatcctgccgacaagcgaaagaagatgacagaacggattcagcagaatgaaaatacaaatcttcgtattaaagccttgcttatggagtttctaaatcctgaactaggcattgaaaatgtccgtccttactcaccaagtcagcaagatattttgaggatatatgaagaaaacgcactagacaaccttaccaaagaagacacagaatatgagttcgtctcgaagatgtcgaaaacagcacaaccatcaaaatcggatgttatccgttacaaatgttggttggaacaaaaatacaggtctccctatacaggaaatatgattcctttagccaagcttttcacccctgcatacgagatagagcatgtaattccacagtctcgatattttgatgattcttttagtaataaggtgatatgtgaggcagaggttaataagttgaaagatcgtcaacttggctatgagttcatcaagaattgtgcaggtcagattgtgcaattaagtcagggagagagtgtaaagattctatctgttgatgaatatgaaaaacttgtaaaaaacttctatgcaagtgataggctcaaaatgaagaaacttctgatggaagacatccccgatggattcattgaacgacaaatgaacgatagccgttatataagtaaggttgtcaagggattactttcaaatattgttcgtgtaaagcaaagcaatggagagtatgaaacggaggctgtttcaaagaaccttatctcatgtaacggctctgtcactgatcgactgaaaaaagactggggaatgaatgatgtctggaattctattattctgcctcgcttccagcgtttaaatgaattaacaggaaccagaaacttcacaacgctgaatagcgaggggcatgaaataccaaacatgccattagaactgcaaaagggattcaacaaaaaacgtattgatcatcgtcatcatgcaatggacgcaatagtcattgcttgtgctacacgtgaccacgtaaatctgctcaacaacgaagccgcccactctaagcataatgccaatcgttaccagttgcagaagaaactcagacgttttgaaaaagccattaacggttatggcaaagaaattgaagttgccaaagagtttctaatgccttggcaatcattcactaccgatgcaaaacaagtattacagaatattattgttagctttaaacagaatcttcgtgtcattaataggactacgaacaattatcttcattatgatgaaaatggaaagaaaaaatatcagaaacagacaaatggtgatagttgggccatacgaaagtctatgcacaaagatactgtatttggtgaagtgaatctgcgtaaaaagaagaccgtatctctgaatgaagcactccagaaacctgatagcattgttaacaaagacttcaaacgaaaagtaaaggaacttctgggtgaagacagggatgtcaaatttattaaaaagtatgttgaagacaataaggacatttggtcagatattgatgtcgccagaatagatgtttactattttacaaaagacgagaaaaagagaaacggagaacccaaagtacgttattttgctacacgcaaaccacttgatgtttcttttgaccaaaagaagattctagagagcgttaccgatactggtatccaaaagattctcttggcccatttggaggcgaaagacaacaataccgaattggcattctcacctgatggtattgacgaaatgaaccgcaatatcgtggcactaaataacgggaaattccatcaaccaattctaaaagtgcgcgtctatgagaaagcagacaaattcgctataggacaaactggcaataagaataagaaatttgtggaagcggcaaaaggaacgaatctattctttgctgtatttggtaccgaggttacaaataaagaaaatggaaaaactgaaatagcacgttccttccttactattccattaccacttatgattgagtgtcaaaagaggtatggagcaaattggaattacaatatagatcaatatttgagagaaaaagatttagtatctagtgatgcaaaactattatttattctttctcctaatgacttagtatatttgccaacaaaagatgatctatacaagaagacaatgacagttgacaaacgacgaatttacaagttcattgatccaggaatgaatacaggaaactttttaccgtattcaacggctaacgtattattttccataacacattcaaatcaaaaaaagatgggattagcatatcctattcaagatgaatttggagttggtagccagggctcaaaaagtcctcgcgcaattacgggagaaatgataaaggagacttgtgttcccataaaagttgatagacttgggaatattataaagattggatgaagtaccaatagcctatgatcaaaaagaccctatgttttagcaatcctgcatacctctcattgagagatgcccaactggtgattaaacttccagaagtagaaaaagccgaggacctctcagcagacttcaaaaagtctgctgaggttactcgccctatagaagatattggggtagtagtgttggacaacaagcagattacaattacacaaggagcattggaagcgatgctcgaaaacaattgtgcagtcatcacatgtgactcaaaccacatgcctgttggtctactattgtcactagtgggcaacaccacccagaatgaacgattccgagaacaactcgacgcttccttgcccttgcgaaagcaactctggcagcaaaccatgcaacagaaaatcaggaatcaagctgcagtactgaacctctgttccaatgctgaaacgaaatgcatgcagtcatgggtgaatgatgtacgtagtggcgaactacgcaaaatcgcttatcccgatttaacatgattgcagaacgatttagcgaatacagggttatgtggctcttagtgcttttcgatttgccaacagagacgaagaaagacattcgcgaatatacgaaattccgcaagcgtatcatcgaagatgggtttaccatgtttcagttctccatctacgtccgtcactgtgccagcatggaaaatgcggaagtacatcgtaaaagagtcaaggctatgttaccagagtttggcaaagtaggcattatgtgcatcactgacaaacaatttggcaatatagaattgttctttggcaccaagcctcaacaaccgaatgcaccgggacagcagctggagctattttagaatattagaaaaggtgaattccattcttatcgtggaatccacctttcttgcagtggcattttttcttttctaatttcctttgcaacattctggcattcagcaacttttcgtaatcgtagtgtttatgcctctgcaaagatactaattttttagcaaatcacaaccttctcttgttaatggtgaacagattgatgagtgtttatgcctctgcaaagatactaattttttagcaaatcacaacctgccgaggtgatggaagaaatatgcgacaagtgtttatgcctctgcaaagatactaattttttagcaaatcacaacgcaaggtgtaaatgataatgttataaatatagtgtttatgcctctgcaaagatactaattttttagcaaatcacaacttgcgccaatgccgaaaatcacggcgaaaaagtgtttatgcctctgcaaagatactaattttttagcaaatcacaaccaaacatttcgcctttgtagtccttcacgcagtgtttatgcctctgcaaagatactaattttttagcaaatcacaacgtgtagtcaataggtgtcatagtcgtattaagtgtgtatgcctct

SEQ ID NO: 1465 - DNA, 6702 bp, synthetic construct
  misc_feature 1..6702: note = Synthetic
  source 1..6702: mol_type = other DNA
gctcggcgttggcttcgggacggaagatgcggatcttgccatccttgcagcggtaggccttgaggccctcgaaggcttcctggccgtagtgcaggctggatgcagccatgtggatgttgatgctctcctcgctggagacctcgatttctccccactggccgttgcgataccagcaacgcacgttgtagtcggttttgacgtaaccgaatgggaggttttgccaatctatattcatgtgtgttaatttattaggttagtacttgaacatttcgtgttgcggacaaagatacacaaaaaaacaaatatgcaaaaataaaaattttcacctctcattatatatattctacaaacctgaaacctgaaactttgaactttaaactttgaactttaaactttaccaaaaaacaaccgacaaaaaaaacataggggcaggcacaaaaaaaaatgattatccgctaatacccgaaacaccgaggtcgcatctctccgagacgtatgggtagagttgattgtcaatccccagactgcactccgttagtctggggtttttcgctggaatatattttttcatcggtgctcaaaggctgcgggcagattgagattaagcctctccgagactattttcggagctatgcggataatcatgaaaaaaaaagacgacggagtgtttagctccgccctcttgatagttttcacaacggaataatccttattgtgaattgcttaaaaagtgctgcaaagatacaactttttcttaatccgacaaaaaaaatttcgcaatagaaagaaaatgcgtatctttgcacattaaatatacaatcatacaatggctaaaatacttggattagacctcggaacgaacagcattggctgggctgtcgtggacaacgaaaagaagcatatcgatgcagctggcagtcgcatcattcccatggacggcgaccgcatgggcaaatttgaaggcggcggatctgtttcatacacagaagaccgcacaagggcacggggagcacgccgcctgcgcgagcgctacctgttgcgccgcgaacgcctgctgcgcctattgaacatcatgggctttctgcccgaacatttcgcctctcagctggaccgatacgggaaactgcctgccgacaaagagccaaaactggcatggcgcgaaggcaaggacggcaaaccggaattcctgttcaagaactcctttgaagagatggtgcaggaattccgcgcagcagggatagacggcaacctcccttacgactggacagtatactacctgcgcaagaaggctctgtctcgtcctctctcgaaagaggaacttgcctgggtactgctgcaattcaaccagaagcgtggctactatcaactgcgtggaaaacaggacgaactggacactgaaacagaaaacaagaaagacgaaaaggaatattgcgagcttttggtcaccaacgtcgagccgaccggagagaaggacaaaaagggctatccgtggtacaatattaccctcgaaaacggctggatttacccaaggccattccgtaacgaaccagactggaagggtaaaacccggagcttcatcgccaccttcaagctggacaaggatggccaccgcaaagacgagcagccccgattgagcgccccgagcgaagacgactggggactccggaagatcaaaacagaacatgatattaagacatcagggcagaccgtcggggaattcatctacaacacattgcttcacaatccatcgcaaaaaatcatcggagagaaagtccgggtcgtcgagcgtgaactatacatcaatgagttgcaccgcatcctcgacaagcaacgcgagttcatgccggaacttaacgaccggaatctgtacaatcaatgtaccgaagccctgtatccaagcaacgatgcctatctgggcagcatcgccaaccgtgacttcacctatctgctggccgacgacatactcttctaccagcgccccttgaagagtaagaccagcctcatcgccgattgcccatacgagaaacgccacggtaaatccatcaagtgcattgccaagtcgcatcctctgttccaggagttccgcctgtggcagttcctgtcgaacctcagaatctaccataacgatatcgacatcaccaccacactactccccgacaacgacgcctggacctctctctacgaccacctgtccgaaaccaaagaggttgaccaagccgccctgctccgctatttcaaaatagggaaaaaggaaattgcccagtaccgttggaactatgtacccgaccgcaaatacccctgcggtgaaacccgggccacactgcttggaggcattcgaaagaccggacttcccgacagtttcctcaccacggatcgggagttgcagctgtggcatatcctctattccatcgacgatcccacgcagtacaggaaagcccttggcacttttgcagcgaaacagagtctgacggaatccgaatgcgatgctttccaggaagcattccgtcgactgacggtttacaaagaaaaagactatggcgcctactccgccaaggctatcggccgactgctgccactgatgcgtcgagacaaatactggaatcccgatgccatagacagcaagacacgcgagcacatcgagcacctgacaaccggcgaagtggatgacactttgcccccaacggcacgcaaagcactgtcgggcatcaccgacacgggccaatgtcaaggcttgtccacgtggcaggcctgctacctcgtctatggccgtcactccgaggccacagataccaaaccttggagaactccggaggatatcgacacctacctcagcaccttccgacacaactcactgaacaaccccgtcgtggagcaggtcgtcaccgagagcctgcgtgtggtgcgcgacatctggcggcaacacggcaagcctgacgagattcacatcgaactgggccgggagctgaagaagaccaaggccgaacgcgaaagcctggcgcaatccatcgctgaaaacgaagccaccaaccagcgcctccggctgatgcttctcgaactgatgaaccccgactgccaggtggagaatgtgcgcccgcaatcgccgtcgcagatggaactgcttaaaatctacgaggacggtgtgatgcgccgtccagaaaaagacatcttcgaaaacgagagcgagcgacaggccatcgaggacatccgcaaacgcttcgccgccgccaaaaaccggcccacccattccgaggtgctgcgctacaagctgtggctcgaccagaaatacatctccccctacaccggacgtcccatcccgctgggcaaactgttcaccccagcctaccagatcgagcacatcatcccgcaaagccgctggttcgacgactcgctctccaacaaagtgatatgcgaagccgaggtcaaccaactgaaagaccgtgaacttggacacgaattcatcgtcaaccaccacggcgagcgagtgcagctaagccttggcggcacagtggagatcctgtcggttgaggcatacgagaaactggtggcagaactcttctccaacaaccgcgccaagcgcatgaaactgctgctcgacgacataccggaggacttcaacgcccgtcagatgaacgacagccgctacatcagccgcctgatgatgcacctgctctccaacatcgtccgcaccgaggacgaagagggtaaccgcgaggaaagcgtcacctccaagaacgtcattccctgcaatggtgccatcaccgaccagctgaagcgcgactggggcatcggcgacgtgtggaaccgcatcatcctgccccgcttcgaacgcctcaacgcactgacaaacaccaccgactataccaccactaccgccaacggacacaccatccctaccgtccccctcgacctgcggcagggcttcaacaaaaagcgcatcgaccaccgccaccatgccatggacgccatcgtcatcgcctgcactacacgcgaccatgtcaacctgctcaacaacgaggcgtcacacgacggcaaccgacgctacgacctacagcacaagctgcgaaacatcgaatactacattgaccgcgacggcaaccgccacgagaagttcaccgacttcatcaaaccctggcccaccttcaccgaggacacctatcatgtccttcagggcatcgtggtcagcttcaaacagaacctgcgcgtcatcaacaagaccacaaaccgctattccaccatcagcgacggcaaacggacaaccgtcaaacaggagaaaggcgacagctgggccatccgcaagccgctgcacaaagagaccgtattcggagaggtcaacctgcaactgaagaagaaagtacctatcaaacgagccctggaggacatcaacagtattgtcagtcgtgagctgaaagagaaaatcaaagagaagaagcgacttggctataccgacaagcaggtcgccgaattccttgaaaagaacaaagacgtctggagcgaagccgccgatgggaaagtggaggtctactactataccgccaatacgggcgaccgctacttcgccacacgcaaagacctgctctcgctgatgaaagacgccgccaccatccccgctgccgagaaagccattgccagcatcaccgacagcggcatccgctctatcctgatggcgcatatggctgccgaaggtagcccgactgaagcattctccgccgacggattggagcgtatgaaccgcaacatacagcagctcaacggtggacgtccccacatgcccatcaaaaaagtacgcgtcttcgagcaggccaacaaattcagcgtgggccattccggacagaaagccaccaaatttgtcgaggcggccaaaggcacaaacctcttcttcgtcatctacaccaacgagaaaggcttgcgcggatatgccaccatccctctcaatattgttatagaccttcagaaacaacatgagaaggcttggcgtgagcacctgaccgaacgactggtggccgaaggtctgatgtccgacaaagacagtctattgtacattctatcgcccggcgatttggtgtatgtgccaaatgacggcaataaattaaatattgagaaaaaccgaatatacaaagctgtatctatggctggcatacaattcatgtgcatacaccacagagttgcttcaccaatagtcaataaaatggaatacaccacatcaaacaaaatggagcgcgccattacaggcgaaatgatcaaagaggtctgcatccccatccaggtagaccgcctcggcaatattatcaaaattggataggttatgatcaagcgcactctctgtttctcgcatcctgcctacctctcgctgcgcaatggccagctggtggtgaagctggagccgcacgacgacgagccggagaagcaggccaccatccccatcgaggacataggcttcgtggtgctcgaccatcggcagattaccctcacccacggcgcgatggcagccctgctcgacaacaatgcctccgtcgtcacctgcgacgaccgccacatgcccgtgggcctcatgctgcccctcgaagggcacaccgtgcagcaagaacgcttccatgaccagctgaatgcctcgctgccgctgcgcaaacagctgtggcagcagaccgtgcagcaaaagatacgcaatcaggccgccttgctgcaggagttgcatggcgtcgaggttggcaatatgaggaagtgggccggtgaggtgctctccggcgacagcaccaacctcgaaggccgtgccgccgccttctactggagccagatgttcaccaccatccccaacttcacccgtagccgcgagggtgcctaccccaacgccctgctcaactatggctacgccatcctgcgtgcagtcatcgcccgcgccctcgtcggcagcggactcctccccaccctcggcatccatcaccacaaccgctacaacgcctactgcctggccgacgacatcatggagccttaccgtccctacgtagaccgcctcgtggtgcagacgatggccgcgtgcagcgatgtggaggtgaccaccgccatcaaaagcagactgctcaccattcccacccttgaagtgtatatcaatggacagcgcagcccgctgatggtggccgccacacagaccactgcatcactggcacgctgctttgcgggcgaaagccgccgcatagcctacccggagatataatggaccgcttcagcgaataccgcatcatgtggctgctcgtcttcttcgacctacccaccgagaccaagaaagagcgcaaggccgccgccgactttcgcaaacagctgatcggcgacggcttcaccatgtttcagttctccatctatgtgcgccactgtgccagccgcgagaacgccgacgtccacctcaaacgcgtcaaagcagccctcccgcagtatgggcaagtgggctgcctgactatcaccgacaagcagttctccgagatagagctctacatctgcaagaaagaagtggagcccaatgctccgggacaacaactcgagctcttctgacataggattcagaaaacgacctccgcaaacaaaaaatcccgcccggttgggcgggatttttttagcctttgacttattatgaaacattgtacatcacatggttacccatatcgtgatgtcaaagagctattatcaatgtttccttttcaagcaattcacaac

SEQ ID NO: 1466 - DNA, 6565 bp, synthetic construct
  source 1..6565: mol_type = other DNA
  misc_feature 1..6565: note = Synthetic
gcggcggggtgtttaggaggaagggaagttttgtgttgataaggtagggttgatttgagtcaataaggtggtactaataaattatttgaattattaagcacattttttgcacttcttgcatcggaatgaggtttcccctccttttcttttgcggtgaaatattaatttgggcaaaccctaacatgtaacctcaatgatgcaccgaacaagatctgccatttgcgcccagcctttcaattgcaattctccattacttattataaaacaaaaagaatcagaactacaaataaaaaaagcgacttgcgccgcttcgaatgttttcacaacggaataatccttattgtgatttgcttcaaattataccacaaatataaactatatggaaaataatttcaaaattattttaggaattgatgcaggaacaaatagtatagggtggtcattggtgcgccgcgattttgaacgtaaacatgggaccattcttggaatgggtgtaaggataattcccatgtcacaggacatattaaacaagtttggagagggaaattcagtgtcgcaaacggcagaacgcactagaaagagaagcattagaagattgcgcgaacggcaccttttgagaagggaacgcctgcacagagttcttaatattctaaagttcctgccggcccattattccgaggaaattgattttacgagtagaccaggccaatttaggcatgaaacagaacccaaggttgcttacaagaaggtatggcatgaaacaaagaataagtacgagcatgaatttatcttcaaagattcctttaccgaaatgttaaacgatttcaggcagtcgcatccggacctacttgaagataaaaatggcaatcctaagcaagttccttatgactggaccatctattatttacgaaaaaaggcattaactcaaaaaattcaaaaggaagagcttgcttggatactcttgaatttcaatcaaaaacgaggttactaccaagttcgtggcgaagatgaggaagaaacaccgaacaagttagtagaatatcattcactcaaagtagtaaatgtaacagctgatccaccgcaaaaaggaagtttagacacctggtactcactggagcttgagaatgggtgggtatataggtgccccagtaagacaccacagtttgactggaaaggtaaagtacgtgacttcatcgttactacagaacttaatgaagatggaacgataaaaaaagacaaggaaggtaaagagaggagaagttttcgcgctcctggtgacgatgattggaccctgataaagaaaaaaacagaacaagaaatttcccggtctcaaaagacggtgggcgaattcatatatgacactttacttgcaacacccgatcaaaaaatcaggggaaaactaatcagaacagtagaacgtaggttttacaaagatgaacttagactaatattgcagaagcaaacagagtttcatcctgaactcaaagacgaaaaattgtttgtagcctgcattaatgagctatacagaaataatgaaaaccatagcaggcaattgaaagctaaaaattttctttatttattcattgaagacattattttctatcagcgtccacttcgaagccaaaaatcaacaattaacaattgcagcctggaatttcggtattatttagatgatagcggcagtcaacgtactaaatacctaaaagccattccaaagtccaacccatactaccaggaatttcgaatttggcaatggatgtcaaatttagctatttatagaagagatgatgaccttaatgtaacaaacgaatttttatcaaatactgaagaccgggaaagactttttgagttcttaaacaatcgaaaaggaattaaacaaaaaaccctaatcaaatttttattagataagaaaggacttaaaggtaaagaattgaattccgaagtcgagaaataccgctggaattatgttgaggacaaggaatacccatgtaacgaaattcgctcagaaataattaacaggttggctaaggtaaaaggcatacctgctgatttcgtgacaagggaaattgagcaaaagctttggcatataatttattctgtaaccgacaaaacagactttgagaaagcacttaagaaatttgccatcaaaaacaatcttgatgtgttatcctttgtagaagccttcaaacgttgtcctccctttgaaagtgaatatgggtcatattctgaaaaagcaattaagaagttacttgcactaatgaggcttgggaagtattggagttataaaaatattgatgataaaacaaaaggcaggattgaaaaaattatcaatggtgagtttgatgaaaatattaaggatcgagtcagagaaaagacgttacacctgaccgatacaaccagctttcaaggtctccccatttggctggcgcaatatgtcgtttatgacaggcattcagaggcttcaacagctcaaaagtggaactcagtggaagacctggaggagtacctgcgaaattttaagcaacactcactacgcaatcctatcgttgagcaggttgtcaccgaaatactacgcgttgtgcgagacatttggttaaagtatggaaacggcgccaaagggttttttgacgaaattcatattgaactaggacgcgaaatgaagaaccccgccgaagaacgagacaggattaccaggcaaataacagaaaatgaaaatacaaatttccgtatcaaagctcttctggcagagatgttcaatgatggagacgttgaaaatgtgaggccccattcaccaatgcaacaggaaatcttgaaagtatacgaagaaacggtactcaattccggcattgaaatagaagcggatatcctaagaattagcaaaagtcgtcaaccctcatcttcagatctgaagaaatacaggctgtggctggaacagaaataccgatctccatatacaggagaaataattcctttgagtaaactatttacacctgaatatgaaattgagcatattattccccagagccgatatttcgatgatagcttaagtaataaggtaatttgtgaatcagctgtaaacaaattaaaagataattatgtgggtttggaatttataaagaattaccatggacaaatagtcgaatgtggtaaagggaaaaaggtaaaaatttttgaggtaaaagattatgaggaatttgtaaggaagcactacgctaaaaacagagtaaagcgagctaaattactcatggacgatattccagaagaaatgattgagagacaattgaatgatacccgatacataagcaagttcgtatgctccctactctcgagtatcgtccgggcagatgaaaacgatgatggggtcaattcaaagaatttggtaccatgcaatggaaaggtaactaatgaactgaggcaggattgggggttaaatgatgtttggaatgatttaatcttacctcgattcgaaaaactgaaccaattgactggaacaaatttgtacactgcatggagtgaaaatcatcaaaaatttattcctactgtaccgttagaaaactccaaaggtttctccaaaaaacgaattgaccatcggcatcatgcattggatgcgctcgtcattgcctgtgcgacaagggatcacattaacctattgaataaccaattcgcaaaatcttcaataaggcatgacttaaatagaaaacttagaagattcgagaagaaggcctatgttcatcctcaaaccggagatcaagtggaaagagaagttccaacggaattcctgaagccatggaacaactttaccgcggatgctaagaatgccatagaaagagttatagtcagctttaaacagaatctgcgtattatcaacaaggctaccaacctttaccaaaaatgggtagagaaagagggcagaaaatacaagcaattacatccacaaagcggaataaattgggctatcagaaagccaatgcataaggcaacaatatatggccttgtatcattaagaaagacgaaaaaagtctcttttgctgctgcactagacaacattgataacatagtagataaatcattaaagcgagaaattctctcacttttacaaaaaggatttgacaaaaagaaaattaaaaagcacttcaatgaacagggattaaacaggaacggcaatggtgattccagggtagatatttattattgggatgaaaactgcgtggcaaccagaaactccatcattgaaaaatttaatactgaaaattttgacgaatcagatcttgataaaattactgatacgggaatccggaaaatcctgaaacgtcacttgaggaattacatgggtcgggttgacgaaaatggaaacgcaattcctcctcagctcctggcattttctcccgaaggagttgaggacatgaataataacattaaaacactaaacgacgggaaacctcatcaacccattttccgggtgcgcacgttcgaggcaaagggtaacaagtttgccatcggccaaactggtaacaaaatacacaaatacgctgaagctgaaaaaggaactaatttgttctatgcaatatatgaggacgcctcgggaaacagaaacttcgagactattccgctgaatgtggttattgagcgtcaaaagcaaggtttgagttcggttcctgattataatggaaaaggtgataaactcaaattcagtctatcgccatatgacctggtttatgttcctaccaaggaagaacgacaaaacattggcaatattgatttttccaatctggctccagcgcaaatcaaacgcatatttgttgtaaacgatttttcggagacctgttattttacacccaattcatttgcaaaagcaatcgcgcgcaaggaagttgatttacggtatgatccaacacaaaagaaacttgtggggtcgtttgatgacaaaactgcaagtttagatggagaacagataaaagaaatttgtttgaaaataaatgtcgatcgtctgggcaacattattccgtcgggacgattataacttcatgatgcatagctttaaactcgagctgtaaacaggaatgagatattgacgaaataaaacgaaatatctttcgtttccatatatacgaaccaatatcccatgatcaagcgaacgctttatttcggtaatccagcatatttaaagactaccagcgaacagctcgttatagtaatgcaagataccggggagaccaagagcgccccgatcgaagatattggtttacttatattagatcaccaacagattacaataactcagggcctgttggcaaaactgcttgctaataatacagctgttgtaacatgcaatcaaactcaccatccggtcggcctcttcttaaacctcgatggcaacagccttcaaagccaacactttaaagcgcagatagaagcgtcggtacctttgaagaaacaactttggcaacaaaccgttacagccaagatattgaatcaggctgctttgcttcaggcgcagcgccaagaaaataagacgctattaaactatgccaaaaatgtaaaaagcggtgatagcgagaatcatgaggcaagagcagctgtttactattggaaacgcatttttcctgattttctggaattccgtcgagatagagaaggtcctccgccaaacaatttgttgaactacggttatgctattttacgggctttggttgcacgcagcctggtatcatcaggcctgctgcctacgcttggtattcatcatcgaaaccaatacaatagttattgccttgcagatgatataatggaaccctataggccgtttgttgataaagtagtttgtcaaattattcggggcaatggtaaattcctggaaatgactccaaacatgaaaaaacagctcctctcaattcccagcatggacgtccacctggctgggcaaaaaagcccattaatgaacgcagtgcagcgtaccacttctagcctggcgagatgttttgaaggcaaagcacgcaaattactgtatcccgatttagtgtaatatatcgatcgtaaataaatctgtacccgcaaaagcacctttttacattttgtttgagcgattaaacgcataccgaatcatgtgggtattagtgttctttgatcttcccaccgaaaccaaaaaggaccggaaaatatatgcccgatttcgaaaagatattatggcagacggtttccaaatgtttcaattcagcatttacctgcgtcactgtagcagtagggaaaatgcctccgttcatattgagcgcgtgaagagaatattaccggcaaaaggacatgtcggtattatgtgtattactgataaacaattcggtatgattgagattttccacggtcgtgagcaggtggacaatcccgaaaccgtccagcagttggaacttttctagatttttaaattacacctccccgccccttggattaaaaaaatgcccataaaactcatttttttaatcctaaaaatcgtccaaaatgcacaacaggactgggtttcagccaatcctgctgtgcgagacctaagctacagaataatttgaaagcaaatcacaac

SEQ ID NO: 1467 - DNA, 6443 bp, synthetic construct
  source 1..6443: mol_type = other DNA
  misc_feature 1..6443: note = Synthetic
actagcttagtttttgaaaacaagtgtccaaatttgtttgaagacatacatcttccactaaaatccataaaaaaagcctcctgattatggacaagaggcaacccagatgtttacacaacggaataatccttattgtgaattgctttaaaattgtagtgcaatataattaaatatcttttatctacaacaccaaagtagtaaaatacctattaataggtaatgcgttgttaccaaaaaaatgttataattgaatattcaattataatatttttatttaaaaataaatcaaccacatatgaatattgtcttaggattagacttgggcacaaacagtataggctgggccttagtacagcaggattttaaaaaaaggcaaggaaaaatactaggcatgggtagccgtatcatcccaatgagtcaggatattaaagatgaatttggtaaaggtaattcaaaatcacaaactgccgatcttaccggtttcaggagtacacgccaccttagagagagaggtttactccgtcgagaacgcttgcacagggttttaaacatcttaggttttttaccccggcactttgccgcgcaaattgattttgaaaagaaattagggcagttctatgaagatactgaacctaagctggcttacaataataaagaatttatctttaagaaggcctttgaagaaatgcttgaggattttaaaatgcatcagcccgaactggttatcaaaggcaaaaaggtaccgtatgactggactattttttatttgcgtaaaaaggcgctgactcaaaaaataagtagagaagagcttgcctggatactattaaactttaaccaaaaacgcggttactatcagttacgtggtgaagaagatgaggatgcgacaagaactgcccaaacaagaatatattttgacacccaaatcattaaagagatcactgatacaggtatagtttataaaggctcaaaagttattcaaatacaacttgagaacggcgattcaggtaagtttttttcgaaagaaataccaaattgggttggtaataaaaaaaatattattgccactatagatttagataaggaaggaaatgatagatatgaagacgatggcactttaaaaagaaaattctccattccttccgaagaagattgggataagaaatggaaattagtaaaaataaaaactgagaaggaaataaaagattctcaaaaaagtgttggtgcttacatttatgatgcacttctgcaaaaacctaaccaaaaaattaaaggtaaactagtacgcaccatagagcgtaaattttacaaggatgaacttatagctattcttatcaaacaaatagccttacagccagagctttttacagatgaactttataacgattgtgtacgtgagctgtatcgtaataatgaagcacacaggcttaatcttagtaaaagagattttgtacatctttttgtagatgacatattgttttaccaacgcccgctacgcagccaaaaatcgtctgtgagcaactgtaccttagagtaccgtatatttaaaacaaaagataatgaaggaaatacagttgataaaaaagaataccttaaggttatacctaaatcgaacccgctgtatcaggaatttagagtatggcaatggctttttaacctgaaaattatcaataaagataatgataccgatgtaacgcctttatttttaaaaaccattgaagatttagaaaagctatttgattttttaatgtcacaaaaagaggttaaccataaagatgtacttaattatttactaactccggtacttagagaaaagtttccgtcggctaagcctgccgcatttaacaaagaacttgcaaaagaagtagcaaagttccgctggaactatgtatttgacgataccaaagaaaaagaagatgataaatctaaaacatacccctgcaacgaaaccggctatgaaataagaagaaggcttaacaaagttaaaaatcttccggatggcttccttactcctgaaaaggaatataaactgtggcaccttatatactctgtaaacgataaaagacagtacgaacaggcattaggctcgttcgcaagaaaaaacggtttggacgaagatacgtttacagaaaactttaaaaaatttcctccgtttaaaagtgagtatggctcattttcagaaaaagctgtaaaaaaactactacccctcatgcgcgtgggtagatattgggattggaatgcaatagataatcaaacaaaaaacaggattaacaagataataaccggtgagtatgacgagcaaataaaaaaccgtgtgcgcgaaaaagcaattcatcttattacagaaactgattttagaggcttacagctgtggcttgcacaatatattgtatacgaccggcattctgaagcctcattggccggtaaatgggactctgtaactggacttgaagagttcttaaaagacttcaggcaacattcattacgcaaccctatagtagagcaggtaattacagaaacattacgcgtagtaaaggatatatggataaagtatggaaatggcgagaaagacttttttaatgaaatccatgtggagttggggcgtgagatgaaaaaaacggctgatgaacgcaaaaggcttaccagcaagatttcggaaaacgaaaacaccaatttacgcataaaagctttgcttacagaattactagccgatagtaacgtagaaaacgtacgcccgttttcgcccatgcagcaggaagcacttaaaatatatgaagacggcgtactaaattcaagcatacctattcctgatgatatacttaaaataagcaaaacagcgcaacccactaaatcagaactgcagcgctataagctatggatggaacaaaaatattgttcgccatatacgggacaaataattccgcttaacaaactctttacccacgagtatgaaattgagcatataataccgcaaagccgctattttgacgatagctttaacaataaagtgatttgcgaatcagcagtaaataaactgaaggacaaacaactggggcttgaatttattaaaaatcattatggaactgaagtacagataggtaataaatctgtctatattcagacagaagaagcttataaagcatttattaaagacaattatgctaaaagtccgtctaagcgcagcaaacttttattagaagaaattcctgacaagatgatagagcgccaaatgaacgatacccgttatattagtaaatttattgcacaaaccctgtcaaacattgttcgtgaggatattaacgatgagggaataaattcgaagaatgtattaccaggaaatgggcagataacttctatactccgccaagactgggggctcaatgatgtgtggaatgaactgataataccacgttttgaacgtatgcagcaattacggtcagaaaaagatattgccgaaggtgtaagctttatagccttaaataagaaaggaaagaccataccggatttgcacccccctaccctgcaaaaaggatttcagagaaaacgtatagaccaccgccatcacgctttagatgcgctggtaatagcttgtgcaaccagagatcatattaacttactaaataaccaatttgcaaaatctgagaaacgctttgaccttaaccgtaagctcagaaaatttataaaaacatcttataatgacgcaaaaaccggggaaagaatagaaaaggaagttccaaaagattttttaaaaccttgggaaacatttacagaagatactaaggatattcttagcggcattgtggtaagctttaaacaaaacctcagggttatcaataagaccattaacagataccaaagctacaaggatgaagccggaaatttgagaatcggtaaagacggtaaacccaaaaaggattttataaaacaggttaaaggcgatagttgggccatacgtaagcccatacataaagatacagtttcgggtgctgtgaaactcagaaaaaccaaagaaataccgttaaatgcagcgttagataaccataacgaaattgttgagaaagccttgaggaaacacattacgctgcttatcaaggaaggttatgacaaaaatcgcttaataaagtattttaaagacgcgggtaacaaatggaatgacagtgatatttcgagggtaaagatatattactgggacaacgaaaatgttgcatctcgtgtaaatctggatgtttcattcaatgaaaaacggattattgagactattacggataccgggatccagaaaattttgttgaatcatttaaaccgttataaaggtgttactgatgaaaaaggtaaggaaatagctcctgaaaccctcgcctttaccgctgagggtattgatgaaatgaataaaaacatagttgctttaaacaacggtaaatttcatcagcctattttaaaagtaaggacatatgaaccaaagggcaataaatttaatattggccaaaccggaaacaagaaggacaaatttgtagaggcagccaaaggcactaacctgttttttgccatataccaagatgaaaacggtaagcgaagctatgaaacggttccgctgaatatagttattgaacgccaaaagcaggggttaaactcagtgcctgaaacaaatgataaaggcaatacattactgtactgcatttcgccaaatgatttggtatacgtacctaccgaagaagaaagggagaatatcaaatccattgattttagaaacctaagcaaggatcaaaagaatagaatctataagcttgaaaaagcgtctggaactgaaagctattttgttaggcatgatattgcatatttaattaagcaatacgacgcgaaaacaagattaggagagttggaaagtcagaataagctacaaactacaatgaccccagataggatgaagatatctgaattttgtgtaaaattaaatgttgaccggttaggcaatattaataaagcataataatagtctgaaatttttaaatctaaagcaaatgataaagcgaaccctctttttcggtaaccccgcttatctgagtacaaagaatgagcaactggtggtaagttttcctgatgaagacaaaccaccagtaaccattcctatagaagatttagggtacatagtactagagcacccacaaataacaattacaaccggggtattaactaagctcctggaaaacaaaactgccgtaataacctgcgataaacaacacttaccttgtggctttttgcagccgcttatcggccatagcgaacaaaccgaacgctacaggcaccagctaaatgcaagtgtaccgctcaaaaaaaacctttggcagcaaactgttagtgctaaaataagcaaccaggcttatcatttaaatgccagagaaataaatgccaaaaaattaaagcgttgggcagacgaagttaaaagtggcgatgcagaaaatcacgaagctatagctgcagcattttatttccagaatctttttacacacataccggactttagccgaaatcaaaagggtgtggcaccaaacggagtattaaattatgggtatgcaatactaagagccataactgcaagggcattaataagtacaggattgttacccgctgtaggtatttttcacagtaataaatataatgctttttgcctggcagatgacataatggagccttacaggatatatgttgatgcattagtgtatgaattaaccaaacagggtgataattttgaggaactgtctacacaaatcaaagcgcagttgttaactatacccgcacttgatgttgttatagaaggaaaacgtagcccgcttatggttgctatgagccgtaccacaaacagtctatatgaatgctatacaggtgtaagcagaaaaatactgtacccggtttttgaactaacagtataaaaatagtatatggagcctgaccattactcaagattaaaccagtatcgtactatgtgggtattagtgttttttgatcttccgacagaaacaaaaacggatcgcaaggccgcaacaaagtttagaaaagagttattggacgatggctttactatgtttcagttttcaatatacctgaggttttgtgccagccgagaaaatgccgaagtgcatacaaaacgtgtaaaaagaattttaccaaaacaaggaaaagtaggtgtaatgcaaataacggataagcaatttgggatgatggaaattttttacggccagaaagaaatacccaaagacacccctggacaacaactagtattgttctaggtttaaaaatcctggatttatattttagagtttactaaaacatagatgttttttcaaattctaaaaacaacagtaaataacaggataccagttttttagcaccggtatcctgtgaatcatctactaaagatacaattttgaaagcaattcacaaccgatttt

SEQ ID NO: 1468 - DNA, 6396 bp, synthetic construct
  source 1..6396: mol_type = other DNA
  misc_feature 1..6396: note = Synthetic
atgctcatcgcccatcgagccatatgctcattgcccatcgagccatatgctcatcgtccatcgagccatatgctcattgcccattgagccatatgctcattgccgaagataagagtgaggtggctacatgctttagtctttattttattttcacagttgtccatcgttcgcttttctggtatttgcacgtttcgtcggccttcctgccgttgatggtccataatgaaaaggtgtagcacgattgcgtgatggtgatgctacctttgggtaccaatagcattatatttagtggtttttacataaatgttcgttgccgtgccggggcaagaatcgtaaatacgtttccatgacgggcgaccgggcctgtctgtcatcggtgaaaaataaaaataggggcaactatttggcgggtatgtatttttttcctatctttgcaagtagaattttaagcaaatcacaataaggattattccgttgtgaaaacatttaggctggccctcgtccttggacgtcgggtcggccttttttgttcttggccgactgccatcggcaggagcaggggaggggatggcttccacatgccacttaactcctgccgtgaaaacggcacatcccagacgaggaggtatgttcatctgatgcatagtctccacttcgccttccgtatgtcaggtatttgcataatgtgttgtttggatttgaacaagaagaccgatagggcttaaaggaggatggcctctccatacattatcctataagacataaggcgcacgagtatgtgccatctgtcaaatttacattaaaagttgccggacggagcctctttcttcttgaaaatgtttatatttgtaagttagaccatttgtgtcgttgacagaatataaatttattgagtatgaaaaacatattaggtttagacctcggaaccaacagtattggctgggctttagtgagaagtgacaaagacagtgacaatgtggaaagggcgaccggcataacggctgccggaagtaggatcatcccaatggatgcggcggtgcttggcgatttcgccaagggcaacaccaaatcacagactgctgataggacggcggccagaggcgcctggccgagcgccataagttgcgtcgcgaacgtcttaatagggtcctcgatgtgatgggattccttcccgaccattattcttcgtcgctcacccgccatggcaagttcaaggatgacatggaatgtaagatagcgtggcgaaaggacgagaatggcaaatggatctttgtgtttggtgactccttccgtgagatgctggccgattttgccgcccggcagcctgagtggctgacccgtggtaagaaggtgccttacgactggaccatctactatctccgcaagaaggccctctcaaaacctttgaccgggcaggagctggcctggctgttgctgaacttcaatcagaagcgcggctattaccagcttcgtggagaagaggagcagacgagcgagaagggcaagctcgtggagtattatgccttgaaggtcgtaggcgttgaggatacgggcgaaaggaagggcaaggacacgtggttcaacatcctgcttgagaatgggatggtgtaccggcgtacggcttccgaggctcccgactggataggaaagacgaaggaatttatcgttactacggatcttgagaaagacggaacaccgaagaaggacaaggatggcaatgtcaagcgttcattcagaatgcccaaggaggacgattggacacttgtgaagaaaaagacggagagcgacatcgacaagtcgggcaagacggtcggtgagtatatctatgatacgttgttggataatcctacgcagaagatcaggggtaagcttgtgcggaccgttgaacggaaatactataaggaagagctgaggagaatcctcgagacgcagaagcagttcatacccgagctgacggacaaggcactttacgacaggtgcatagaggagttgtatcagagcaatgacgcctatcggaaatcgatctcgtcttacgacttcacctatctcttcgtcgatgatatcattttctatcagcgcccattgaagagcaagaagtcgctcatcgacgattgtccgtatgagacacggtcgtatgtcgacaagcagacgggcgaggtgagacagtctcctgtaaaatgtgtggcaaagtccaatccgttgtttcaggagttccgtctgtggcagttcgtgcagaatttaaggatcttcgagcgtcagaaaaaggtcggtgacagtgtgaagaccgacgttgatgtcaccggtgagtttatcaagagcgaggacgagcgggtcgccttgttcgatttcctcaacgaccgcaaggatataacccagagtgtgctgcttggcacctatttcaaggtgaaaaagtcaaagggcaaagagggagagtatccctatcgttggaactatgtggaggacaagacctatccgtgtaacgagacccgtgcgctcatgctcaagggcttgaaggatgccggtgtggatgccgctttcctgaccgttgcccatgagcatcggttgtggcatgtcttgtattcggtagaggataagcaggagatccgaaaggccatggccgggtttgccaggaagtacaataagagggccgacaaggtaaaggacaagagcggtcatgtcattgagttgaacgacaagttcgtcgaggtgttcagttctttacctccgtttaagaaggactatggcgcctattcggaaaaagccatcaagaagttgctggcgctgatgcgcatgggcaaatattggagtgtcgctgccatcgataagcatacgcttgcacgtatcgacaagatcatcaccggcgaatacgatgagggcataaggacacgagttagggagaaggccatcagtctcaccgatgtgtctcatttcagagggctgccgttgtgcctgctacatcgtctacgatcgtcacagcgaggcgaaggacatcacccgttggagcagtccggccgacattgaccggtatctgaaggacttcaagcaacattcattgcgcaatcccatcgtggagcaggtggtgaccgagaccctgcgcacggtgcgtgacatctggaagcagtatggtaagatagacgagatacacatcgagatgggtcgcgacatgaagaatccggctgatgtcagggcgaagatctcgaagcggatggcggaaaacgagaatgccaacctgcgcgtcaaggcgctgttgacagaattcgtcaatccggattttgacatagccaatgtacgtccatattcaccggcgcagcaggaattgttgcggatatatgaggaaggcgtattggacagtgtcgatgaggtgcccgacgatatcaatgagatcatggccaaattcaatcagtctgatgtcgctaagcgcccgacccatggcgaggtgatgcgctataagctgtggcttgaacagcattaccagtccccctatcccggccgtatcatctccctgtcccgtctgttcaccgacgactatcagatagagcacatcattccccagtcgcgctattttgacgattccctgtccaacaaggtcatatgtgaggcagctgtcaaccagctcaaggaccggatgctgggttatgagttcatcaaaaatcatcatggcgagaaggtcgacttgggcatgaacgttacggccaccatccttaccgtggagaaatacgaggagctggtacagaagaatttcaggaagaatcctgtcaagatgaagaagttgctcatggacgacatcccagacaagttcattgagcgtcagctgaacgacagccgttatatcagcaagaagatcaagtcgttgctttccaatatggtacgtgaggagggcgagcaggaggacatctctaagaacgtgatcacatgcaacggaacgatcacggacaggctgaagcgcgactggggggtgaacgatgtgtggaatcacatgatactaccccgcttccaacgccttgacgcccttaccgattcgcatcgcttcaccacaaccaacacgaacgggcacaccatacccgacatgccgctcgacctgcaaaaggggttcagcaagaagcgcattgaccaccgtcatcatgccatggatgccatcgtgatagcctgtaccacgcgcaaccatgtcaatctgctcaataatgaggcggccatgtctaagaacaatgccatgcgctaccagctctcacacaagttgcgtcgttatgaggatgtcacgaagacgcaggatggccggacacgtaccattagcgtagcccgtgagttcataaagccgtggccgggattctgtggcgatgtggagcaggccctgcaggggatcgtcgtcagcttcaagcagaatctgagggtgatcaataagacggtgaacaaatatcagaagatcgtctatgacgaagagaggcattgcaaggtgaagaagatggtgagacaggaggagcatgacggaaggcatctcctggccatacgcaagtcgatgcacaaggatacggtctatggtgaggtgaatctcaggcgtatcagggaggtgtcgctcaaggaggctgtggccaatccgaaggctgtcgttgacaaggacctgaagaagaagctcaaggcaatgattgagttaggctacgatttgaaacgtatccagcaatatttcgacgacaataaggatgtatggcaggacatcaacctgaagaagatcaaggtgtactatttcacgaaagacacacgtgaccgttattttgccacacgtttcggcaatgatctcgtagcgttgttcaataagacaatgaagaaagaggaggtggaaaagcaaatcgggaaaatcaccgacaccggcatacagaagatcctgcgccggcatctcgaggccaatggtggagactataagaaagcgttctcgcccgatggcgtagacgagatgaaccgtaacatacggcaattgaataacgggaaggcacatcagccgatctataaagtgagagtctttgaaaaggccgacaagtttgccgtaggcgtgaggggcaataaggcggccaaattcgtggaggctgccaagggcaccaacctcttctttgccgtttatcagaaggaggtgaaggacagtgctaccggcggaacgacgatgaagcgggtgttcgataccgtacccctaaagatcgttatcgacaggctgaaacaaggactgacacccgctccggaagagaaggagggtgccaagttgttgttcgtgctgtcgcctaatgatctggtctatctgcctactgcgagcgagagggagagcggaacgatacaacaaccgttggataggaagcggatttataaggttgtaagttgtacaggagcagaatgttactatttaccatttactgtagcttcgccaattgttgataagatggaatttttctctttaaataaaatgggaagagctattaccggtgaaatgataaaggaaagttgtattccgattcgtgtcgaccgtttaggtaacattattgagattaataataaaaagctatgatcaagcgtactttatgtttcaccactcctgcgtatctttccttgaaggatgcccagcttgtggtgaggttgcccgaggtggagaagagcgatttgcccgtccacatgaagaaggagagtgtgaggaccataccggtggaggacatcggtgtggtcgtgctcgacaacaggcagataaccgtgacgcacggactgctcgaggctctgctcgaaaacgactgtgccgttatcacgtgcgactcacggagcatgcccgtagggttgatgcttcccctatgtggcaatacgttgcagagcgagcgcttcgggcgccagatcgaggcatcgctgccgttgaagaagcagttgtggcagcaaaccatcaaggcgaagatcagtcagcaggcagccgtgctcagtaccgtgtccggagtggagactggctgcatggagcggtgggcggctgatgtgcgcagtggcgatccggataatcttgagggaagggcggcagcctactattggaagcaggtgttcagcgacattcccgccttgtcaggcttcacccgggggcgcgaaggcatgccacccaataatcttctcaactacggatatgccatcctgcgagctgtgatagcccgctcgttggtctcggcggggttgttgcctacactgggcatacatcaccacaaccggtacaatgcctactgtctggccgacgacgtcatggagccttaccgtccctatgtggatcggctcgtacgcagcatgatagcagaacgcgacatagacgagtacacccgactgaccaaggagttgaagatggagctgctctctatcccccacgatcgaagtgacggtcaacggtaggcgcag

SEQ ID NO: 1469 - DNA, 6255 bp, synthetic construct
  misc_feature 1..6255: note = Synthetic
  source 1..6255: mol_type = other DNA
atgtcactatttatgcaaataatggtgtgaattttaaagtaaataaaggtgaattcacagttattgtaggtgcctctggggctggtaaaacaactatattaaatatgcttggtggcatggatacacctacaagtggcactattgttgtagatggtcataacattgcgacttatgatgataaacaattaacagattatagaagagatgatattggctttgtattccagttttataatcttgtacagaacttaacagcattagaaaatgtagagcttgcttcacagatttctaaggatccactcaattcagtagatattctagaacgtgttggtcttggagaacgtaaagataacttcccagcacagttatccggtggagaacaacagcgtgtagccattgcccgtgctatcgcaaagaatcctaaactattattatgcgatgaaccaacaggagcacttgattatcaaacaggtaaatcaattcttggtttattaagaagtatgtgtgataactatggaatgactgtaatcgttattacacataactcagcccttgctccaatggctgatcaagtcatacatcttaagaatggaaaagtggaaagacaggaatataatgaacatcctgaatccatcgataatattgaatggtaaaaaagaaattgatcaaaaggcttttctgaaatatccgctttttggactgaaaaaagaggtagagaattatcgttggaattatgtacaagataaaccttatccatgtaatgaaacccgttcatcgatgttggcgcgtctggagaaatgtgatatttctattgaattcctgacaaaagagaatgaggaagctttatggcatatattatattcggttgaagataagaatgaaatagtaaaagctttgcagaaatttgcggataaacacgacctgaatgcttcttttgttgatgtattccggaaattcccaccttttaaaaaagaatatggttcctattcggcaaaagcaattaaaaaattattgcctttaatgcgtatgggaaaatattggagtgagaattcaatagataaaggaacgcgtgaacggattgataagataataacaggagaatatgatgagaaaatagaaaatagagtgagggagaaagcaattcatcttgttgatgtttctgatttcagaggtttgcctctttggttagtgtgttacattgtttatggtcgtcactctgaatcaaaagaaataacccagtggaaatctcctgctgatattgattcgtatttaaaatcttttaagcaacattcattgcgtaatccaattgttgagcagattattattgaaacactacgtgttgttcgtgatatttggaaacaagtgggaaatattgatgagatacatgtggagttggggcgtgagatgaagaatccggctgacaagcggaagaaaatgacacagcaaatatccgaaaatgagaataccaacttgcgtatcaagtatttgctcacagaatttttgaatcctgaatatgaggttgaaaatgttcgtccttattcgccaagtcagcaggatattttgcgtatttatgaagagggtgttttaaatagtgtctccgatttaccggaggaaatatcggatatattgaaaaagtttacagaaacagacttgaagaagcgtccttcaaggtcagaagttttgcgttacaagctttggctggaacagaagtatcgttctccttataccggtgaagtgattccattaggtaaattgtttacgtctgcatacgaaatagagcatgtcattcctcaatcatgttattttgatgattcttttagtaacaaggtgatttgtgaagcggaagtcaataagcttaaaagcaatttattgggacatgagtttattgtgaagcatcatggggagatagtagaacttccttttggaaaaaaagtaaggatcttcactgtggatgaatatgagcaatttgtgaaagataactattcgcgtactcgtggtaaaatgaaaaaacttttgatggatgatattccggaggagtttgttactcgtcagctgaatgatagtaggtacatcagcaaagttgtaaagtctcttctttccaacatcgttagagaaaaaggagaggaagaagcaatttcaaagaatgtaattccttgtaccggaggagttacggatcgtttgaagaaagattggggaataaatgaggtttggaataagattatacttcctcgttttcaacgactcaatgagttaaccggcacaaataaatttacaactaaaaatgttgggattcaagaaattccgacaatgcctttggaattgcaaaaaggttttaataagaaaagaatagatcatcgtcatcatgcaatggatgccataataatagcgtgtgcaaataggaatattattaattatttaaataatgagtcggcaacagctaaggctgaattatcccgatatgatttgcagaaactgctgtgtgataaagctaagactgataataacggtaactataaatgggtgatcagaaaaccgtgggcatcgtttacacaggatacatatttggctttggaaaatataatagtcagttttaagcaaaatttgcgtgttataaataaagctaccaatcacttcttgcattataatgaagaaggcaaaaagatctttgtgaaacagggaaaaggggacaactgggctatacgtaaatccatgcataaagatacggtatttggagaagttaatttgcgtaggataaagactgtagctttaaatgaagcgatgaaaaatcctcaaagcatcgttgtgaaagacttcaagagaaaattattggaactttggaatttaggatttgacgcgaagagaataaagaagtactttgaagataatagagaaacttggagtgatataaatctgtctaaaatagaggtttactattttagtaaagatactaaagatcgattctttgctactagaaaaccgttggatactagttttgatagaaagaaaatagaaaataatattactgatacgggtatccaaaaaatattgttacgtcatttggaactgaaagataataatccggatattgctttttcgccggatggtattgatgaaatgaatcgtaatattattcagctgaataatggaaagtatcatcagcctatcattaaagttcgttggtatgaacaggctgataagtttgcagtaggtcaaacaggtaataaatcttctaaatttgtagaggctgcgaaaggaacaaatttattttttgctgtatacgagtcgaatattttagataaaaagacgaatactataataaagaaaagaaattatgctaccattccactgaatgttgcaattgaacggcaaaaacaaggtttacctgttgcaccggaagatgagaatggtaatgaccctatttttgtattgtcacctaatgatttggtttatcttcctactgatgatgaattagctaatggtattattgcccagcctttggatagaggaaggatttataagatggtaagttcctcaggtgaacaatgctttttcataaaacatattgttgcgaatgtactagttgacaaatttgaattttctcctttaaataagatggagcgggctttaactggtgaaatgataaaaatgatatgtatgcctataaaagttgatcgtttaggaaatgttttagaatcaagtagttcacataaaaaataatatattcttattttatggaagaaaacaaaggacaaattcttttatatcaaacggtagatggtgagtcaagaattgaagtaacactatgcaatgatactgtttggctgacattagatcaaatggcagaattatttcaacggaacaaatcaacgatttcacgccatataaagaatgtttttgagagtggggaattacaggaaaattcagttgttgcattttttgcaacaactgcttctgatggtaaaatatatcaagtggcttattataatttggatatgattataagcataggctatcgggttaaatcttaccgtggtgtgcagtttcgaatatgggcaacacaaatactaaaagagtatttagtaaagggatttgtaatgaacgatgagctgttgaagcgtgcaggtggtggaaattattttgatgagttattatcacgcatacgtgatattcgttcctcagaaaagatattctatcgtaaaattcttgaaatttatgctttgagcatagattatgacccaagtactgagtctactcgattgttttttgccacggttcaaaataaaatgcatttttcagtacatggacatacggctgctgaggttatttacggtcgtgcagatgcagggaaagattttatgggattaactaattggacaggagcagttccaaagcggaatgatatagaatatgctaagaattatttgacagatgatgagttggatacattaaatcgtattgtaagtttgtatcttgactttgcagaattgcaggctaaaagtcatactcctatgtatatgaaagactggattcaaaaattggatgattttcttagactgtcaggaaaagaattgttacaacatgctggtactatttcggctgaattagcaaagaaaaaagcaaatcttgaatatgatgaatttaagaaacgcattagtaatcagttatctcctgtagaaatagatttcattgaaaatttcgaaaaagagcagaagaaattgcgaggtaagtaatatattaacctttaaaatatgatactatgataaagaaaacactttattttggtaatccggcttatttgtcattacgaaataaccaattagtcataaaacttccggaagttgagaaaagtgattcattgccggatatctttaaagaacaatcggaagtaacgaagccgattgaagatataggtgtcgtagtactagatcataagcaaattactattacttccggtgtattagaatctctattagagaataattgtgccgttattacttgtgatagtaaaagtatgccagtgggtttaatgctccctttgtatggaaatacaactcagaatgagcgtttccgtcaacagttggatgcatcattgccattgaaaaagcaactttggcagcaaacaattaaggcaaaaatagataaccaagcatctgtattgagagtttgtgtaggtgaagaaatgaaatgtatgcgaatttgggcgaatgaagtgaagagtggtgatccagagaatttagaagcacgtgcggctgcttttttttggaaaaatttatttgcagatattattggcttcactcgtgacagagaagggatttctcctaataatttattgaattatggttatgctatacttcgtgctatcgtagctcgtgctttagtggcaagtgggttgcttcctaccttagggatccatcatcataatcgttataatgcatattgtttagctgacgatgtgatggagccatatcgaccttatgttgatgaattagtatttagtttagtgaaattgtatggtgcaaatttggaattaacaaaagaaataaaatcacgtttgcttgttattcctacattggatgtacgtattaacggtaaacgtagtccgttgatggtggctgtcgctcagactacagcttctctatataaatgtttttgtggagaaattcgtcgtattagttatcctgaacgataatggaccgttttagtgaatatcggattatgtgggtactagtattatttgatttgccaacggaaactaagaaggacaagaaagcttatactgattttagaaaaaatctacaaaaggatggctttacaatgtttcagttttcaatttacgtccgtcattgtgctagtagcgagaatgcaactgttcatataaatagagttaaatcttttttgcctgaatatggacaagtgggaataatgtgtatcactgataaacaatttgctgctattgaacttttttatggaaagaaactacaaggtgtaactactccaggacagcaattggaattattttaaaaataagaaatcccgtctgaaacgggatttcttattagaaaacaactttgtttttaatttctgaatatatgtgtaactaattggtaattagtttgtaacatatattctgttgtttccaatggttcaaagatactaatttgaaagcaaatcacaacatatttgcatatcggaaataacgaacgaaagttgtttccaatggttcaaagatactaatttgaaagcaaatcacaacac

SEQ ID NO: 1470 - DNA, 5976 bp, synthetic construct
  misc_feature 1..5976: note = Synthetic
  source 1..5976: mol_type = other DNA
catcatagccgagtaatactaatcacccgtagacttttcgcgcagcattctttttaaaagagagttagtaaaaaaatgttttttatccctatatgttaaaaatatgattaggataggtattttaaggttaagatacaaaaggagtgtaagaagctcttatcttttacctcttacctcttacctaaaacgatttaaggtggttatagtcaaaggtctcacctcttaccattccgaacagagcagttaaaccttttagcgcagatggtactacggtcacgtgggagagtatgtcgccgccttcttataaagagcaattctgataaagagttgctctttttttattatatcatcatttcataaaatctctcacagttcccctccaatcagccttgtcttcctcgtcctattctctccgagtctctcctaaattctcaattttccaaaaaaaagaaccctatcactaggatagggctcctttaaatgttttcacagcggaataatccttattgtgaattgctttcaaattatgcgacaaaagtaggtattatatttttaatgtacaaatattttagtataaaaaaaatcattatatttgtcctttcttaaaacattataccaatgaaacacatattaggcttagatttaggctcaaactctatcggttgggctctcgtgcaacaagattttgaaaacaaacaaggaaaaattatggctgctggtagtagaattatccctatggatcagggtgtattaggcgattttgagaaaggaaatacagtttctcaaactgccgaaagaactacttaccgcagtatgcgtcgtctgagagaacgccatttacttcgccgtgagcgacttcatagagtacttcacatattaggttttttacctcctcactatgatgcacaaatagactttaccaaaagatatggtaaatttatagataatgctgaacccaaaatagcttataacaatgggaattttatctttatgaatagtttcaatgagatgattgaggatttcaaaaaatacaaacctcagttattctacaagaaatctaatggcgaagagagtaaaattccttatgattggacaatttattacctgcgtaaaaaagcactttcacaaaagattacccaacaagaatttgcttggcttattcttcacttcaatcaaaaaagagggtactaccagttgcgcggcgaagaagaaactgaaagccctaacaaagaagttgcttttcactctttaaaagttgtagaggtagaggctgaagctcctaataaaaaaggtgagatttggtatacaatccgtttggaaaatggttggatataccgtcgtacaagtaaaatccctttggacgattggaagggaaaaacacgtgattttatcgttactaccgaccttaatgatgatggcactattaaagtagacaaagagggtaaagaaaaacgttccttcagagctcctgaagaaaacgactggaatttgctcaaaaagaaaacagaacacgatattgatttttctggaaaaactgtaggtgcttatatctacgatcatttgttgcaaaaccctaatcagaagattaaaggtaaattagttcgtacgattgaacgaaaatactataagaatgaattaaaagctattttaaccaaacaaatagcacttcaaccagaattgtttaccgaaaacctattagcggattgtataagagaattataccgcaaaaacgagacgcaacagcaaaacctattgtcaaaagatttccttcatctgtttgtagaagatatcattttctaccaacgcccgttgcgcagcaaaaaatctactattgccaattgtaccttagaaaagcgttcgtatatagataaggaaactaatgaacgcaaagacactcctataaaagtatgtgccaaatctaatccttactaccaagagtttagagtgctgcaatggctgcaaaacttgagaatttacgaaatagaaactgaccgtgaggtaactgctcagtttattgaaacagcggaagattatgaggctctcttcaacttcttgatgtctcaaaaagaaatagatagtgaaagtttactaaaatacttcttacttgcaaaaaatcctcaaattaaagacaaagcagctaaaagcgagcttaaaaaatggctcactacttatcgctggaactatgtgtatgatgcggtggataactcctccaaaaaataccctatgaatgaaataggttatgaccttcagcggtatttgcagaaagtagaagggctccctgtcaattttctaacctttgatacaacatataaattgtggcatttgttatattcggtgaaggacaaagttgaatttgaaaaagcattaaagagatttgctaaaaagaaacaattaaacgaaacatccttcatagaaagttttaaaaacttcaaaccctatcctaatgagtatggtagtttctccgaaaaagctattaaaaaattactccctctgatgcgatttggcaatcattgggactttaatcgcattgatgtatctactcaaaaacgtatagacgaccttatcaatggagtgacaaatgaggaaatccgtaccatcattagagaaaaagcagagaaatatcagctcaatagtgagacctgctttcaaggcttaccgctttggttagcacagtatgtagtctataaccgtcacgccgaagctaccgatatagaaaaatggacttcagtgaatgatttagaagcatatttagaagatttcaaacaacactctcttagaaaccctatagtagagcaagtagttaccgaaactttacgcgtagtaagagatatttggcaacaatacggtgggggacaagcgaatttctttgatgaaatacatatagaactgggtagagaactcaaaaaaacagctgaagaaaaaaaacaactttctaatagaaatcaagagaatgaaaataccaacctacgcattaaaaaattgcttgccgaattaaaagaagatgcaagtatacagaacgtgcgtccgtattcgcctgtacaacaagaactgcttaaaatctatgaagaaggtatattcagtagtacagatgaaatagaggaagatattcagaaaatacgtaaaaaagctgaacctaccacccctgagatacaacgctacaagctctggttagaacaaaagtataaatcgccttatacgggagaggtgatttcactcacaaagctatttactgaggagtatgaaatagaacatattattccgcaaagccgttattacgatgatagtttttctaataaagtaatatgcgaatcggctgtaaataagctaaaaacaaatctattaggattagaatttattcaaaaacaccacggagaaaaggtacgtgtagcaggtaataaagaagttactatcttcacagaagaacaatacaaagactttgtgaagaaacattacgctaataatttagctaaacaacaaaaacttcttttggatgaaatacccgaaaaaatggtggctcgccagctcaatgacactcgttacatcagtaagtatatttcagaaatactttctaaaatagtgcgttcagacgaaaaagatgaaggcgtaaactctaaaaatgtaataccttgtacagggaaaattactactgccctcaaacaggattggggacttaatgacgtgtggaatgagcttatacttcctcgttttgagcgaatgaacctacttacccaaacgcaattatttacctcctataacgacagacttcaaaaaaatctccctacggttccaatagagtacagccaaggtttccaaaagaaacgcatagaccaccgtcatcacgctatggacgccttagtgattgcttgtgccacaagagagcacatcaattatatgaataaccaacacgcattggataaaagtaaggataaaaaagaaaaacaacaatctcgcatagaccttcgcaccatcctctgtgagaaaaagaataataactggcagttcaagaaaccttgggggactttcactcaagaagccaaagaatccctcgaacatatagtagtgagtttcaaacaaaacctaagagtgattaataaagctaccaactattatgaaaaatgggaagagaaaaatggtgtacttgtaaaaaagaaagtaaaacaagaaggaactaattgggctatacgcaaaaaacttcatgaagattttccttatggaaaagtaaaatatcaagtgaatttcttaaaaatatccgagaatatttctaaaatagatcttatagtagatgaatttatcaaaaggcagttggaaaagatctatgttgagaatcatcgtaaagttaatctaacgaagaaatatttaaaagaaaatcctataagagaccaaaaaggggaagaagtcattagtacagatttcagagaagaaaatattaaatacagaaagagaaaaccaatatcggtactttctgatagaaatagaaaaacaggaatatataatccgcaaaacgaaatgtaccaatttacaaaatgaaatgtacattttttggcaggggttgaacggggcaaaggtaataaaaaacacggatatgcggtatagctatccgtgtttttttgtgccgatacattatatagggtagttggctgtaaggacttctatacgcttctttcctgtactattgctgctgcctaaatgcattgacacttctttttgataccagccgtgtgtttgggtgtagcgggtgagttcattattatggtaggagcttaatagaaacttgcctttgaggggggcaagggtagctaataactcattaaaatgttcctgttcataacctccgtaatgcccttgcttggctcctacatagggtggatctacatagtggaaggtgtcgggggtgtcgtggtgggtgaggacttcggtggcatcgttattatctatttgtacgccttgcaagcgcaatgagtagatgtcggtgaagttggtaattttgttgttgagggctgacacattcttgctgttggttgtgatacggcagttgccaacttggttagagtaaccgcaattggtagcgtaccaaaatgcccacgcttgttgcacttcggtaaaagcaaaaggggcgtggtagattaccaaggcggctttgtaggcttctcggctaactacagaccgctctataagggttttaagctctgcaaagcggttttgcagaaccttgtagaaggtatatacattagcattaaagtcgttgataatttcggttttgacgggctgttttgcccaaaagactgcacctcctccaaaaaaggcttcggtgtaaatagtatgtgcagggataaggggcaggatatgtggcagcattgtttgttttccaccatagtaggatattggcgtacgttgccaagtattggatgttgatttcattgcttatgtttcttagtatttgtatatcattaaatcttcgtatgaacttgagtaattgacacttgtgctaacggttacccgcgtagtgttgttgaatggactggggaggttgtattcgttggcaaggaagtcgaaaaggtcgaggagttgtcctttattgcttccgaagtagatgtaacgaggcattacgttgagggctttgacgatatgtaggtagtcttttagtttccaatcttgcgcacctctataggaagtgatgtcggtggaaagatagggtggatcaaggataaatacggtatttggggtgtgttcaaactctgtgatgaggttgcgatagtcagtctgacggcgttctactcctgcaaggtaaccatcagcattgtagggtgtttgagaaactttagcatagaagccgtctttagcaagggcttccaagctggtggcgtatttgccgctgaaaagaaggttagcagaaagggtaatataatctaaggcttcgtgcgggtattggcggaggacttccaaaatagtgggttttacttcattgatacgtgttcc

SEQ ID NO: 1471 - DNA, 5952 bp, synthetic construct
  source 1..5952: mol_type = other DNA
  misc_feature 1..5952: note = Synthetic
ctcttttcgttcacagagctttaaagctttttttctatgatatcctttaaaatacgatgatccaagctcagatctgcaaacatgcgtttaagccgagcattttcttcttgtagagctttaagctccttaagatgctgtgcatccattcctccatacttctgtttccattgataaaaagtaggtgcggaaataccatgttcacgacaaatatcttttgtcgctttcccagattcatattctttcagaatattgataatctgatgttccgaaaatttgctctttttcataaggtttaacaaactaaatttaataattttaatttgtctgaaaaacagggaagtctaccaaaattagaatgatgattaaaaatatacttggattagacttgggaaccaactccattggttgggctttgataaaacaaaactttgaaaataagtacggtgaaattcttgggatgggaagcaggattatcccaatgtcacaggatgttttaggcgaattcggaaaaggaaattctgtttcacaaaccgctgcaagaactggttacagaggagtgagaagactgcgtgaaagattcctgttaagaagagaaaggcttcacagggttttaaacgttttgaattttcttccagaacattatgcttcacaaattgattttgaaaaacgatttggaaagttcaaatatgaaactgaaccgaaactggcttataataatgatggattttttttcaagaattcttttgatgaaatgcttggcgattttaaagatcatcaatttcatcttttagaaaacggtagaaaagttccctacgactggacgatttattatctccgtaaaaaagcgctttctcaaaaaatagaaaaagaagaattagcttggattcttttaaattttaaccagaaacgcggatattatcaattgcgtggtgaagattttgaagaagaaaaggacagagtatttgttagattgaaagtagacagagttgttgattcgggagaaaatattaaaggaaaaattctttatgacgtatattttgaaaatggatggaaatatgaaaaacaaattgtaaaaactgaagattggatagggcgcacgaaagaatttatcgttacagaatctattctaaaaaatggcgatacaaagagaacctttaaagctgtagattctgaaaaagattggattgcaataaaaacaaagactgagcaggaaatcgataaatcccataaaactgtcggagcatacatttatgaagcattgcttcaaaaccccaagcaaaaaattaaagggaaattggtccgcacgattgaaagaaaattttatagggaagaactgaaaaaaattctggaaagacagaaagagtttcatccggaattgcaaagtgatgatttatataatgattgtataagagaattatatcgcaataatgaagctcatcagataacattgagtaaaaaagattttgttcaccttcttttaaatgatcttattttttaccaacggcccttgagaagccagaaatcttccgtttccaactgtactttagaattcagaaaatataaagatgaaaatggagtagaacacgcacaatatttgaaaactattccgaaatcaaatccatattaccaggagtttcgtgtctggcaatggatgtttaatctgaatatttacaggaaagatgatgatacgaatgttactaaagaatttttaagcagcacggaagattatgagactctgtttgaatttttaaataacagaaaggaagttgaccaaaaagcattattaagacattttaagttaaatgaaaaaacacatcgctggaattatgtagaagataaaaaatatccctgtaatgaaaccaaaacaatgatttcaacaaggctggaaaaggttgaaaactatccgtctgatttcctgacaagagaaatggaacaaaatatctggcacattatctattccgtgaatgataaaatagaatatgaaaaagcattgaaatcatttgcccataaaaataatctggatgaaaactcattttttgaagcctttaaaaaatttccaccctttaaaagtgaatatggctctttttcagaaaaagccattaagaagttgttgccgttgttgcgattaggaaaatattggaattgggaaagtattgatagaaaatctcagggaagaattgaaaaaatcatcacaggtgaatttgatggaaatattaaggataaagtgagagaaaaggcaattcatcttactgcggaaaatgattttcaaggtttgcagttatggttggcccaatacattgtttatggaagacattcagaagcatcaatgattggtaaatggaattcagctgatgacctggaagaatttttaaaaggatttaaacagcattcacttcgcaatccaattgtagagcaggtgattacagaaacacttcgtgtagtgaaagatatctggttaaaatatggaaatggagctaaagatttcttcagcgaaattcatattgagttgggaagagaaatgaaacaaacaaaagatgaaagagtagatgccacaaaaagaataacggaaaatgaaaatacaaatcttcgtataaaagctttactggcagaaatgatgaatgataattctgtagaaaatattcgtccttattctccgatgcaacaggaaattttgaagatttatgaagatggaattttaaaatctgacatagaaattgatgatgacattctgaaaatcagcaaaacagcccagccttcttcatcagatttaaagaggtacaagctttggctggaacagaggtataaatcaccttatacaggacagattattccattaaataaattatttacatcggaatatgaaattgaacatatcattccgcaaagtagatattttgatgacagctttagtaataaaattatttgtgagtcagcagttaataaattgaaagataattatataggtttaggattcataaagcagtttggtggaatgattgttgaatgtggttttggaaaaagtgtagaaatttttaaagctgaggaatatgaagattttgtaaaaaaacactatgccaataatagaagcaaaagaaacaaactccttttagaagagattcctgaaaaaatgattgaccgtcaattgaatgatactcgtcatatcagtaaatatatctcaggtgttctttccaatatcgttcggcaggaagatggtacagatgaaggtgtgaattctaaaaatattgttcccggaaatggaaaaattactacacaacttaaacaagactggggtttgaatgatgtttggaatgaattaattctaccacgttttgagcggatgaatcaattgaccaattcaactgattttacttcgtggaacaaaaatcatcagaagtttttacctactgttccgattgaattttcaaaaggattttccaagaaaagaatagaccatcgccatcatgctatggatgctttggtaattgcatgtgcaaccaaagaccatattaatcttctcaataatcaatcagcaaaatctgatactaaacgatatgatttaaaaagaaagctgatgaagtttgaaagagtagtttatagtcattccaaaaccggcgagaaaattgagaaggaagttcccaaacaatttttaaagccttgggataactttactgttgatgctaaaaacaaaatggaaacaattattgtcagttttaaacaaaacctacgggtgatcaataaagcaacaaatcattacgaaaaatggattgaaaaagatggtattaaaagaaaagaactgataaagcaagaaggaacaaactgggctatacgaaaaccgatgcataaagaaactgtttcaggaaaagtagatcttcctgggattaaaattccaaaagggaaaatattaactgctacaagaaagagtttggatacttcattcgatctgaaaacaatcaattcaattacagatacggggattcagaaaattttaaagaactatttagaatttaaaggaagttctgaattggcattttcacctgaaggaattgaggatatgaataaaaatatcgaaaaatttaatgatggcaaaccacatcagtccatcaacaaagtcaggatttttgaattgggaagcaaattttctgtaggtcaaacaggaaataaaaaagataaatatgtggaggcagccaaaggaacaaatttgttttttgcggtttatgaagataagaatgggaaaagaagttatgagacaattcctttgaatgaggtaattgaaagacaaaaacagggattggattctgtttcatttaagaataaagaagacttcttactttgtcctaatgatttagtttatgttccatcagaagatgaacttgaaaatatatataatatagattttaagaatttaacgacagaaaaaacaggaaatatttacaaagttgtcagtttctcaggaaaccagatattttttattagacaagatattgcaatatctatcgtcaataaagcagaattttctactttaaataaaatggaacgtgccattgacggatcaatgatcaaagagaattgtattaaactgaaaatagatcgtctaggtaacattgccaagatataataatatgatcactcgctctatttacataggtaatcctgcatatctcaaactgaaagatgaacagatgaaaatcctttgtcctgaaacgaaatcggagaaaggaagtattcctgtagaagatttgggattactgatgctggatcattttcagattacgatttcacatcagcttattcagaaaatgatggggaataatgtagtagtgatcagttgcgatatgcaccatttaccacacggaataatgctcccaatatatggacatactgagcattctgatagagtaaaagatcagctagaagccagcgaaccacttaaaaaacaactttggaagcagaccgttgagtgtaagatcgaaaatcagaaaaatgttttggtaaaactgggaaattattatgagcctatgttggaatatcagaagaatgtaaaaagtggcgatatcaccaatatggaaggcattgcagcacagcattactggaagtacctcattagcctggattttctgaggcagcgttttggagattcacccaatcagttttttaattttggatattcggttctcagaagcattgtcgcaagggcaattgttgagaccggactgcttcccgttcttggaattttccataagaataaatacaatccttactgtcttgccgatgatctgatggaaccttatcgtccttttgtggatttattagtaatgcaatggcttacaatcaattcagaaatggaagaattaactaaagaatttaaagctttcatcttacagattgcaaccaaagatgtaaaaatagatgataaaaccaggccgttattggttgcagtaaaaacaacagccacatcactttataaatgttatacgggagaaaaacgactgatctcttatcctgaattgatatgaatgccgaaaggtttaatgcataccggattatgtgggttttagtattatatgatcttccgaccgaaaccaaagcaaatatgaaagatgctaaccgcttccgtaaggctttgattgatgatgggtttacattatttcagttttcgatgtatgtcaggcattgcccaagccgtgagaatgcggaagttcacatcaaaagggtaaagtttatgcttccaaaagcaggaaaagttgccataatgtgtattactgacaaacaatttggagatattgaaatattctttgccagaaataaagaagaacctcctccaacctttcaacagctcgaattattctaaattttgaatcctaaaaataaaaacaatctgctgattttcagtagattgttttttgaggctgtgactaatcacgaagataataatttttgaaagcaattcacaac

SEQ ID NO: 1472 - DNA, 5951 bp, synthetic construct
  source 1..5951: mol_type = other DNA
  misc_feature 1..5951: note = Synthetic
cctgagccaataatcaaacattttattctttctatattctctgccatatctattttatttttaaaacttctgcaaatttagttaaaataataattctttttgttttcaaaggataactttatgtaatgaaaattacatttctaaattttagacgataaaaatatcaaaaactttcatacatcttttaaaaaacaacgaaagaagttaattttcacatttttaaaaaataagtttttaaaacttaaaaaatttacgcttagtcttggcaaaaagttagcgttcaatttgacaatcgaagatgttttattttagtattactctttatctatctataaattaaagcacctaaattttatcttttaaaaaaactgaaagaaaaactgcataaaaaaaagcgatagaaataaattaaattcaaatctaccactttaaatgttttcacaacggaataatcctttttgtgaattgctttcaataatacaaatgtatgaaaaaaaaattattaaaaaagggggattttccccttttttacaatacaaatattcatatatttaatgtttaaaaaaaactatactatcatgaaaagaactttaggattagatttagggacaaatagcgttggttgggcgttaattaaaaacaattttactaaaaaagagggtgaaattattgatttaggtagcagaataatacctatggatcaaaaagaattaagtgattttaattctggtaattccattagtgcaactgctgaaagaactaaatacagaggtacaaggcgactatatgaaagaaataaattaagaagagagagactacacagagtactaaatatattaaattttttacctaaacattataaagataacattgactttgataaaaaacttggtcaatttaaaaaagaagtaaagctaaattatgcatcaacagaaaatggtgaaagtgaatttttatttatgaattcttatcatgaaatgcttaatgactttaaaaataattcaaaaataccttttgattgggccttatattatttacgtaaaaaatcgctcaaagaaaaaattgaaaaagaggaactcgcttggattatactaaattttaatcaaaaaagaggttattaccaattaagaggcgatgaattaactgaagatgacgataagaaagatgttaaatattatcaattaacagtaaaagatgttgttgctaccgatgataaaaataataaaggaacatggtatcatataacatttaatgaaattgatgcagtctataaaagacaaagtaaagatgatataaaaaatttgattggaacaaaaaaagaatttataatcacaaaaactattaataaagacaatagtattaagtacaattttagagctccaaaagaaaacgattggggattaataaaaaagaaaaccgaacaggaattagacaattatttaaataatgattacactaacaaatcagtaggttcttttatctatgaaaatttattaagtgatacaagtagtaaaattagaggtaaacttattagaactattgaaagaaaatattataaaaaagagttaaaagcaatactaagcaaacaatcagaataccatagtgaactaaaagatgtaaaactttacaaccaatgtcttcaagaattatacaaacacaatgatgcccataaaaataatattaaagataaagattttaactatctttttttggatgatattatcttttatcaaagacctttaaaatcacaaaaaggtttaattagtagttgtacctacgaaaacagaacttattataaaaccatttttgatgtaaaaacaaacactaataaaaaggtattgattaaaaatcaacctataaaagcaatctctaaatcacacccattatatcaagaatttagactatggcaatggctgcataatttaaaaatttatcaaaataaaaaagaaattgatggcaatctaaaaattaattatgacgttacaaacgaaatattaaaaaaagatgctgattatacagcattatatgactttttaaaagaaaaaaaagaaattaatttaacgcaattcttaaaatatttttcagataaaaagttaatacctaaacaaaaaaaagataatttaacacatcgatggaattaccaagttgataaagtttttcctatgtgcgaaactcataatgccttagtaaatagattgaaaaaagttgttaattttaatatcgaaaaagaccttttacctgaaatggaagaaaatctatggcatataaattattcaataaaaaatccggttgaatttgaaaaagcactaaaaaagtttgctaaaaaattcaatatagataaagagagttttatcaaagcttttaaaaaacttcctccttataaaaatgaatatggttcattttcttataaggcaattagtaaattattaccattaatgcgaataggtaaatattggaatccaaacgaagttagtaatgacgagaaaaaaagaattgctgctattatggaaagaattcagcatttagatttatctgataattttgatcaaaaaaagtttgatgaagcggttactaaaatatctgatgatgacattccaaaacaattaataaaggccttttttccgattaaagataaagaaaattattattccggtttaaatacttatcaagtaggttatgctgtttacaataggcattctaaaaatatgaatacagataaatggcatacatctaatgacatacaaaattatcttaacaattttaaacaacatagtttaagaaatcctgttgttgaaaaaattgtattagaaaccttacgaacagtaaaagatatttgggattattacggacaaggtaaagaaggtttttttgatgaaatacatattgaacttggtagagaattaaaaaatcctaaaacggtacgtgaaaaaattactaaaagaaatgtagaaaacgaaagaacaaacacacgaatacgaaaattattacaagaattaattaatgaaggcgcaaaaccacattcaccaagccatcaagaaattttaaaaatatatgaatcggatgtagtaaataataatattttatcagacgaaattgaaagaattagaaaaaataatacaccttctaaaaaagatattcaaaaatacaaactttggttagaacaaaaatatatttcgccttacactggtgaaaccattccgttaagtaaattatttacaacggattaccaaattgagcacattataccacaatctagattttttgataattcttttaacaataaagtaatatgtgaagcagctgtaaatcaattaaaagacaaccaaacaggatatgaatttatacaaaatcatggtggtgaaattgttaaaataggaaataagacagttactatttttaaatgggaagcataccaacaacattgtgaatcttattttgataaaaataaaaccaaactcaataatttaataacacccgaaatcccagatgattttatcaataggcaattaaacgacagcagatatattagtaaattagttaaaggtttattaagtaaaattgttaaagaacctaacgaaaaggaagcaacttctaaaaatctaatttccgttaccggtgcaatcacaggtaaattaaaacaagattggggtttaaatgacaaatggaatgaaattattttgccaagatttaaaaggttaaataaactaactcaaagtaatgatttcacctatattaatgaaaaaggcattgaagtgcctacagtatccgaagatttaattaatggttttaataaaaaacgaattgaccatagacaccatgcattagatgctttggtgatagctgcttgcacacgtaaacacattcaatatataaattcattgaataatgataaattaaaatatagcttacaacttggtttaatgataaaaaacaaacaaggtaactttaccaaatattttcaattaccttggaaaacattccctattgatgcaaaaaaatcattagaaaatacaataataagttttaaaaaaaatatacgagttatcaataaaacaaataataagtattggaaatttgtacaacaacctaacggtaagtataaaaaaagtttagtgccacaaatcaaaggtgaaagttgggcaatacgaaaaccaatgcataaagaaactatttcaggtaaaattaatgagcaaacaaaaaatggtaaaattataacagcagtaagaacaccattattaaatataaaaactctaaaacatatcaagcaaattacagatagtggaattcgtgatataataataccaaatcatctaaaaaaatatatagatgataaaggaaaaccgatgtttgataaagcatttagccctgaaggtataaaagatttaaacgataatataattactttaaacaatggtaaaaaacatcaacctatctataaagtaagactatcggaagaaggcagtaaatttaccgtatcggataataaaaattcaccgaaacacaaaaaatatgttgaagcagcaaaaggtacaaatttgttttttgcggtatattgggatgctaaaaatcaaaaaagagtatttgaaaccgtaccattagttgaggttattgcacatcaaaaagaagtagctaatttaccaaaagacgcacgcacaccaataccaataaagaataaattaggaacgtttttattttatctttccccaaatgatttagtttatgtacctaccgaggaagaacaattaaacccaaaattagtagattttactaatttaaacaaagagcaagttaataggatttattctgttaatgattttagtaccacagcttattttactccaaataattttgcatcaaaaattgcagataaagaagtagatttaaagattaataagaaaaataaattgtcaggttcttatgattctaaaacagcaagcatagataataaacaaattaaagatatatgttggaagttagaaataaaccgtttaggtagaattgaaaatgttataattccaaaaatttgatatgataaaacgaaccttattttttaccaatcctgcttatctaaaaactaaaaataaacaattggttattagctatccggataaagataaagaagtaaaaacaattgcaatagaagacattggtataattgtattagaaaatcaacaaattactttaaccaatggtttaattgccaacctatgcaaaaacaacacaactataattacttgtgatgacaagcatatacctgtttgtgttttacaacccttaacaggtcatagtgaacaaaccgaaagatatcagtttcaacttaatgcaagcataccacttaaaaaagctctatggcaacaaacaattagcaaaaaaattaaaaatcaagcaattttattgcatttaaacaaaataccttgtcataaaatgtataaatgggcaaaagatgtcaaaagtggcgatactgaaaatcacgaaagcagagctgccgttttttattggaaaaaattatttgatatacaatattttacacgagagcaatttggtatctatcctaataactttttaaattacggttatgccgttttaagagctgttaccgcaagagcattggttagtagtggtatgttaccctcggtaggtatttttcataaaaataaatacaatgccttttgtttagcagatgatattatggaaccatatagaccatttgtagacaaattagtgtttaaaataattaacgaaaatcctaatataacggaattacatactactataaaaatgcaattactacaaatacctgttttagatgtatatatagataaaaaaagaagtccgttaatgattgcaatgagcagaaccactaacagtctatttgaatgttttaaaggaatccatagaaagattaaatatcctgaattacaataaaaaaatgaaaagttccttaacttgtt

SEQ ID NO: 1473 - DNA, 5802 bp, synthetic construct
  misc_feature 1..5802: note = Synthetic
  source 1..5802: mol_type = other DNA
ttgtaaatcttcctttgctatttgtaaattaaactatggactttataagttgcactgtgcaagttgtaaaccttcctttgctatttataaagtgaactgtgcacattatgagttgaactatgcgtgttgtaaatcttcctttgggatttgtaaacggaactatggactctataagttgaactatgcaagttgtaaaccttcctttgctatttacagagtgaactgtgcacattatgagttgaactgtgggtttatgttcattgtttgttgttttttgtttgtaggttggctcttggcactcgttgtttaatactaagcaataaaaataaaagataaaatacaagaaaaccaaaggcaaattgaatatttttatatatttacggagaatttatatgataaaataaaaactcgaaatatttggacaaaaaaaagcctcctgattatggacaagaggcaacccaaatgttttcacaacggaataatccttattgtgatttgctttatttcgtgagacaaagatatagaaaaatttataaaaacaaaatataatgaaaaaaatattgggattggatttaggtacgaatagtattggttgggcattgataaatgaagattttgaaaagaaagaaggaaaaataattggacttggaagtagaattattccaatgtcgcaggatattatggataaatttggaagtggcggacaaacagaaacaccagcagcaagtagaaccaatgcaagaagtattcgtaaattatatcaaagagataatttacgaagagaaagattgcatagagtattaaacattttgaactttttacctgaacactataaaaatgaaatagattttatttcgcataaagggcaatttacaaatcatgctgaaccaaaattgccttatttcaaaaaccaagagggtaaatttgaatttctttttaatgaatcctttaataaaatggttgaagaattcaggcaatcaaaacctgaacttttctattttaaacaaaatggaaaagaaactaaaataccttttgattggacaatttattatttgagaaaaaaagcattagaacaaaagatttcaaaagaagaattggcttgggttattttaaatttcaatcaaaaaagagggtattatcaacttagtgaagaaaatgaaattaatgaggataaaattcaaacttatgaagtattaaaagtaaaagatgttattgatacaggagaaacaataaaagggaaaaatgataaattacatgatgttttttttgaaaatgggtggaaatatgataggcaagttgtaaaaattgaagattggattggtaaaactaaagaatatattgttaccgaatcagtgactaaaaacggagaaataaaaagaacgtttaaagcagtaaattcagaattagattggattgcgattaaacaaaaaacagaacagtttattgaaaaatctggcaaatcagttggccaatttatatacgatactttattagaaaatccaaaacagaaaattaatggaaaattagtgagaactattgaacgtaagttttacaaagccgaattaaaaagcatactggaaaaacagataaaagaacatcctgaattagagaacgctgaattttacaaggcttgtattttagaactttacccaaataatgaaggacataggagaaacattgaaaatcgagattttgcacatttgtttttaaatgatattatttactatcaaagaccattaaaaagtaaagtttctttaattagcgattgttcattagaatatagaattagaaaagataccggagagaaagtgtatgttaaatgtattgctaaatcaaatccaatatttcaagaatttagattatggcaatttattagtaacttaaaaatttacgaaaaagaaaaattggtaaataacaagactgagtatgacgtgaatgttacggagcaatatttatctgacgaagaaaaatggattgaattatttgattggcttaacgataaagaggatattacacaaaaacaatttcttagtttttataagctaaaagaagaaaagtatagatggaattatgttgaagataaaaattatccttgcaacgaaactagagctaaatttattaaccgtgtaaaaaaaattgaaggattaacggttgatttcctaagctcagaaatagtacaacatttatggcatcttttatattcggttacagaccctgaagaaagaaaaagtgccatctctaaatttgcgataaaacatgaattaagcgaagattttattaaatcttttgagaaatttccaccatataaaaaggaatatggttcgttttctgaaaaagcgataaaaaagttattgccattaatgcgctttgggagatattggaaacatgataatattgattcgaaaactaaggaaagaatagataaaattttaactggtgagtttgatgagaaaataaaaaacagagtaagagaaaaagcaatccatcttcaaagaacagaagattttaaagcattgccactttggttggcttcatatattatttacgataggcattcggaagctaatgatattaaacattggaatagcccaaatgatattgcagattttttaaatccaaatcttaaaggctcattcaagcaacactctttaagaaacccaattgttgaacagatattaactgaaacccttcgagttgtaaaagatatttgggaagagtttggaaatggtgaaaataatttctttgatgaaattcacattgaactaggcagagagatgaaaaacgattcaaaaactagaaaaaggatttctgataaagtaatcgaaaatgaaaatactaatcaaagaattaaagaacttttaaaagagttgatgcaagacggaattgatgttagaccatatagtcctagtcatcaagagatattaaaaatttatgaggatggtatttaccaaaacgaaaataaaaaagaagaattagaaataattgataaaatcagaaaaaacaatacaccgagcaaatcagatattcaacggtacaaattatggctcgagcaaggctacatttcaccttacacgtgcaagatgataatgctttcagaattattttcacctaaatatcaaattgaacatatatttccacaggctcgctattttgatgattcaatgaataataaagtaatttgtgaagcagaagtaaatcaattaaaagataatcgaactgcatacgaattcatcactgaattcggaggaagtaaagtaagtattggcggtaaagatttaaccatactttctattgatgattacgaagcacacattaaaagctattttgggaaaaataaaattaaacgagaaaatttattaagtgctgatatcccagaatcctttattaatagacaaatgaatgatagtcgctatataagcaaaactgttaagaacttattaagcaatattgtacgagaagaaaatgaagaagaagtaacttcaaaaaaagttattacaattactggagcaattacctcgcaaatgaaacaagattggggattaaatgatgtttggaatgatataataacaccgagatttgaaaggatgaatgagttaactaaatccaataattttggtggtattaatcctaatacaaataagtttttgccaaaagtaccagatgaaattgccaaaggttttaataaaaaaagaattgaccataggcatcacgctttagatgctttggtaattgcatttactacaagaaatcatattaattatttaaacaatttaaatgctaaaaacgaaaacgacaaaacaataaaattcgaattaagaaatacattgctttataaatctaaaactgataataatggaaattataaatggcaattttataagccttgggaaaacttcacacaagacacaagaaaacaattagaaacaaccttaattagttttaaacagaacaaccgagtaattaataaaaccaaaaataaatttcaaaaatgggttgcggatgaaaatggtgttttgaagaaaaaaatcgtaccacaaaccaaaggcgataattgggctataagaaaatctttgcataaagccactgtttttggaaaggttgaattaattagaaatggaaaaaactattatgctgatgcgggaagaattattttatctgaaaaattttcccgaaaacaacttgacagtatcacagatacaggaattcaaaaaatattagaaaatcatctgaaaaattatactgatgataaaggaatagaacaatttgatttggcttttaatgcagatggtatcgaaaatttaaataacaatattagaatcctaaacaatgggaaatctcatcaaccaatttataaagttagagtttcagaagtaggaagtaagtttaatgtgggtaataatggaactaaaaacaagaaatatgttgaagcagataaaggaaccaatcttttctttgcaatttattggaatgagaaaaaacaaaaaagagaatttgaaaccattcctttaaatattattatagaacaccaaaaacaagatgcgtgcttaccaaaagacgagcgtacgccagttcctattaacaaagaaaaaggaacgtttttatttacactttcgccaaatgatttagtttatattcctacaattgatgaaagagaaaatccacaaattgttgattttgataaattatctaaggagcaaattaataggatttataaatgtgtaagtttttctggatctcagtgtttctttgtgagaaatgatattgcaacaacaattaaaaataaagaagagttttctgctttaaacaaaacagagaaatcaattgaattaaataaagaaataatgataaaagagttttgctggaaattaaatgctgatagattgggtaagataagaaaggttatgaaatgataaaacgaactctatatttcggcaatccagcttatttgagcaaaacaaataatcaattggtaataaaaatgcctgttgttgaaaaaagcgaagacctccccgactcttttaaaaaagatgcgaccaccactattccgattgaagatattggtgttgttgtgctcgaccatcagcaaattactatttcgcaagcactattacatacatttattgaaaataatgtggcagtagtttgttgcgacaattcgcatatacccactggcttattgatgccattgagtgggaatacaatacaagcggagcggtttaaatcgcaaatagaagccagcgaacctttgaagaaacaactttggcagcaaaccataacggctaaaatacttaatcaggctgctttgttgaatagacaaaacatcaatattgctaatatggagcattgggctgactctgtgaaatcgggtgatactgaaaaccatgaagccagggctgctgcttatttttggaaaagcttgttcccaaaagaatttgattttaaaagagaacgtgaagggctgccaccgaacaatttattaaattacgggtatgctatattgagagcagttgttgctcgttgtttggttgcatctggtttgttgcccactttagggattcatcatcataatagatataatgcttatgctttggcagatgatataatggaaccataccggccttatgttgatgaaatagttgtaaatattattacaaaaggtgaagattttaatgaattaaatacttctttgaaaaaacaattgttgagcataccggtaattgatgttattattgatgaacagcgaagtccattaatgatagcagtacaaagaactaccacatcgttagtaaaatgttttgaagg

SEQ ID NO: 1474 - DNA, 5799 bp, synthetic construct
  misc_feature 1..5799: note = Synthetic
  source 1..5799: mol_type = other DNA
atggagtgtggtttcaaaggatgaaaaggatcaattaaaaaggatagaaggaatcggaagccggatcattccgatgagctaggacatattaggaaattttgcagtgggtaattctgtctcccaaacggcggaaagaacggcttttcgtagtgtgagacgtttgcgggaacggcatttgttaagaagggagcgattgttgcgggtattacatttgatcggatttttaccagctcattacgatgcttcaatcgggtgggataaaaccgattaccggacttttgcaaaatttaaaaatgttgccgagcccaaaattgcctggaaaagtgaggaaaaaggaaatcggacattcatttttggagatacattcaaggaaatgttgttcgactttatgcgggaacatcccgatttagtggccggagataaaaaagttccttatgactggacaatttattatctacggaaaaaagctctggagaagcctattgctaaggaggagctggcgtggattattctgaattttaaccaaaagcgtggatattatcaactcagaggggaagatgaagaacaggaaacgaataaatctgtcgattactatgaattgaaggtggtggacgtacaagccgaggaaccgcaaaaagggaaaaaagacatttggtataatgtcattttggaaaacggttggatttaccgccgatccagtaaagtttctttatcggaatggattggaaaaacgaaagaattcatagtgacgacagaattaaatgctgacggaacgccgaaaaaagataaagaagggaatgataagcggtcgtttagggctccaatggaaggtgattggatgttattgaagaaaagaacggagactaatatagaaaaaagccgtaaaacagttggttgctatatatacgatactttattacaaaatccggaccagaagatcaaaggaaagctgatacgtacgatagaacggaaattctacaaacgggagttattggagattttacaaaaacagtccgagttccatccggaatttcaggataaagatgtatatagagcctgtctcgaagaactttacccgcaaaatgagaatcgtcggttgaatttagcgaatggtaatctggtacaccttttattggaagatattctattttttcagcgtcctttaaaaagtaaaaaatctttaattagcaattgccggtttgagtatcggatttttgtgaaagacggtcaaaaacagatcgttcctttaaagtgtattgctaaatccaatccattgtttcaggaattccggctgtggcaatttattcaggatctgagaatataccaacgggaaaaagaagtaggcggtaaattgcggacggatgtcgatgttacttccgaatttttaccgactgaagatgcctttgtggagttattcgagtggttaaatacccgtaaggatatcaatcaaaaagtgttattgaaatatttagtcaaaaagaaaccggagttttaccgttggaattatgtggaagataaaaactatccttgtaatgaaacccgtgcattaatcttataacgtttggaaaagtgtggcttatctgttgattttttgacgaaagaaaatgaaatgtcgctttggcatatcctatattctgttaatgatctcggtgaacttacgcaagcattgaaatcttatgcgttgaaacatggactaaacgatgaatttgttcgaatattccgaaaatttccgccttttaaaaatgaatacggagcttattctgaaaaagcgataaaaaaattattacccctgatgcgtatggggaaatattggaataaagataagatcgatgggcatacattacaacgcattgaaaaactgcttacgggagaatatgatgaaaagatcggagaccgggtacgtgaaaaagcgattcatttaacggaaatatcttcttttaaaggtttgcctacatggctggtgagctatattgtttacgatcgtcatgcagaaaccggcggaatcaggcattggaaaacacctcaggatattgaacattatttaagtacggaattcaaacaatattctttacgaaatccgattgtagaacaagttattacggaaactctacgaacagtgaaagatatatggcaacaatacggtgattttgccgaaattcatgtagagttaggccgggatatgaaaaacaccgctgaaagacgggcacaattagcgaagcagagtgctaaaaacgaagatacgaatttacgtttaaaggctttgttaatggaactgcagaatgatccggaaatagaaagtgttcgtccctattctcccagtcaattggaaatattgaaaatttatgaggaaggggtattggcggccgaaaatgaactgccggacgacattgaaaaaatatcgaaaatgaatcaaccaacccagtcggaattaatccgttataaattatggttggagcaaaaataccgttctccttatacgggtgagattatacctctaagtaaactttttactccggcttacgagatagaacatgtcatcccacagtctcgctatttcgataattcattaagtaataaagtgatttgtgaatcggaaatcaataagctcaaagataatgctttaggatatgagtttatcagggaccatgagggagagattgttcaatcgaatttcggaaagagattaagagtttttacgcttggtgaatatgaacaattcgtcaaaaagaattattcccggaatgacaagaaaatgaaaaaattattgatggaggatatacccgattcgtttattcagcgtcaattgaatgatacccgttatattagtagggaagtcagaacattgctatctaatattgtgcgggaagaggatgaacaggaaatatctaaaaatgtaatttcttgttcaggcggaatcaccgaccggttgaaaaaggattggggactaaatgatgtatggaataagatcattacgcctcgttttgtcagattgaaccggatgacagagtcgtcaaagttcggagagtggaaaaacgggcatttccaaatacaaatgccattggaattgcagaaaggattcaataaaaaaagaatagaccaccgacatcatgcaatggacgctcttgtgatagcttgtgctacgcgaaaccatatcaattatttgaataatgagtccgctttaaaagatgcaaaaatttcccgttacgatttaaaacattcattatgtcaaaaatcaaaaccggatgctaacggaaattatagttggtcgttcaggaaaccgtgggaaacatttacgcaagatacttgtgaagcattaaaaagcgttgtcgtcagtttcaaaaaaaatgtaaggataatcaataaaacgacaaattattatcaggcatatgagtacgggaaaaaggtgatgaaaaagcaagtgaaaggcgatagctgggctatccggaaatcattgcataaagcatcggtttttggaaaagtgtcgcttcgtcggcaaaaagaagtacggctcggtgtggcattggaaaattggaatatgcttgtagataaagaattgaaagagaaaataaagcaactgataacccaatatggtagggaagatgttaaactattcttgaaatattttaaagaccgcgaaaataaattcaatggcaaggatatctctaaagtgtctatatattactgggatacggaaaatgcagctatccgtaaaccattggattcttcgtttactgaaaaagaaataaaaaccataacggataccggaatacagcagattctactgaatcacttacaggcaaaaggcggacagtctgatattgccttttcgcccgaaggcctcgatgagatgaataaaaatctaatacagctaaacgaagggaaaggccacaaaccgatttataaagtcaggattttcgagccgatcggtaataaatttcaggtaggagagacgggaaataaatcaaaaaaatttgttgaagctgataaaggaacaaatttgtattttgccgtgtaccgggcagaaagtggtaaacgtacttattcgacagtacctttgaatgaagtggcagaaagacaaaaacagggattatcccctgtaccggaaacggatatgaaaaattcggcttctcttttattttggctgtcacctaatgatttggtttatgtgccgaccatagaggaacgagaaaattttcaggaatttgattggaaaaatctgacagaagagcaaacgggtagaatatataagatggtgagtagtacaggtaatcaggctttttttattcagatgtctgtagcaaatcctataataaataaatatgagtttgcgtctttgaataagatggaaaaaacaatagatggggagatggtaaaagaattttgttggaaattgaaagtggatcgtttagggcatatcattgaatgtatccggtaaagcgcattgaaaatgtttaatcagctatgaagtgttatgataaaaaagactctttattttggtaatccgacctatctctcccttcggagtgaacaattagttataaagcttccggaagtggagaagggggatttaccggattcttttaagcaggaggctacgcggacgattcctattgaagacattggtgtggtcgtactcgatcataaacagataactttaactcagggggtcatcgaaaagttgttagaaaataattgcgccttgattacttgtggaagcaaccgcatgccagtgggattaatgttgccgctttgtgggaatacgactcaaaatgagcgttttcggagtcagttaaatatttcattaccattacaaaaacagctttggcaacaaaccgttcaatataaaattcgtaatcaggcatcggttttaggaggcatgcggggaacgatcgtaaaaaatatgcaggcatgggtaaaagaagtaaaaagcggagatccggataatctggaggctcgggctgcagcctattattggcgtaatctttttccggaaataccggactttacccgtgaccggggaggatgcccgcctaataatttgttgaattatggttatgccattttacgtgctgtagtcgctcgttctttagtaattagtgggttactccccactttggggattcatcaccataatcgatataatgcttattgtctggccgatgatattatggagccttaccgtccgtatgtggatgagttggtcgtgaaaattgtcgatagtggtgtggattgttcagaattgacaaaggaaataaaaagtcaattactcactattcctgtaatagatgtagttataaatggggagcgtagccccttgatgatagccgtgggacagacaacagcttcattgtataaatgttttagtggagaattgcgaaaaatcatgtatccagaaaaatcttgatggaccgatttagtgaatatcgtatcatgtgggttttggtattctttgatttgccgacagaaacgaaaaaagagagaaaaatgtcctccgattttcgtaaaggtttgttaatggatggctttactatgtttcagttctccatttatgttcgtcattgtgccagtcgggaaaatgctgaagtccatattaaaagggtaaagaatcttttacctccccaaggacatgtcggcattttatgtattacagataaacaattcagcaatatagagatattttattcgcagaaaattatccagccctcaactccaggccaacaattggaacttttttaaaataagaaaaccacctttatagtggttttcttatagaaaataataggtgatttttaaatccta

SEQ ID NO: 1475 - DNA, 5714 bp, synthetic construct
  misc_feature 1..5714: note = Synthetic
  source 1..5714: mol_type = other DNA
ttatctgatattcaatacattaacaaaacctctcataactcgcatatttgcgcccgacgaagagcccgcccgcaaatactcgcttatttttcggggtagaacagaaaactgaggccgaaaaaccgaaatccgcttacaatctgaaagtgccacgtaccggcatcccctcaactgaaggaaagacgccgtctcagacttaatcgcaaaccgtcatcagaccgcaggcctttgtccccgtattgaaactggtccctttttctttctcacggccccgatataaaccttaaatctacgtttccggcttcggtaaatacagatgcctcgtgcttgtagttgctgttatttttcctatatttgcaatataatatttttgcaatctattgttcggacatgaaaaaacataaattatgaaaaagatattaggactggatctgggaacgaacagcattggttgggctgtggtgaatagtgagaacgacgaaaacggtgatgaaaagataaagtgtatagaggcagccggaagtagaataataccgatggatgctgcgacattgggcgactttgcaaagggcaacaccaagtcgcagacaaaggaacgtactgatgcaagaggcataagacgcttgcacgagcggcatctgctcagacgcgagcggctcaacagggtgttgtctgtcatgggtttcctgcctgagcactatgacaatgcgctcacacgatatggaaagttcaaggacgacaaggagtgtaagatagcatggaaaagaaacgatgacggcaaatggactttcattttcatggattcgttcaacgagatgctgtccgatttcgctgcctgtcagccagattggttggccggaggaaaaaaggtgccttacgactggactatttattatctcaggaagaaggctctcagtcgtgcgcttacaaagcaagaacttgcctggctgttgcttaacttcaatcagaaacgcggatattatcagctgcgcggtgaggacgagcaaagcgaggacaaggggaagctcgtggagtattatgccgtgaaagtggtggatgtcaaggataccggcgagaaaaaaggcaaagacacgtggtttgatgtcattcttgagaatggaatggtgtatcccccctgccgccgaggctcccgattggatagggaagaccaaggagtttattgtcactaccgatgtggagaaggacggtacgccgaagaaagataaggacggaaacataaagcgctcgttcagaatgccgaaggaagatgactggacgctgataaaaaagaagacagaaagcgatatagacagctcgggcaagaccgtcggcgaatatatttacgattctttgctggcagaccctacgcaaaagataaagggcaagttggtcagaaccgttgagcgtaaatactataagagcgaactaaagaggattctggattctcagaaacgattcatacccgagctgaatgacagaacactttatacggcatgtatcgaggaactttacgagagcaacgatgcttacagacagtcgatagcctcttacgacttcacatatctgtttgttgacaacataatattttatcaaagaccgctcaagagcaagaagtctctgatagataactgtccgtatgagagccgttcgtatgtggacaaggagaccggcgaggtgaagaccgcacctgtgaaatgtgtggcaaagtcgaatcctttgttccaggagttcaggctttggcagtttataagtaatatcagaatatacgaacgccagaagattgtggatggtcatctgaaggcggatgttgatgttacgggcgagtttataaaggatgaggacgacgtcgtgaggctgttcgactttcttaacgaccgcaaggagatcaagcaagacacgttgctgagcacttatttcaaggtgaagaaaccgaaaggcaaggacagtagttatccgtataggtggaattatgtggaagacaagacctatccctgcaacgagacaagggctctgatgttgaaaggtcttaaggatgccggggtggacgaggcatttcttgacaaggcaaacgaataccgtttatggcacattctttactcggtggatgacaagcaggagataaagaaggcaatggctacgtttgtttgtaaatacaataaagatgaagagaataaaagaaaggacaagaacaataaagcaataacccttgatgacaggtttgttgaggctttcagtgccttgcctccgttcaagaaagaatatggctcttattctgagaaagccatcagacgcttgcttccgctcatgcgtatgggcaaatattggaatgtggaagctatagacgcagccaccagagtgcgtataaataatattattgatggtgtgtatgatgagactattatgacacgtgtgcgcgaaaaggccgtcaatcttaccgatgtgtcacatttccgtggcctgccgttatggctggcctgctatgtggtttacaatcgtcacagcgaggcaaaggacgtcagccgatggaacagtccggacgatatagaccgctatctgagcagtttcaagcaacattcgttgcgcaatccgatagtcgaacaggtgataaccgagaccctgcgcaccgtgcgcgatatatggagacagtatggcaggatagacgagatacacgtggagatgggccgtgacttgaagaatcctgcagacgtaagagccaaaatgtcaaagcgtgtggcagagaacgaaaatgcaaacctgcgcataaaagcattgctcacagagtttgtgaatcctgattttgaaatagacaacgtgcgaccttactctccgtcacagcaggatatgctgcgtatatatgaggagggtgtgctcgaaagcatggatgaagtgcctgattatataagcgagataataagcaagttcagccagactgatgagaagaaacgtcctacacatgccgagatgataaaatataaattatggctcgaccagaaatatcagtcaccttacacaggccgtaccattcctcttgcccgtctgtttaccgacgattatcagatagaacacgtcattccgaaggctcgctatttcgatgactccatgtcaaacaaagttatctgtgaggctgaggtcaatcagctgaaggaccgtttgctcggctacgagttcataaaggcacatcacggtgagaaagtttctgtcagcattggtgatccggttaccgttctttcggtggaggagtatgagcagcttgtacagagaaacttcaggaagaatcctatgaaaatgaaaaaattgctcatggacgacattaccgacggttttgtggaacgtcagttgaacgacagccgttatatcagtaaggtggtgaaatcgctgttgtcaaatatggtgcgtgagaaagacgagtgtgaggcaacgtccaagaatgtcataacatgtaatggcgccataacagacaggttgaaacgtgagtggggcgtcagcgatgcatggaatcgtattgtgcttccacgcttcgaaagattgaacaggatcaccggcacaagccaattcactactccgagcgctaacggacatctcataccggatatgccgctgagtcttcagaaaggattcaacaagaagcgtatagaccatcgtcatcatgcaatggatgccatcgtcatagcctgcaccacgcgcagccatgtcaatctgttgagcaacgaggcagccatgtcaaagaataaatcaacattctatcagctgtctcataagctgcggcgctacgagaatgtcatcgttacacgtaatggtgagacgcgtaccatgagtgtggcgcgtgaattttttaagccgtggcccacgttcacggtggatgtagagaaggccttacgtaatattattgtcagcttcaaacagaatcttagagttatcaacaagaccactaacaaatatcagtgcatagagaacggaaagaagaggctcaagtctcaggtgaagggcgacagctgggcaatacgcaaacctatgcataaggacactgtttatggcgaggtgaatctcagacgcatcgatgaagtgcaactcaaaaaagcagtggctaatcctaaggctgttgttgacaaggatctgaagaagaaactgatggcaatgatagaattaggattcgacttgaagaagataaaacaatatttcgaagacaacaaggacgcatggcaggatatagacctgaagaagataaaggtttattatttcaccaaagagactgacgaccgattctttgccacccgtttcggtaacgatatagtatctttgttcgccaaggttgataaacagtccaaagccaaggatattataagcagtataaccgatacaggaattcagaaaatactgctgcgtcatctcgaggcaaacgataatgatgttcagaaagcgttctcggcagaaggtgtagaacagatgaatcgtaatattgtggaacttaataatggtaagcctcataaacctatttataaggtaagaaaatatgaacaggctgataagtttgctgtaggcgtcaagggtaataaagattctaagttcgttgaggctgccaaaggtactaacttgttcttcgctgtttaccagaaagaaacggtggacagcactaccggtgatataataaagaaacgcatattcgatactattccgcttaaaacggtgatcgacagacaaaaaaatatgcagactgttgcacctgaagagaaagacggagccaaattgttgtttgtgctttcgccaaacgatcttgtttatttgccaacagacgaggaaatcagtagcggtattataaatcagccgttggggagagacagaatatataagatggtaagttgtaccggctctaggttatattgcataccttataatgtagcaaatccaataatagataaagaagaatatactcagctaaataaagtcgaatttacggatatgaaaaaatctataaaggagatatgcgtaccgataaaagttgatcgattaggaaatgttattgaaattaataatcaagcattatgataaaacgcacattgtgtttcacaaacccggcttacctgtcgctgaaggatggtcagatggtggttagactgcctgaagtagagaaaggcgacttgcctgagcgaatgaagaaagacagcataagaaccataccggtggaagacatcggtgtggttgtgctcgacaacagacagataaccattacgcatggtctgctcgaggcgttgctcgagaacaactgtgccgtggtgacgtgcgacgcacgcggcatgcctgacggactgatgctgccgctgtgcggcaatacggtgcagagcgagcgtttccgccttcagaccgatgccacgcttccgttgaaaaaacagttgtggcaacagacggtgcgggcaaagatagctaaccaggcggctgtattgcgcttgctcaccgatgctgatactgggtgtatggcgcgttggatagacgatgtgcgcagcggcgacgccgacaatctggagggccgtgccgccgcttattactggaagatgttgtttgccgctatccccggacttgaatccttcacccgtggtcgcgatggtatgccgcccaacaatctgctcaattacggttatgcgatactgcgtgccgtggttgcgcgggcgttggtgtcgagcggtatgctgccgctgcgctccccgccggggtatacgtct

SEQ ID NO: 1476 - DNA, 5523 bp, synthetic construct
  misc_feature 1..5523: note = Synthetic
  source 1..5523: mol_type = other DNA
gcaacaagtgttatttctgtcaatacttataaccaaattttgcatactggtaaacttggaatctagcaacgaaaacaaaagacaagtttttttcataaaaaattagtagttttgaaaaaattgaaaaaatacaactatgaaacacattttaggtttagacttaggcacaaacagtataggatgggcagatatcagttcaagctttgacgaaacaacccaaaaagaacaactaaaaggtatagaggctgcaggaagcagaataattcctatggatgccgcccaattaggagacttcaataaaggaaatacagtttcacaaacagccaaccgtactcaatttcgtggagtacgccgattatatgaacgcaaaaaactcagaagagaaagactgcatcgcatcctacaattattaggatttcttcccaagcattatgccaaccaattagacaggtatggaaaatttattgccaattctgagccaaaactcgcttggacaacaaatacgcatggacttccttactttatctttcaaagttcatttcaggagatgctcaatgactttttacaaaacaacagccaaataaaaaaagttccatacgactggactttgttttatttgcgcaaaaaggcattgatacagaaaattgaaaaagaagaattagcttgggttttattaaatttcaatcagaaaagaggatactatcagctgcgcgaagaggaaacagaaaaagcatcttctaaaacacggcaatattttgacagccagattgtaacagatattactgacacagggcaagtttataaaggattaaaaatattcacaataacacttgaaaacggagagaaaggaaagtttttcagtaaaaacatgcccgactggaaaagtcagaaaaaagatattattgcaatcatagaccttgataaaaacggaaatgacaaatatgatgaaaatggagagttaagccgtcgtttcaaaattcctaccgaacaagaatgggaagaacagtgggagcttattaaaacaaaaactcaaaaagatcttgacacatctcataaaacagtaggcgcatacatctatgatacactattacaaactcctagccaaaagattcggggaaaattgattcgcaccattgaacgcaagtattataaagacgaattaaatcagatattaaagaaacaagaagaatttcacccagaattgcgagactccaatttattagaagcctgcattgaagaactgtatcctaataacgaagcccatcgtaatgctattgcaaaatatagcattgcccaattgcttattgaggatattttattctatcaacgtccacttaaaagcaaaaaatcgcttattagtaattgtccttactaagaatacacatacatcaataaagaaacaggagaaatatgcacttctccgttaaagtgtatagccaaatcacatcctctttttcaagagtttcgtctatggcaatttatatcaaacttgcgaatttatcaaaaggaaggaaccataaacggaaaattcactactgacatagatgtaacaagtcaatttctgaaaaccgaagatgcctacgcaaacttgttcgactggctcaatcagaaaaaagaaatcagacaagacacatttcttaaaaacccagcatttggattaaaaaagaatacagcaaattatcgctggaattatgtagaagacaagacatatccttgtaatgagactcactacaagatactttcatattgggaaaaagcaggaatagagcaatcagccttaacatcagaaatagaagagaaactatggcatattctatactctatttctgacaagaatgaactcagaaaagctttacagcatttcgctgataaaaactatttaagcgataaatttgcagatacttttcagcaaattcctcctttcgagaaagattacggttcctattctgccaaagctatcaaaaaactattgccacttatgcgtataggaagatattggaaagcagaaaatttagacagtacaactcttgaccgtatagaaaaaatattaactggagagtttgaagaaaacataaagaaccgaaccagagaaaaaacaatccatttggacaatttatactcatttcagggacttccaacctggctggcatgctatatcgtatataaccgccattcagagataaaggacgttactaaatggcaacaaccttcagatattgatgcttttctaaacgcattcaagcaacattctttacacaatcctattgtggaacaaatcatcatggaaaccttacgcactgtacgagatatttggaaacagacagggcatattgatgaaattcatgtcgaattaggacgtgaaatgaagaatcctgccgagaaacgcagaaaactcacccaacaaatacaagaaaacgaaaacaccaatctgcgtatcaaggcacttcttgctgaatttgccaatccagaattgggaattgagaacgtacgcccgcactctccaagccagcaagatttattgcgtatatatgaagaagaagctctaaacgaaactaaagatataccagaagatattgctgttattttaaagaaattcaatgaagttgataccaaaaaacgcccgtctacatccgatgtcttacgttataaatgctggctggaacaaaaatatcgttctccttatactggagctatgattcctttaggaaaacttttcacccctgcatacgaaattgaacatgtaattcctcaatctcgttattttgatgattcattcacaaataaagttatttgtgaagcagaagttaataagctaaaaggcaatatgttaggctatgaattcatcaaaaacaatcaagaaagaatagtagaactaggattcggacaaaacgttaaaatacagacggttgaagcttatgagctatttgtgaaagaacattattcctacaaccgcactaaaatgcaaaagctattgatggaagatattccagatcagtttattgaacgtcaattaaacgacagccgttatattagtaagctaataaaatcattattatctaatattgtacgtgatgaaggagaagaagaagctacatctaagaatgttattgtttgtactggaagtatcacagaccgactaaaaaaagactgggggatcaacgacgtatggaataaactcattttacctcgtttcatacgcttgaacgaaattacggaaagcaatcgctttacgacaaccaatgcatgcaacaagacaattcctgctatgccattagatttacaaaaaggattcaacaaaaaacgtattgaccaccgccatcatgccatggatgccattgtcatagcctgcgccaatcggaatatagtcaattatttaaataatgaatcagccagcaagaatgcaaagatttcacgtcaagacctgcgacaaatattatgcaagaaaacaaaaaccgacaatttgggaaactatcaatggctcattgacaaaccttgggatacatttacccaagatgtgtattccattttaggcaacatcattgtaagcttcaaacaaaatctgcgtattatcaataaaacaactaaccattatatccactatgaaaacgggaaaaaagtaagttgctcacaaaaacaaggtgatagctgggctatccgtaagcccatgcataaagaaaccgtatatggagaaatcaacctgcgcagaacaaccactgctacattgaaagccgttcttgagaatcctcaaagaattattgaaaaagacttaaagaaaaaaataaaagagcttttaacgcaaggactcaatgaaaaacaaatcaaaaaatactttgaagacaataaagatatttggcaagaaataaatctaaagaagataccagtatactatttcaccaaagaaactgccaacagattctttgcttgccgtgaatcaataaatacaactttcaataaaaagaaaatagaagaaaaagttgcagatacaggaatccaacaaattttactgcgccatttggagcagaatggcaataatccggaacaagccttctcacctgaaggtattgaacaaatgaataaaaatattatgtccctaaataataatggaaaatttcatcaaccaatttataaagtcagaacatacgaacaagccgataaattcgctgttggacaaacaggaaataaatccactaagtttgtagaggcagcaaaaggtactaacctgttctttgcaatatatgaaactgcccataaacgcagtttcgcctctattccattaaacgtagtcattgaacgactaaaaaaaggcttgtcaccagcacccgaaaacgaaaagggtaatctacctaaatttatattatcacccaatgatttagtatatgtaccaacaaaagaagaaatagaaaatggacatattaatcaaccaatacaaaaagatagaatttataagatggtgagttgtactgaaggggaatgtcatttcattccatatttcgttgcaaagcccataattcaaactattgagttaggaagtaataacaaagcacaaaaaacttggcaagatgaaatgataaaagaaatatgcatccccatcaaaacagacagactaggaaacattataacgtcaattagcctatgataaagaaaacattatattttggtaacccagcatacctatcattacgtaatgcccaacttgtcataaaacttccggaagtagaaaaatgtccttcacttccggaagcgatgaaacgtcaatctgaaataaccaaacctattgaagatataggcgttgttattttggataataaacaaatcaccattacttccggagctattgaagcattgcttgaaaataattgtgcacttattacttgtgacagtaaaagtatgcctgtaggattaatgctccctctctatggaaacactacccaaaatgagcgttttcggaaacaactggatgcttctttgcctttaaagaaacaactatggcaacaaaccattcaagcaaaaatcaacaatcaagcatcttccttatccatatgtatatacgaagatataaaatgcatgcgtatatgggctaacgatgtacgaagtggagaccccgacaatctggaagcacgtgctgcagctttctactggaaaacactttttcatgacatcgaaaactttacaagggaccgagatggcataccccctaacaatcttttaaattatggttatgccattctccgtgcagttatcgcacgttctcttgtaacaagcggattattacccacattaggcattcaccatcataaccgatacaatgcctattgcttagcagacgatattatggaaccatatcgccccttcatagaccggctagtctatcaactatactctgaaaacaaaatggaacttacaaaagaagtaaaagccagtttattatccatccccacaatagatgtcagaatcagtgggaaaagaagtcctcttatgatagcagcaagccaaacaacggcatcactatataaatgcttttct

SEQ ID NO: 1477 - DNA, 5325 bp, synthetic construct
  misc_feature 1..5325: note = Synthetic
  source 1..5325: mol_type = other DNA
tgagtgatggttttataggtgtctgtcatgggaagtgaagaatggttagtgagaaatgaaaagtataatttgaaataaagtgtaaagatacaaaaaaagccccgaagatagtcgaggcgctaaatgttttcacaacggaatcatccttattgtgagttgctttcaaatatgggacaaaggtacaatattttttctaaataacaaattaaaatatggatttttttattaattttgtagcaaactaaaattataaaaacatgaaacgcatcttaggtttagacttaggttctaactccatcggttggggactcattgagcaagactttcagcagaaacaaggcagaattattgccgctggaagcagaattattcctatggatcaaggtcttttaggagattttgaaaaaggaaattctgtttcccaaaccgcagagcgaactttttatcgtagtgctcgcaagctccgtgagcgacatttgctgcgtcgtgagcgtcttcatagggtgctccatatcttaggcttcctgcctactcattatgataagcagattgatttctcaaaaaaatatggcaaatttgtgagtaatacagagcctaaaattgcttatcataacggaaaattcctctttatggatagttttcaggagatgctagctgattttaaaatacatcagcctgacttattctataccaaaaggaatggagaagaaagcaaaattccctatgactggacaatttattaccttagaaagaaagcgctttcaaggaaaattagtaaagaagaattggcttggattattttaaatttcaaccaaaagagagggtattatcaattacgtgaagaagaggaaaataaggagaatgattttgagattatttcctcaaaaattatatctgttattaagaaagataaagataaaaaatataataagtattggtatgatataattttagaaaatggattggtataccaagctgctttttataatgattttgtatataactggattaatcaagatagagaattcataatagaacgaacttctttaaagaatgggactgaaaaagtaaaactttcatatctacctacttttgatgaaattgataagatggataagaaagaacaggataaatactacaaaaagataaaaattaaaaccgaaaatagtattggaaataaaacagtaggatgctatatctatgatcatattctgcaaaatcctaatgaaaaaatcaaagggaaattagtccgtaccattgagcgaaaatattacaaagaagaactaaaggctattttagaaaaacaaatagctctacagcctgaactatttacagatcaattgttagccgattgtattcgagaactctatagcaagaatgaagcacaacagcgaaatctcgcagcaagagattttgtacatttgtttgtagaagatatcatcttctatcaacgccctttgcgcagccagaaatcaactattgctaattgtagcttggagtctcgttcctacatagatgaggatagccatactcgtaaagaatctcctttgaaggtatgtcccaaatctaacccttattatcaagagtttagagtactccaatggtttcaaaaccttaaaatatacgagatagataccgatcgagaggtaacccatgaatttataaagaccttagaagacaaacagcaactctttgatttcctgatggatcaaaaagagattgattgtgaggaattactaaagtatttcctcaaccagacctatccaaatgccaaagaaaaagcactaaagagtgagctgaagaaatggaaagatacttatcgctggaattatgtatatgatatgggagagaaatcctccaagaaatatccaatgaatgaaacaagatatgagcttggacgatatttggaaaaagtaactaatctccctgaacattttcttactaaagaaatcgaatatcaactatggcatctaatttattcggttactgataagatagcttatgaaaagggactaaagaaatttgctcaaagacatcacttagatgaagattcttttgtagagaatttcaagaaattcaaaccctatcccagtgaatatggtagtttttcagaaaaagctatccggaaattactccctttgatgcgttttggttctcattggaattttgatagcatagataaagatacacaaaaacgtatagaagaccttatcacaggagtagaaaatgaagaaatacgtactattctccgagaaaaagccgaaaagtatcagcttgaaaaggaaactgattttcaagacttacctctttggttggctcaatatattgtctataaccgacatgctgaggcttcctctcttgaaaaatggacttcagtgaatgacttggagacctacctcaatgagttcaagcaacattcacttagaaaccctatagtagaacaagtagttacggaaaccctgcatgtagtcagagatatttggcaacaatatgggcaaggacaagccgatttctttgatgaaattcatatagaactcggaagagagcttaagaaaaccgctaaagaaagagaagaactatccaagcaaaaccagaagaatgaggacaccaacctacgtatcaaggcattacttgcggagttaggtgaagatagtactatagagaatgtacgtccctactcacttatgcaacaggaattactcaaactatatgaggaaggcgtatttagttcctctatggaaatcgaagatgatatagagaaaatacacaagaaagctactcccaacaaagcagaattacaacgctataagctttggttagaacaaaaatataaatccccttatacaggacaaatcatctctctaaaaagactctttaccgaagattatgagatagagcatataatcccacaaagccgctattatgatgacagtctttctaataaagtaatctgtgaatcagctgtaaataagctcaaaggcaatcagttaggattagaatttatcaaaaatcactatggcgagaaagtacatgctgccggtaaggaagtaagtatatttaccgaagaacaatataaggaatttgtcaagaaccactatgctaataactcaggaaaaatgaaaaaactcctcttggaggatattcctgaaaagatggttgctcgacagatgaatgatacgtgctatatcagtaagtatatttcagaaatactctctaaaatagtacgtgcggacgagcgagatgaaggcgttaattctaagaatgttatcttatgcacaggtaagattacctctgctcttaagcaagattggggcgtgaatgatgtatgaaatgatcttatcttgcctcgttttgagcgaatgaatgcccttacccagagtacgctctttacaacctataatgaaagataccagaaatatctgcccacagtacctatggaatatagtaatggtttccaaaagaagcgtatagatcaccgtcatcacgctatggatgccattatcattgcttgtgctaccagagagcatattaactatataaataaccaacatgccttagagaagggaaaaaacaagcaagagaagcaaaaatcccgtatagacttaagaactatcctttgtgagaaaaaatacaatgacaatgctgaggaaaactatagttggatattcaaaaaaccttgggatacctttactcaagaagtacgagctgccttagaaggtattatagtaagtttcaagcaaaacctacgtgtgattaacaaggccaccaactattatgaacgttgggtagaggaaaatggtaagctcattaagaaaatggttaaacaagaaggcactaactgggctatccgaaaacctttgcataaggaaactgtttctggaaagattatcttggaaagagaaaaagtaagtaaaggaaaaatcctcacagctactcgtaaggctatagatagtacctttacagaaaaggtaattgaaggtatcaccgatacgggtattcaaaagatattgctcaactatctcaagttcaaaaaaagccctgaaatagccttctcgccagaaggattagaagaacttaacaagaatatcatgctctacaatgatggtaaaccacataaacctatctataaagtacgtatttttgaacaaggtagcaaattcccattaggtgaagtaggaaataaagccaccaaatatgtagaagcggctaagggtaccaacctatattttggaatatatcaaggaaaagacaagcgttctttcgcgaccattccgctcaatgaagtgattgaacgacagaaacaaggactgtcctctgttcctgaatataatgaaaaaggagatcccttactctttagcctatctcctaatgacttggtatatatacctatagaaggagaaatcatagaagatattgatttccgaaatctttctaacgaacaaaaagaaagaatatataaggcggcaagttttacaagaaatgaatgcttttttataaaatcaagtatagcttcccttatcaagaactatgatgccaaaacaaaaattggagaattaggtagccaaaataaattggaagtaactatttgtaaaggtataagaatcaaagaagtctgtatcaaactaaaagtagaccgtttaggaaatattagtaaagcataagatttttactcatctaatatcaataagctatgttgtaccgttctatttatataggtaaccctgcttatttgaagctgaaagacaaacaattaaaggttaccgacccagaaagtaaagaagaaaaaggcagtgtccctatagaagatatagggctactgatgcttgaccattaccaaatcaccctctctcaccagctgatacaggaactgatgaaaaacaacgtgatccttatcagctgtgatgaacggcacttacccttggcaaggagaatgccgaggtacatatcaaccgtgtcaagcaatggctacctccttatggaaaagtagctatactgactatcaccgacaagcaatttgaaggaatagaaatcttctattgtcaatcaaagaaagatcctcctaaagattgtatccagctcactcttttttagatttttagaaaacaaaaaaccttcgtttttattcctaaagtagaataaaagagaaggttttttctttttgaacttttgcgataaccaacagacaatcaatttcttttaaagattgaggttgtttgaggtcacaaagttacgaatttgaaagcaactcacaacagacagcgttcaggcttgttttagaggtcagttgtttgaggtcacaaagttacgaatttgaaagcaactcac

SEQ ID NO: 1478 - DNA, 5313 bp, synthetic construct
  misc_feature 1..5313: note = Synthetic
  source 1..5313: mol_type = other DNA
tagaggctgatggtagtcctaagaaagataaggaaggaaatataaagcgttctttccgtgcgccaaaagatgatgattggacattaattaaaaagaagacggaagcagatatcgacaagatcaagatgactgtcggcgcttatatttatgatacacttctgcaaaaaccagaccagaaaatacgtgggaagctagtacgtactatcgaacgtaaatactataaaaacgaactctatcaaatactaaagacccaaagtgaatttcatgaggaattacgagataaacagttatatattgcttgccttaatgagctttatcccaataacgaaccacgtaggaatagtatttccacacgagatttctgtcatttatttatagaagatatcattttctatcaacgtccactgaagagcaagaaatcattgatcgacaattgtccctatgaggaaaataggtatattgataaagagagtggagaaatcaaacatgcatccattaaatgtatagccaagtctcatcctctctatcaagaatttcgcctttggcaatttattgtaaacctacgtatctacaggaaggaaacggatgttgacgtaacacaagaattactccctaccgaggctgattatgtcactttatttgagtggctgaatgaaaagaaagaaatcgatcaaaaagccttttttaaatacccgccattcggctttaagaaaacaacttcaaactatcgttggaattatgtggaagataaaccttatccctgtaatgaaacccatgcacaaataatagctcgtttaggaaaagcgcatatcccaaaagcttttctttctaaggaaaaggaagagacattatggcatatattatattccatagaagataaacaagaaatagaaaaagccttacactcttttgccaataagaataacctaagcgaagagtttattgaacaattcaagaatttccctcctttcaagaaggaataaggcgataaagaaattgcttccattgatgcgaatgggtaaatattggagtatcgaaaacatagataatgggacaagaatacgaattaataaaattatagatggagagtatgacgagaacattcgtgagagagttagacaaaaagctattaacctaactgatattacccattttcgagctttgcctttatggttagcttgttatctagtttacgatcgtcactccgaagtcaaggatatagttaaatggaagactcccaaggatatagatctctatttaaaatcgtttaaacaacattcgttacgcaacccaatcgtggagcaagtgataacggaaaccttgcgtaccgtacgagatatttggcaacaagtaggccatatcgatgagatacatattgaattaggacgggaaatgaaaaatccggcggacaagcgtgcccggatgtcacaacaaatgataaagaacgagaataccaatttacgcataaaagcactattgactgaatttttgaatccggaatttggaatagagaatgtacgtccatattcccccagccagcaggatttattgcgtatttatgaagaaggcgtactaaatagtatattagaattaccggaagatataggaattatattaggaaaattcaaccaaacagatactctaaaacgtccaacacgctcggaaatactacgttacaaactatggttggagcaaaaatatcgttcaccttatacaggcgaaatgataccattaagtaaattattcactcctgcttatgaaatagaacatattattcctcaatcacgttatttcgatgattcacttagcaacaaggtgatctgtgaatctgagataaataaattgaaggataggagcctcggctatgagtttattaaaaaccatcatggagaaaaggtggaattagcttttgacaagcctgttgaggtactttccgtggaagcctatgaaaaacttgtgcatgaatcttattcacataacagaagtaaaatgaaaaagttactcatggaagatattccagatcaatttatagaacggcaactcaacgacagccgctatattagtaaagtagtaaaatctctgctttctaatatagtgcgtgaagaaaacgagcaagaggctatctccaagaatgtcattccttgtacaggaggtattaccgatcgattaaaaaaggattggggcatcaacgatgtttggaataagattgtacttcctcgtttcattcggttgaatgaactgactgaaagtacccgtttcacttctatcaataccaataatacaatgatcccctccatgcccttagagttacaaaagggattcaataaaaaacgtattgatcaccgccatcatgcgatggatgccattatcattgcatgcgcaaatcgtaacatcgtgaactatctcaataatgtgtcggctagtaaaaacacaaagataacacggcgagatttgcaaaccctattatgtcacaaggacaagactgataataacggtaattacaaatgggttattgataagccttgggaaacattcactcaagatacattgacagctttgcagaaaataacggttagctttaagcaaaatttgcgtgtgatcaacaagacaacaaaccactatcagcattatgaaaatggaaagaagatagtctccaaccaatcaaaaggggatagttgggctatccgtaaatcaatgcataaggaaacggttcacggagaagtaaatttgcgtatgataaaaaccgtatcatttaatgaggccttaaagaaaccacaggcaatagtagaaatggacttgaagaagaaaatactcgctatgctcgagttaggctatgacactaaaagaataaagaactatttcgaggaaaataaagatacttggcaagatattaatccatcaaaaatcaaagtctattactttacaaaagagacgaaagaccgctattttgcggtgcggaagcctatagatactagtttcgacaaaaagaagataaaggaaagcattacagatacaggtatccaacaaattatgcttcgacatttggaaactaaagacaatgatcccacattggcattctctccagatggtattgatgaaatgaaccgtaatattcttatattgaataaaggaaaaaagcatcagcccatttataaagtgcgtgtctacgaaaaagctgaaaagtttactgtaggacaaaaagggaataagcgaactaaatttgtagaggcagcaaaaggaaccaacctggtctttgctatctatgaaacagaagagattgataaggatacgaaaaaagtaatccgtaaaagaagttatagcacgattcccttaaatgtagtgatcgaacgccaaaagcagggactttcctcggctcctgaagatgagaatggtaatctacctaaatatatactctctcctaatgatctggtatatgtaccgacacaggaggagattaataagggggaagtcgtaatgccgatagatagggatcgaatatacaaaatggttgactcaagtggcattaccgctaatttcatcccagcttcaacagccaatttgatttttgctttacctaaagctactgcagaaatctattgtaatggtgaaaattgcattcagaatgaatatggtattggtagtcctcaatctaaaaatcaaaaagctataacaggtgaaatggttaaagaaatatgttttcccattaaagttgatagattaggaaatataattcaagtaggttcatgtatactaactaattagattttatcctatgattaagaaaacattttattttggtaatccagcttacctgtcacttcgtaaccagcaattagttattaagttaccggagatagtaaagaatgatactgtgcccgaaagcttcaaacgacaatcagaaattactaaaccaattgaagatattgcagtgatagttcttgacaacaaacaaattactattacccagggtgtattggaagcattactagagaataattgcgcagttattacatgtgatggacgaagtatgccagtaggcctcatgcttccgctttatggaaacacgacacaaaatgagcgctttcgagatcaattagacgcttccttacctttaaagaaacaactttggcaacagactattcaagcgaaaatcaacaatcaagcatcagtattatactcttgtaaaaacgaagaaataaaatgtatgcggatatgggccaatgatgtacgtagtggagatcctgacaatttggaaggacgtgcagctgcttattattggaagtatctgttcggacacatagaaggttttacaagagatcgggaaggtatacctcctaataatttattaaattatggttatgctatccttcgtgctattgttgcacgtggactagtcacaagtggtatgttacccacattgggtattcatcaccataaccgatataatgcttattgtttagccgatgacatcatggaaccttatagaccttatgttgatgagcttgtatttggtttgataagaacaaaggggatatcacccgaaatattaacaaaagaatggaaagcatcacttctttctattcctacattagaagttaagattggaggtaaacgaagtccgttaatgatcgctgtcgctcaaacaacagcctctctttacaaatgtttcagtggagagcaacgaagaatcgtgtatccagaacggtaataatcatggatcgatttagcgaatatcgtattatgtgggtgttggtattatttgacttgcctacggaaacaaaaaaagaaaagaaagcttatagtgatttccgtaagaatctgcagcgtgatggctttaccatgtttcagttctctatttatgtgcgacattgcgccagccaagaaaatgcagaagtacacataaaacgagtaaaatcatttttaccagaacacgggcaaataggaataatgtgcattacagacaaacaatttgggaatattgagttgttctatgggaaaaaagtacaacctcctaatacacccggccaacaattagagcttttctagaaataataaatcccgtcataaaacgggatttattacattggaaacttttcttttttattttctaaccattctatcatctagttgatatacagcatataatacagattaagctgtttccaatggatcaaagatactaatttgaaagcaaatcacaactccgtatgggaaaagaaattttgtcctgtcgctgtttccaatggatcaaagatactaatttgaaagcaaatcacaacaacctttgggccgaacgtgccatcgaagcgctgt

SEQ ID NO: 1479 - DNA, 5061 bp, synthetic construct
  misc_feature 1..5061: note = Synthetic
  source 1..5061: mol_type = other DNA
cggtaacgggttgagtgatggttttataggtgtctgtcatgggaagtgaagaatggttagtgagaaatgaaaagtataatttgaaataaagtgtaaagatacaaaaaaagccccgaagatagtcgaggcgctaaatgttttcacaacggaatcatccttattgtgagttgctttcaaatatgggacaaaggtacaatattttttctaaataacaaattaaaatatggatttttttattaattttgtagcaaactaaaattataaaaacatgaaacgcatcttaggtttagacttaggttctaactccatcggttggggactcattgagcaagactttcagcagaaacaaggcagaattattgccgctggaagcagaattattcctatggatcaaggacttttaggagattttgaaaaaggaaacaccgtttcccaaacagcagagcgaactttttatcgtagtgctcgcaagctccgtgagcgacatttgctgcgtcgtgagcgtcttcatagggtgctccatatcttaggcttcctgcctactcattatgataagcagattgatttctcaaaaaaatatggcaaatttgtgagtaatacagagcctaaaattgcttatcataacggaaaattcctctttatggatagttttcaggagatgctagctgattttaaaatacatcagcctgacttattctataccaaaaggaatggagaagaaagcaaaattccctatgactggacaatttattaccttagaaagaaagcgctttcaaggaaaattagtaaagaagaattggcttggattattttaaatttcaaccaaaagagagggtattatcaattacgtgaagaagaggaaaataaggagaatgattttgagattatttcctcaaaaattatatctgttattaagaaagataaagataaaaaatataataagtattggtatgatataattttagaaaatggattggtataccaagctgctttttataatgattttgtatataactggattaatcaagatagagaatcataatagaacgaacttctttaaagaatgggactgaaaaagtaaaactttcatatctacctacttttgatgaaattgataagatggataagaaagaacaggataaatactacaaaaagataaaaattaaaaccgaaaatagtattggaaataaaacagtaggatgctatatctatgatcatattctgcaaaaccctaatgaaaaaatcaaagggaaattagtccgtaccattgagcgaaaatattacaaagaagaactaaaggctattttagaaaaacaaatagctctacagcctgaactatttacagatcaattgttagccgattgtattcgagaactctatagcaagaatgaagcacaacagcgaaatctcgcagcaagagatttcgtacatttgtttgtagaagatatcatcttctaccaacgccccttgcgccgtcagaaatcaactattgctaattgtagcttggaatctcgttcctacatagataaggatagccatactcgtaaaggagcccctttgaaagtatgctccaaatctaacccttattatcaagagtttagagtactccaatggttgcaaaaccttagaatatacgagatagataccgatcaggaagtaacccatgaatttataaagaccttagaagacaaacagcaactctttgatttcctgatggatcaaaaagagattgattgtgaggaattactaaagtatttcctcaaccagacctatccaaatgccaaagaaaaagcactaaagagtgagctgaagaaatggaaagatacttatcgctggaattatgtatatgatatgggagagaaatcctccaagaaatatccaatgaatgaaacaagatatgagcttggacgatatttggaaaaagtaactaatctccctgaacattttcttactaaagaaatcgaatatcaactatggcatctaatttattcggttactgataagatagcttatgaaaagggactaaagaaatttgctcaaagacatcacttagatgaagattcttttgtagagaatttcaagaaattcaaaccctatcccagtgaatatggtagtttttcagaaaaagctatccggaaattactccctttgatgcgttttggttctcattggaattttgatagcatagataaagatacacaaaaacgtatagaagaccttatcacaggagtagagaatgatgaaatacgtactattatcagagaaaaagctgaaaaataccaacttgaaaaagaaacagattttcaaggcttacctctttggttagctcaatatatagtctataaccgacatgctgaggcttcttctcttgaaaaatggacttctgtcaatgacttggagacctatctcaataatttcaaacaacattcgctcagaaatcctatagtagaacaagtagttaccgaaaccctacgtgtagtgaaagatatttgggaacaatatggacaaggaaaagccgatttctttcaggagattcatatagaactcggtagagaacttaagaaaaccgctaaagaaagggaagaactatccaagcaaaaccagaagaatgaaaataccaatttatctattaaagaaaaacttaaagaattggaaaagtataatacaagagcttactctattacacatcaggaaaaatataaactatggttggaacagaaacatatatctccttatacaggacagattatctccctcgaaaatctctttacagataattatgaaatagaacatattatcccacaaagtcgatttttcgacgatagtctttctaataaagtcgtgtgtgaatctattgtaaataaagctccttacaaagaccggcaattaggtttagaattcattaaaaatcaaggaggaagaatagttaaagaactctccaaggaaaataaaaccataaaaatatttactgaggaacaatacagaacatttataaaggaacattatagtaacaaccctgcaaaaacaaagaaacttctattagaggatattcctgagaagatggtagctcgacagatgaatgatacccgctatatcagtaagtatatttcggaaattctctctaaaatagtacgtgcagacgagcgagatgaaggcgttaattctaagaatgttatcttatgtacaggcaatattacctctgctcttaagcaagattggggcgtgaatgatgtatggaatgaccttatcttgcctcgttttgagcgaatgaatggccttacccaaagtacgctctttacaacctataatgaaagatatcaaaaatatctgcccacagtgcctatggaatatagtaaaggtttccaaaagaagcgtatagaccaccgtcatcacgctatggatgccattatcattgcttgtactacccgagaacatatcaactatataaacaaccaacatgccttagagaaaggaaaagataaaaaggaaaaacaagaagaacgtgatacacttagagaaagactttgcataaaaaagtataataatagaagtgaaggaaactatagttggatattcaaaaaaccttgggatacttttactcaagaggtacgagctgccttagaaggcatcgtggtaagtttcaaacaaaacctacgtgtgattaacaaggccaccaactattatgaacgttgggtagaggaaaatggtaagctcattaagaaaatggttaaacaagaaggcactaactgggctatccgaaaacctttgcataaggaaactgtttctggaaagattatcttggaaagagaaaaagtaagtaaaggaaaaatcctcacagctactcgtaaggctatagatagtacctttacagagaaggtaattgagggcatcaccgatactggtattcaaaagatattactcaactatctcaagttcaaaaaaagccctgaaatagccttctcgccagaaggattagaagaacttaacaagaatatcatgctctacaatgatggtaaaccacataaacctatctataaagtacgtatttttgaacaaggtagcaaattcccattaggtgaagtaggaaataaagccaccaaatatgtagaagcggctaagggcaccaacatatattttggaatatatcaaggaaaagacaagcgctccttcgcaactattccgcttaacgaagtaattgaacgacaaaaacaaggactgtcctctgttcccgaatataatgaaaaaggagaccccttactctttagcctatctcctaatgacttagtatatgtacctatagaaggagaaattatagaagatattgatttccaaaatctttctaaagaacaaaaagaaagaatatataaggcggcaagttttacaagaaatgaatgcttttttataaaatcaagtatagcttcccttatcaagaactatgatgccaaaacaaaaattggagaattaggtagccaaaataaattggaagtaactatttgtaaaggtataagaatcaaagaagtctgtatcaaactaaaagtagaccgtttaggaaatattagtaaggcctaagattttttccctaattataaataagctatgttataccgttctatttatataggtaaccctgcttatttgaagctaaaagacaagcaattaaaagttaccgacccagaaactaaagaagaaaaaggcaatatccctatagaagatatagggctactgatgcttgaccattaccaaatcaccctctctcaccagctgatacaggaaatgatgaaaaacaatgtgatccttatcagcgcaccttcccttggcaggaatgctcccttttagtggaaacactctcttttcagaacgtgtaaaagttcaaatggaggtaagcgaacccttaaagaaacaattatggaagcaaactgtaaagtgtaagataaaaaaccaactcaaggtattagaacaattcggtaagtatgctacccctatgtatgaatacctcaaacaagtaaaatcgggagataccaccaacatggaggggattgccgcacaacactattggaaata

SEQ ID NO: 1480 - DNA, 4884 bp, synthetic construct
  source 1..4884: mol_type = other DNA
  misc_feature 1..4884: note = Synthetic
acgaaaaaagtaccctacgattggacgatctattaccttagaaagaaagcattaacacaaaaaatatcaaaagaggaactcgcttggattctttttgaactttaatcagaaacgaggatactatcaacttcgaggtgaagaggaggaaactccaaataaactagtagaatattattcattgaaagtaagaaaagtcgaagactcgggagagagaaaaggcaaggacacctggtataacgtacatttggagaatgggatgatttaccggcgcacaagtaatataccattggattgggaaggtaaaactaaagaatttatagtcaccactgatctagaggctgatggtagtcctaagaaagataaggaaggaaatataaagcgttctttccgtgcgccaaaagatgatgattggacattaattaaaaagaagacggaaagcagatatcgacaagatcaagatgactgtcggcgcttatatttatgatacacttctgcaaaaaccagaccagaaaatacgtgggaagctagtacgtactatcgaacgtaaatactataaaaacgaactctatcaaatactaaagacccaaagtgaatttcatgaggaattacgagataaacagttatatattgcttgccttaatgagctttatcccaataacgaaccacgtaggaatagtatttccacacgagatttctgtcatttatttatagaagatatcattttctatcaacgtccactgaagagcaagaaatcattgatcgacaattgtccctatgaggaaaataggtatattgataaagagagtggagaaatcaaacatgcatccattaaatgtatagccaagtctcatcctctctatcaagaatttcgcctttggcaatttattgtaaacctacgtatctacaggaaggaaacggatgttgacgtaacacaagaattactccctaccgaggctgattatgtcactttatttgagtggctgaatgaaaagaaagaaatcgatcaaaaagccttttttaaatacccgccattcggctttaagaaaacaacttcaaactatcgttggaattatgtggaagataaaccttatccctgtaatgaaacccatgcacaaataatagctcgtttaggaaaagcgcatatcccaaaagcttttctttctaaggaaaaggaagagacattatggcatatattatattccatagaagataaacaagaaatagaaaaagccttacactcttttgccaataagaataacctaagcgaagagtttattgaacaattcaagaatttccctcctttcaagaaggaatatggctcttactcggctaaggcgataaagaaattgcttccattgatgcgaatgggtaaatattggagtatcgaaaacatagataatgggacaagaatacgaattaataaaattatagatggagagtatgacgagaacattcgtgagagagttagacaaaaagctattaacctaactgatattacccattttcgagctttgcctttatggttagcttgttatctagtttacgatcgtcactccgaagtcaaggatatagttaaatggaagactcccaaggatatagatctctatttaaaatcgtttaaacaacattcgttacgcaacccaatcgtggagcaagtgataacggaaaccttgcgtaccgtacgagatatttggcaacaagtaggccatatcgatgagatacatattgaattaggacgggaaatgaaaaatccggcggacaagcgtgcccggatgtcacaacaaatgataaagaacgagaataccaatttacgcataaaagcactattgactgaatttttgaatccggaatttggaatagagaatgtacgtccatattcccccagccagcaggatttattgcgtatttatgaagaaggcgtactaaatagtatattagaattaccggaagatataggaattatattaggaaaattcaaccaaacagatactctaaaacgtccaacacgctcggaaatactacgttacaaactatggttggagcaaaaatatcgttcaccttatacaggcgaaatgataccattaagtaaattattcactcctgcttatgaaatagaacatattattcctcaatcacgttatttcgatgattcacttagcaacaaggtgatctgtgaatctgagataaataaattgaaggataggagcctcggctatgagtttattaaaaaccatcatggagaaaaggtggaattagcttttgacaagcctgttgaggtactttccgtggaagcctatgaaaaacttgtgcatgaatcttattcacataacagaagtaaaatgaaaaagttactcatggaagatattccagatcaatttatagaacggcaactcaacgacagccgctatattagtaaagtagtaaaatctctgctttctaatatagtgcgtgaagaaaacgagcaagaggctatctccaagaatgtcattccttgtacaggaggtattaccgatcgattaaaaaaggattggggcatcaacgatgtttggaataagattgtacttcctcgtttcattcggttgaatgaactgactgaaagtacccgtttcacttctatcaataccaataatacaatgatcccctccatgcccttagagttacaaaagggattcaataaaaaacgtattgatcaccgccatcatgcgatggatgccattatcattgcatgcgcaaatcgtaacatcgtgaactatctcaataatgtgtcggctagtaaaaacacaaagataacacggcgagatttgcaaaccctattatgtcacaaggacaagactgataataacggtaattacaaatgggttattgacaagccttgggaaacattcactcaagatacattgacagctttgcagaaaataacggttagctttaagcaaaatttgcgtgtgatcaacaagacaacaaaccactatcagcattatgaaaatggaaagaagatagtctccaaccaatcaaaaggggatagttgggctatccgtaaatcaatgcataaggaaacggttcacggagaagtaaatttgcgtatgataaaaaccgtatcatttaatgaggccttaaagaaaccacaggcaatagtagaaatggacttgaagaagaaaatactcgctatgctcgagttaggctatgacactaaaagaataaagaactatttcgaggaaaataaagatacttggcaagatattaatccatcaaaaatcaaagtctattactttacaaaagagacgaaagaccgctattttgcggtgcggaagcctatagatactagtttcgacaaaaagaagataaaggaaagcattacagatacaggtatccaacaaattatgcttcgacatttggaaactaaagacaatgatcccacattggcattctctccagatggtattgatgaaatgaaccgtaatattcttatattgaataaaggaaaaaagcatcagcccatttataaagtgcgtgtctacgaaaaagctgaaaagtttactgtaggacaaaaagggaataagcgaactaaatttgtagaggcagcaaaaggaaccaacctgttctttgctatctatgaaacagaagagattgataaggatacgaaaaaagtaatccgtaaaagaagttatagcacgattcccttaaatgtagtgatcgaacgccaaaagcagggactttcctcggctcctgaagatgagaatggtaatctacctaaatatatactctctcctaatgatctggtatatgtaccgacacaggaggagattaataagggggaagtcgtaatgccgatagatagggatcgaatatacaaaatggttgactcaagtggcattaccgctaatttcatcccagcttcaacagccaatttgatttttgctttacctaaagctactgcagaaatctattgtaatggtgaaaattgcattcagaatgaatatggtattggtagtcctcaatctaaaaatcaaaaagctataacaggtgaaatggttaaagaaatatgttttcccattaaagttgatagattaggaaatataattcaagtaggttcatgtatactaactaattagattttatcctatgattaagaaaacattttattttggtaatcctgcttacctgtcacttcgtaaccagcaattagttattaagttaccggagatagtaaagaatgatactgtgcccgaaagcttcaaacgacaatcagaaattactaaaccaattgaagatattgcagtgatagttcttgacaacaaacaaattactattacccagggtgtattggaagcattactagagaataattgcgcagttattacatgtgatggacgaagtatgccagtaggcctcatgcttccgctttatggaaacacgacacaaaatgagcgctttcgagatcaattagacgcttccttacctttaaagaaacaactttggcaacagactattcaagcgaaaatcaacaatcaagcatcagtattatgctcttgtaaaaacgaagaaataaaatgtatgcgaatatgggccaatgatgtacgtagtggagatcctgacaatttggaaggacgtgcagctgcttattattggaagtatctgttcggacacatagaaggttttacaagagatcgggaaggtatacctcctaataatttattaaattatggttatgctatccttcgtgctattgttgcacgtggactagtcacaagtggtatgttacccacattgggtattcatcaccataaccgatataatgcttattgtttagctgatgacatcatggaaccttatagaccttatgttgatgagcttgtatttggtttaataagaacaaagggtata

SEQ ID NO: 1481 - DNA, 4846 bp, synthetic construct
  source 1..4846: mol_type = other DNA
  misc_feature 1..4846: note = Synthetic
acaacggaataatccttattgtgagttgctttcaaatatgggacaaaagtacaacattttttttaaataaaaaacttaaatgtaaatttttttattaaatttgtagcgaattaaacttattaaatatatgaaatacataaaacacatattaggattagacataggttccaactcaattggttgggcgcttattcagctagatctcttgcaaaaaacaaaaagaattattgcagcaggaagtagaattattcctatggatcagaaagttttaagtaattttggaaaaggaattactatttcttcgactgctcaaagaacctcctatagaaatgcacgacattgtcgagaacgacatttgcttcgtcgtgaacggctccacagagtgctccatatcttaggtttcctgcctactcactatgataagcagattgatttttcaaagagatatggtaaatttgtagataatacagaaccaaaaatagcctataacgaagggaaattcctctttatggatagttttcaggagatgctagctgattttaaaatacatcagcctgacttattctataccaaaaggaatggagaagaaagcaaaattccctatgactggacaatttattaccttaggaaaaaagcactttcacagaaaatcagcaaagaagagttggcttggattattttaaatttcaaccaaaagagagggtattatcaattacgtgaagaagaggaaaataaggagaatgattttgagattatttcttcaaaaattatatctgttattaagaaagataaagataaaaaatataataagtattgatatgatataattttagaaaatggattggtataccaagctgctttttataatgattttgtatataactggattaatcaagatagagaattcataatagaacgaacttctttaaagaatgggactgaaaaagtaaaactttcatatctacctacttttgatgaaattgataagatggataagaaagaacaggataaatactacaaaaagataaaaattaaaaccgaaaatagtattggaaataaaacagtaggatgctatatctatgatcatattctgaaaaaccctaatgaaaaaatcaaagggaaattagtccgtaccattgagcgaaaatattacaaagaagaactaaaggctattttagaaaaacagatagctctacagcctgaactctttactgatcaattgtttgccgattgcattcgagaactttatagtaagaatgcagctcaacaacgaaaccttgctgcaagagattttgtacatttgtttgtagaagatattattttctatcaacgtcctttgcacaggcagaaatcaactattgctaattgtaccttggagtctcgttcctacatagataaggatagccatactcgtaaagaagcctctttgaaggtatgtcccaaatctaacccttattatcaagagtttagagtactccaatggttgcaaaacctcaaaatatacaagatagagagcgatcaagaggtaactcatgaatttataaagaccttagaagacaaacagcaactctttgattttctaatggctcaaaaagagattgattgtgaggaattattgaaatatttcctgagtctaacttatccaaatgccaaagaaaaggcactaaagagtgagctaaagaaatggaaagatacttatcgctggaactatgtatatgatataggggaaaaatcgtctaaaaaatatcctatgaatgagaccagatatgatcttaagcgatatttagaaaaagtagccaacttacctgatgattttctttcctcagaagtagaatacctgctatggcatctgatctattcggttaccgataaggtagcatatgagaaaggtctaaagaaatttgctcaaaaacatcacttagatgaagattcctttttagagagcttcaaaaaattcaaaccctatcccagtgaatatggtagtttttctgaaaaagctatccgaaagttgcttccactgatgcgttttggctcctattgggacttcaatcatatagataagaatactcaaaagcgtatagacgaccttatcacaggggtagaaaatgaggaaatacgtactatcctcagagaaaaagctgaaaagtaccaacttgaaaaggaaactgatttccaaaacttacctctttggctggctcaatatattgtctataaccgacatgctgaggcttcctctcttgagaaatggacttctgtgaatcacttggagacctaccttaatgagttcaagcaacattcgcttagaaaccctatagtagaacaagtagttaccgaaaccctacgtgtagtgagagatatttggcaacaatatggacaaggacaagccgatttctttgatgagattcatatagaactcggtagagaacttaagaaaaccgctaaagaaagagaagaactatccaaacaaaaccaaaagaatgaggacaccaacctgcgtatcaaggcattacttgcagagttaggtgaagatagtactatagagaatgtacgtccctactcacttatgcaacaggaattactcaaactatatgaggaaggcgtatttagttcctctatggagattgaagatgatatagagaaaatacacaagaaagctactcccagcaaagcagaattacaacactataagctttggttagaacaaaaatacaagtccccttatacaggacaaatcatctctctgaaaagactctttaccgaagattatgaaatagagcatattatcccacaaagccggtattatgatgatagtctttccaataaagtaatctgtgaatcagccgtaaataagctcaaaggtaatcagttaggattggaatttatcaaaaatcactatggcgagaaagtacatgctgccggtaaggaagtaagtatatttaccgaagaacaatataaggaatttgtcaagaaccactatgctaataactcaggaaaaatgaaaaaacttctcttagaggatattcctgaaaagatggtggctcgccagatgaacgatacgcgctatatcagtaagtatatttcagaaatactctctaaaatagtacgtgcagacgagcgagatgaaggcgttaattctaagaatgttatcttatgtacaggtaagattaccactgcgcttaagcaagattggggcataaatgatgtatggaatgaccttattttacctcgctttgaacgtatgaatgaccttacccagacctcactatttacctcctataatgaaaagtatcaaaaatacctccctactgtacctatggaatatagcaatggtttccaaaagaagcgtatagaccaccgtcatcacgctatggatgccattatcattgcttgtgctaccagagagcatattaactatataaacaaccaacatgccttagagaaaggaaaagataaaaaggaaaaacaagaagaacgtgatacacttagagaaagactttgcataaaaaagtataataataaaagtgaaggaaactacaattgggtattcaaaaaaccttgggatacttttactcaagaagtacgagctgccttagaaggtattgtagtaagtttcaagcaaaacctacgtgtgattaacaaagccaccaactattatgaacgttgggtagaagaaaatggtaagtatattaagaaaatagtcaagcaggagggtactaactgggctatccgaaaacctctgcatgaggaaaccatttcaggtaaaatttatttagatagagaaaaaataactaagaatgatatacttactgctactagaaaaactgttgatagtagttttgatgacaaaagaataaaaaaaattacagacacaggaattcaaaagatactacttaattatcttaagtataaaggaagtccagaaatagccttttcccccgaaggattagaagaacttaataaaaatttatctatttataatgatgggaagcctcataaacctatctataaagtaagaatctatgaaaagggaagtggtcgatttgcattaggagaaaaaggtagaaaatataaaaaatatgtacagggagctcctaatctatattttggcatatatcaaggggctaagcgttccttcgcaactattccgctcaatgaagtgattgaacgccagaaacaaggtctgccctctgtccctgagtataatgaaaaaggagacctcttgctctttagcctatctcccaatgacttggtatatgtcccagtagagggcgaaatcatagaggatattgatttccgaaacctttctaacgaacaaaaagaaagaatatataaggcggcaagttttacaagaaatgaatgcttttttataaaatcaagtatagcttcccttatcaaaaactatgatgccaaaacaaaaattggagaattaggtagccagaataaattggaagtaactatttgtaaaggtataagaatcaaagaagtctgtatcaaactaaaagtagaccgtttaggaaatattagtaaagcataaaaagtttaataacaataagctatgttatatcgttctatttatataggtaatccggcttatttgaagctgaaagacagacaattaaaggttaccgaccctgaaactaaagaggagaaaggcagtgtccctatagaagatatagggctgatgatgcttgatcattaccaaattaccctatctcaccagctgatacaggaactcatgaagaataatgtaatccttatcagctgcgatgagcggcatgtccccttggcaagaagaatgccgaggtacatatcaaccgtgtcaagcaatggctacctccttatggaa

SEQ ID NO: 1482 - DNA, 10561 bp, synthetic construct
  misc_feature 1..10561: note = Synthetic
  variation 3459..3460: note = n is a, c, g, or t
  source 1..10561: mol_type = other DNA
ctgttgatcaggatgaccttgtacccttcttcacgcaaggccttgcaggcttgcacaccagagtagtcgaactcacaggcctggccgatgatgatggggccagagccgatgatcatgatgctcttgatgtcggtgcgcttgggcatttttcgaggtcagaagtcagaggtcaaaggtcagaagtaatcctggcgtgagtcattcttcttcgtcgggttttttgcgcgccttcgtcgaggtcttggctgatttgccgctcttggccgtcgagtcttcaggcttggtctgggccgtctcagccggcctgggcggggccttggtgtcttcaggccgggactccaaagcgggtgtttccttgagggccatcaggtccttgagcagttgctcgcgctcggagtaggcaaaccactgaactcgcgagcgcctgccgctgggaaacacgatttccacggcatcagagcgccgctgcacgctcacgccgcggctctctttccagcgcacttcctcaaccgtgccggtctcgtcgttgacaaagcgcaacaggccctgcccgacttccacggccacggcgtcctgcgtctggcccggacgttcgagccacaacagcacaagctggaacatcgcacccagggccgccggcagcgccagcagaaagaacacccagcccggcgccgaggtcaaaacccacaccagaaaggtgacaaacacaaacagcagcacaaccagcgccggcgccccgaacaagagggcccgccgcagataggcgcgctgcatctccccgaactcgtcgcggtcaggctcgtaacggcggatgtctgctcccgttggcatcagcgctccgatgtgacccgcgtgttgcgcgacctgcgcatggtggccgcgcgtttgcgtgtcacgcctgactcgatcaccgccgtggccatggcgaactcgcgggtgtggctgatgctcagccacagccacgtcggacccatggcgtcgagaagctcgcgcgcctttcccgtgacctccaggcccggccggccgtcctcgtcgttggccaccacaatctggccaaagccgacaccccgcgcccagcccgtgcccagagccttcatgaacgcctccttggcggcaaagcgcgccgccaggtgaatggccgggcgcgccttggccaggcagtaggcaacctcggacggggcatagacgcgtgaaaaaaactcctcgcggctcgcggcgaggagtttctcgatgcgcttgacttcaactatgtcagttccgatgccgagtatggccatctcagttccagggcaggctgagagacgttagcgccacggcgggcaaaatcaacgcgtcaggcgctagccggggcggccaagtcccgcgcgcgccgcaggtattcgaacttgaagatggtgcggccctctttgcggaacttctgctcccagttggtgatgccctcgggcgcctcgtctccgaaaaggcggctgaccagcgtaaagtcgcggtggtcagagaattcccgctccatctgttcggcgtaatcagcatgatcggtgcccaaaaagacccgggccctgtccttgagcacccgggccgcctgcagcacaaagggcccctgaatcaggcgccgtttgttgtgccgcgacttgggccaggggtccggaaagtagatatgcagggcgctgaggctggcatcgggcaggttctcgcgcagggtgtgggcggcgtcgtcgcgcagaaagcggatgttggacaggcgcttgcccgcggcgcgctcggcggcgaggcggtagtagcggctggcccactcgatgcccacgaagtttacgtcagggcgtcgggccgcctcgttcatgaggaagcgccctttgccaatgccgatttcgagttcgacggggtggtcgttgccgaagatggccgcgaagtcaaaccggccctccttgagctgctcgatgatgtaaggcgtgatgtcgcgctcaggcatggcggaactccagctttggcgtgcggccgtccgtggcgaaatggaatgcggaccctgtgcgggtccgcattggacgccccatgggcggcgttacccaatcagccgttgttgccaatgctctgcacagggcactgcgccatggcgtcttcacactgcgcctcttcctccggcgtctcgggctgcttgtagacgtagtcgtgcgtgccgtcgtccgactccttgaagttgctgggagcaagctgggggcacaggccgcagaaaatgcaggtcttgtccacgtaccacttgcccggaacattgtcttcccacttttcgttggggtctgccatggtcctctcctggttgcggcgtcgtctgctctcgcttcggcgcccctcgcggctggccgcgactctcgctcactaaattagactataccagtccactattccggacggcaaacgaaaataggctcccatcagcccaaatcaaggctctccttggagccgcttgtcacgggccttctacgccttcgcggcgtccaccatgcgcttgagcgccgcttccgtttccgctccggccttggccagctccccgttgctgaacaggccaaacatggccgaaggcagcggcaggctgatgtaggtcttgcccctgcgcgaggtcacggagatgcggcagggcaggcacgacgccacagtgttttcgagggtcaggaacttgcgcgcgtagttgggctcacacaccgacaccacgatggcttcatcatcgtaggtcacgcccttgccggccatgatctgcttgaggttcagcacgtcgatcacgccatacttctccttcagcaccgcctcttgcagacgcttggcggcgtccgccgccgacaacttcgactccaccgtgtaaaacgagctggccatgggatctccttgcgggtgccacaggttagccgcgcgccccaaacttggaatgcccgggccgcaaactgacgttagactgggataacccggcccctcacaccgggcaacaggagactgctatgcacaccatcgagctcaagaaactgcgcgaagcgctggccaagggcgctgtcgccgggttctacgacaaccgcagccgcgtctcatttgaaaagctgcacatcaagggcagcaccagcctgccggtgccggaagctcaggcgggcaagggccttccagcggacaaggcggccatgctggtcttctactgatcgggctattcgtgagacgcttccacgaaggcggcccgtgcggtcgaacagcttggctacaccaacattcatgattaccgcggcggcatcgcggaatggagcgaggccggcctgcccgtcgagggcagcctcgccccccaggcccaacccaaatagtgcccaaggcaggacctccctgccacagcaacgacccggcgtggccccccggcagcgaatccgaaaatgcatgccgttttcgggtgtcgggctgtttggggcgcgcgtgttgcggcatcggccctggccnntgccttggccgatgccgccagtttgcgcaggggcgtgttggtcggaaagcgataaggcaaggccggtggttgaggtctaaaacaaactgggtaaaatccgctttacgtatccttttatggccaatcaccaaggcacacgatgttcaaccagacctgcgaatacgccatccgcgcggccattgccatcgcccgcctgccccgtgaagagtacgtcctggccaaggatctcgccaaagacctcgaactcccccagcactacctgtccaagattctccagcagctggtgaggcagcgggtgctggagtccacccgggggcgcctgggcggatttcgcctcacgcgcaacgccgatgaaatccagcttgtcgagatcgtggcgccctttgacgacctcaagaagaaagaagagtgcatcctgggtcaggccgtgtgcagcgatgcccgggcctgccccctgcacgacttctggaagagcgtacgcgaccgctatctcgacgaaatccagcaaaagacgctgggcgagttcgcccgctttgagcagcagcgcgagaaggccgcccgacgctccgccaaagccagggcctgagccttggcgccgcgctccacgcaaaatggaccagatacgtccacttccatcgaagcctggttcatgcttgaatgcacccacgatccaggagacccgccatgagaatgcccaccacgcccgccgagcttgaagctgccatccgccagatgcgcgatgaagtcaccatgcacggcgccagggaactgctgacgccctcagacgtcgatgccgcgctcaagaaccagaagggcacggcccttgtgttcatcaacagcgtgtgcggctgtgccgcgcgtggcgcgcgcccgggcttgagcgaggcgctgaaggccgccaaggccaagccgcagaagctgtacacggtgttcgccggccaggagaaggacgccacggcgcaagtgcgcagctacttcccggatattccgccctcgagccccagcgcggcgctgttcaaggacggcaaggtggtggcctttgttccccgcagccacattgaaggacgcggcgccgacatggtggccgacgagttccgccagatcttcgagcagtattgctcttgagcgatgttccacagaaaacgcacgggcaagcccgtgcgttttcatttccagcccgtcccgatgacctgaaaaagcgcaaaccgccgcacaggcggcggtttgcagtgcgtcagcgcagggccgacgagcctcaaatgaggtgcgatggaattcagcttactgtgtcaggaagccgagaaaccacgctcaagtacactgcggacaacttatctcataccgttgtcgcgtcaagttgtattctcttgtgaaaaatacggagaagcacatggcatcagaaatcgtcctcgggttggatttgggtatcgcgtcggtgggctgggcattggtccgacgtgaggatggtgagtcaaaggaacttattggtctcggcgtgagggtttttgaggaaggcgtttccaacaagggtcaaggggataaagaagagagccacgcctcggctcggcgccagaagcgccttgcccgccgcaatcttgaacgccgcgcacgtcgcctgaatcgcgtttacaacctgctggccaaagttgggctgctacccgtcttgcccgagcatctctcgcacccgcgcacacccagcggcgagggttcggccgccaatcgccagcgcttggtggatgaaaccaaacgcgcgcgacacgaggctcttcaaacgttggagttgggcgcaaaagatcccgacactggccgtcgcccggccgcggccgacccgaactgcctcgtcggcaagtatcggcgcgacgatttgcccgtcgagcgcttcttgccctacttccttcgcgaccgtgccatccattgtgcgctcgaaccccatgagttaggccgtgcgctttactcgctggcgcaacgccgcggcgtgtggtggaaccgcgccgatgacaatcccaaagctgaggagaacaagccagaggagaagaagtccaaacgagcctccaaaaaggacgacgactcaaagtccgagagcggcaaggtcaaagcggccgttgctgaacagcaggtcaagctcaataagttcggcgaagctcgcaagttggagcgccccgccacgttgggcgagttctatgccgccatcctgacgggcgactcaaccgccttggccatcgatagcgagggctgcaaaccagaggaataccagcttcgcgtgcgcaaccgcgccaaggtttacaaccgctgcacgacccgcgagatgttgaaagccgagttcaatctcatctgggaaagtcagctcaagcaccacgccggcaatgcggccatgctggccatcctgaactccaccgtggacgtgccacctcgcagcgaaaaggtcattgagcgcaatggccgccctgtcgtgaaatacccggggcggccgggcaaaacggttccgctgcgcgaggccgtgttcaaggccattttccaccagcgcaaactgaaaaacgcctcacacctcattggcgcctgcgaacttgaaaaccacaccaagcaccgccgcgaatgcgatggcggcaagaatgagatcagccgctctaggccgcttcaatacgaccgcaagcgggcaccggcgggccacccctttgccacacgattcaagatgctgaagatggttaacgaaactcgcgtctttcgtcgtaggtcagccgaacaagactatacgcccgttcagctcgacccatcgctcgaaaccggcttgttgccggaatccttgagggcaaagctcgttgcgctgctgtccggccaagagtcgctccgctggcagcaagcgcgcgaagaactgtcactcaatgccgacacggcattcaactgggaacttcagaccgggaacaaagcgaccaaaggcggcaaccagaagaaggagaaaggcagttttacgcctgcccacaagcacttcatcggcgacgtgactgccgcaaagttcagtgagatcttcggtgccgagcgctggcagcgcatgtgccagaccaaagcgcccagtggcatgacggaagccgaggaagtgttctgggactggtacgcctgtcaggatcccgaagctttggcattcatcggcgctgtacgctggaagctcgatggcatgactgtcgccaatcccggcggtctgttgccaagccagattgtggaggagtgcgccaagctccgggctgacgccgtaaaaaggggccgcgaaaatccgtccaaccccggcaagtccgccatgcagctcgctcaggagcgctttggcaaggtcagtttcgaaggccccgccaaggcgtttggcgacttgaaactgccccaaggttatgcgcgctattcaaccgccgcactcaagcacctgctgaatcatcccacatggggcatggagcgcggccacaccgaaggcaccgcgcgcgacatgctctacgtggccaggaaagtcgctatgggccccggcacgacgccgcagctgaaaccgcttgttgaagtgtttccaacgctcaacaatcccgtcgtcaagcgcacgctctcacagctacggctggtggtcaacgaactcatcaaggtcaagctcggcggcacaccgccccatctgattcgcgtcgagatgacccgcgaaatgcagaccaaccgtgaaggccgcgaagccattcagctgcgccaggacatgaacagaaaggccaacgaaaacgcagcaaagctgctgggtcttgaccccgaaacgacatccagcgagttgaaacgcaaagtccaactcgcccaggaagcagggtggcactgcccctattgcggcctgggctatgaagcgcaagacattcattcgctcgagattgagcacatcatcccgacttccatcctgcccgacaactccttcgccaacctgacgctggcgcacaaggcctgcaacattctcaaaggcggccgcacgccttttcaggcgcggcatgatttcaagcgcaactggcacgacatccttaatcacgttgccgtgttccgctcgacggagaagtacttcgattcaacgaaggaggaacgctggacgccgagcgagcgcccgcctgaacccaaaccagaaaattcggctaccggcaagcgccgcaaaacactgcccaaagccgcccaagccaaggaaggcgagcgccatgagcgcggccatcccaagctgcgcctgttcctcatggacgacgccgcgctggaagaacacaagaagcgcttcacaaacgccgacttgacccaaacgggctacatcacgaaggttgcgctcggttatctggcaacgctgtacggctcgtcgccggacaagccccacgagattcccacagggcgtgtcagacacgtcttgcaggtgagcaacggttccatcacggcactcctgcgtgacgaacttggtgaaccttgttcacaatgccaaatcaaacatgccgaacccgacaagggtaaggtcattgacggctggatcagtgtcaatcacgtcttgcgcgatggtggcagccgtgagcccggtgatggacgcaacccgctctcgggcgagcgccgcaagaaggaacgcaaagatcaccgccaccacgcggtggatgccgcgattgttgcaatcacggacccgaacaagctggtcggccggcttcaggaggcattccgccagtctcggcgacaggatcaagggaagcagcgctattcgtggggccgcgttcaggccgaagttctgccccaatggcccacgttctaccgcgacctctacgagttcatccacgtcaaggatcagttcggccacggtttcaaaggcgtcgtcgtttcgcacgcagttgaacgcaagacgactggcccgcttcacgatgagacattccgtccgaaggccggcttccaacccattcgcgatggcgccgggcgcgttctcattggcaaacggcccgtgtctgtgattgagattggcacgggagaacgcgcacgcctcgctcagcccggcgacaaccaccacgttggcatttatcaggattcagatgaaaactggctcgcagaccgccccgcaagcttcttcgacgtggcaaccagaaagcgactgggcaagccgatcatcagaaaggacgcgttcgccaatggcgccatcaagtttcgctttgcactcatgaagcgcgatgcgttgcacttggctgacgggtcaattcgcgttgtccgcggcttcagcgcggagaacaagcccagtggcccttatgtccgcatcaaacatgtggcgcacacggacgccagagacgacatgagtattcctgaagaggaatcgccaagagatcccatctcaaccctcttcaaagaaaggggcgccttaaaggtccttgtcactccccttggcgaggtgaggcccgtgaatgactgagcgcatcctcgatttctccgatgagcccgctcgcctggccgcgcgcaacggcctgcttgtcgtctcgcgccaggacaagcccgatgtcaccgtgccgctggctgaaatcgccgtcgtcgtcgcctcgcacccccaggtctccctttcgctggccgtgcttgcgggcctcgccgaaagcaaggccatgctcattgcctgcgacgccagacgcctgcccacttccatgacactgccccttgcctcccacttcgcccagggcgacatctacgaatcccaggcgaaaacgcccctgcccacacgcaaacgcctctggaagcgcgtcgtgcgcgccaagcttcgcgcccaggccgcgcttttggccgcgttcaaccagcctgaccccggcattgccacgctcatccccgccgtcaaatccggcgatgtcaccaacatggaagcccagggcgcccgcaaatactggggcgcgctcacggccgcaaaactgctgcccgagggcttcacacgcaacgccgacggtgactggcccaacgccctgctcaactacggctatgccgtgctgcgcgccattgttgcccgcgcaatttgcgcctgcggccttcacccctgctttggcctgcaccatcacaacaaatatgacgccttccgcctcgccgacgacctcatggagcccttgcgccccatcgtcgaccgcgcggctttgcaatggatcaaacgctttcccgacgaaaaggagctggaccgtgccgccaaacagcacatggccggcgcgctgcttgagcgcgtcgtctgcgaggaagaggcccgcacgctgtttgacgtcgtagcgcggcttgcacaacgtctggccagagtgctggtgggcgaacaacccgtgagctacttcaagattccggaggtgacctatgccggtgctgcagtttgaaagccccgccagtcatggcggggcccaggcgacaggccaacctgcaaggggcagggcaggtcaatgaagtcggccatggatgacctggagaagttcaacctgttttcggggtttcgcgccgtgtggctgtttgccatgtttgaccttcccgtgaagacgcgcaaggaccggcgcaactacacacgctttcgcaaggcgctgttgcgtgagggctttacgatgatgcagctctccgtctatgcgcgctattgccccagcgaagaagccagtgcagcctaccgcgtaagggtcaaagacgaactgccacccaaagggcaggtgcggctgttgagcgtgacggacaggcagttcgggaagatggagaattttttcggaaaagagcatgagccaacggaagaaccaccccatcaactgctgcttttttgaacggtttaagcgcgtaacccccagccacaactgggggttatgcatgaagcagtgtacttgagcgcggtttctcggccagccacagccgctctgcgtactggaaggcgtcaaaatctagtgtacttgagcgcggtttctcggccagccacagcgaccagcgcgcgcttagtctggccggcctgagtgtacttgagcgcggtttctcggccagccacagcggtccaacagataggcggcgtagtcctggaagtgtacttgagcgcggtttctcggccagccacagcccggcgcggtggtgattgctgcgttgttcgagtgtacttgagcgcggtttctc

SEQ ID NO: 1483 - DNA, 14745 bp, synthetic construct
  misc_feature 1..14745: note = Synthetic
  source 1..14745: mol_type = other DNA
ccatatgaggatacaggttttgtggccgaggcaatcaagctcattaaaaatgaattaaaaaacgaaagggcgcttataggctttgctggagctccttttacccttgcaagctatgctgtggaaggcggacattcaaaaaattacatcaaggtcaagcagttgatgtggaatgagcccgaggcatttcagactctgatggataaaatcaccgaaaccattattggttacctgtccatgcagcttgaagctggtgcagatgccgtccagttatttgattcctggataggcgcattgagtccgaaggacttcgagcagttggcacttcctttcattaacaaaatatttaaggcgcttaaaaaatacgggaagcccacaatttattttggaacaatgacatccggttttttgaaccttttagcaggggttgaatcaactgctattggtgttgattggcggatcaatattggcgaagcctggaatacggttggtcatgataaggccatacagggcaatcttgatccggtggttctgtatgctgagaaggaggttatcagggcaaaagctgaagatatactcttgcaggtaggcaagcgccccggacatattttcaatctcggccatgggcttactcctgaaacgcccatcgactcagttaagtttctcgttgactttgtccacgatcgctcatcagagattaaaaaagcttaaaaggggcgccagttggttttgtccggcaaaaagtgcctgctcatcttaagttacggcggtccacgcaatgaagatgaaattgaagctttcgtaagtaaagtaacctctaacaaagccacctctgccattattgaaagcgcgaaaaagcgataccttgctattggtggtcgttcgccggtaacagcagatacggcagctcttgcggaaaggctttccggtcagatcatggattttgaggttgattatgcttttcggttttcagagccatctattgagaaagttgttagggtgaagcttctacagggcttgagggttttctaccttttgccgctttacccgttttattctgaatggtcagccaggggatacctggaaccacttatgaaagcagcggttgatacagctcgcgcaaccgccaggtttttcatggtatcagatttttatgccgaagaaagctacattagcatctggacagatcttataggtaacgagcttgattcttttaagcctgacatcacaatatttacaacccattctcttccactgaccgatcgaggtgtttcagtttatgaaaggcagtttaaacagtttgccaggcttattgccgaaaagcttaacctgagggattatctccttgcttatcagagcggaggaaggggcaccagtcagtggctggaacctgatattgctgcaaccctggaaatgatggcaggcataaaaaggctgcttgtagtgccggcgggatttttgcaggaaaatcttgaaaccctttacgaccttgatatagagttcagaattctctgcgaaaaaatgggcataatttacagaagagtaaatacacctctttctcatcccggatttgctgattttgtaaaggaaattctttcaaaggattgcctatgggcggaggtggaattcaattcggtcagataaaaactcacctccccgtatagcggtgattggcggaggtgtaagcggactgtctgtttgttaccggttgcagcgcattttaccggaggcacaggtagatctatatgagtcacagtcccgcctgggtggcaaggttggctcagttcgaaagaacggttttgtttttgagctggggcccgactgctttctgaaggaaaaaccctttccgctgttgttagcggaagaaactggtagccgtgatgcaatcataagcactcttaaagaaaaccgtggaacgttcgtttatgcgcgtggacagctgcatgagcttcctgaaggcctgttatccttcgtgcccacaaagtttttgccgtttattaaatcaggtctttttagttggtcgggaaagatcagaatggctttcgacttttttttgccccgcagcaaaaacagcgacccgactcttgcagaatttgttaaaaggagatttgggcgagaggctgtcgagcggctggcaactccgcttgttgccggtatctatggttctgattctgaggagttgagtctgaaagctacattcccgcgttttcttgaaatggaaaaaaaataccgcagtttaatcgtcggttttttggtcgcacgacgcaggatagagccggaaggcaatggaagcaccggactttcatattttctttcctttaaaaagggaatgcagcagctggtcgatattcttgaggagaaccttggaaaaacacaggtttttttgggaagggctgttgcaaaaatagagccgtctggagcccacctggcagttattgacagcgaaggaacaaaaacgatctacgatgcagtagtcctgactgtacctgcttatgtcgcggctgatataattcctgaagacttgcaagctgcaaaagatttgcttaaagaaataaagtacaattcggtcgcaactatcaatctcgtattcagtcaggaaaggatcgaaaagaaaattaagggtcatggtttcgtggtggcggaaaacgaagacctaacaatatcggctgctacttttttaaataacaagtggcctttcagggctccagagggctattatcttatcaggacattcattggtggaggaaaaaaaagctatctggcagcactatcagaagaagagcttgtaaggctttctgtaagggatttaaataaggctcttaagctaaaggctgaacctgaagaagcctatgtaacccgttttttaaatgctttacctctttatgcaccgggacaccttgaaaaggttaaagtaatttttaaggaagtttcccgaattgaaggacttttccttgcgggctcggcctactatggaattggggtgcctgactgcctgcgacagggttttgaggctgctgaatcagttgcccgttttattcagagccgcaactaaactatgataaactagattcgtaatgcacattagatattacctggcagcaattctactgatattgctcatttttctacccaacattgcatttttttatactgaatatctctggtatcaggatgtaggtgctcttcaggtttacctggcgcgctatggctggggtctggtgttgtttttgctcgggtttggattgagctttttgattctttatctcagcctcagtcctgttctcagagaaccggatattgccactgccattccgttcacgcgtgccgaaaagttcctttatgcacttcgtcaggttttaaaaaaatattaccgactatttggccttagtctcgcattgcttatatcttttattgcaggtttaaaatttgcggctcaatgggaaacgctgcttctatatttaaaaggaccggtttctggtttttcggttcctgtatacaaccttgacctttcttttttccttttcaggcttccagcctatctttttttaacttcctggttaaagcttgtaattctttcagccatacttgtggttctggcaatttactttgtgcgaagtctgacctatacatggagtacctttgtccaggtgttttactggtataggcgccatctcttcagcttattcggcctttattttctagctgaagcagcaagcatttacctgaaaacatttatggttgcttattcccagcgcggggttgtttacggtcccggttatgtagatgttaactatttaattcccttatacaggattgcagccctggtatgcttaatgctttcgctgcttctgtttctggctgctttcaaaaaactaaaggtgagaaaagctgcttttgcttttgccggctttcttgttttttattttgctggaagccagattttgcctgcagctattcaaaattacgttgttatccctaatgagctcagactggaagcaccttacctcaaaaaccaaataaagatgacaaggtttgcctatgatctcgataggtttatcgaaaaaccggttaactatccagaaagaattgaccctgaagaactgactcttgaaaatcctgccattgccaatgcccgtttatgggacaaccgccccctatatgaggtttttaaccagctgcaatcgatccgtacttactatacctttaacgatattgacatagaccgctatgttattgatggcaaaaaaacccaggtagccattagtgttcgtgagcttgatgtcagtaatctctctgaaagggcgaaaacctgggtaaatctgcacctcaagtatacccatggttacggcgcagttgtttgctcggttagagaatctacgcccgaaggattgcctgttttttacctgaaagatattcctcctcagccagacaaccctgtttttgagctccggcagcctcagatttattttggagagaaaacagatagctatatcattgtcaggacgaaggaaaaggagtttggatatccgagcggtgataagaacatttacgagagatggaaaggaacagggggtatcaagcttgattcctatcttaaaaagctagctttttcaattcgctttgggacgtttaaaattctgcttgcccgtgaaattaaggatagcagtgtcgttctttacgatagaaacattatcaaaagggttaaaaaaattgctccttttcttcaacttgatgatgatccttaccccgttatagcaaacggaaaaatttactggataattgacggctacactctaagcaaccgtgtaccatattctgaaccgtatggaggtggtaagtttaactatatcaggaacccggtaaaagctgtggtggatgcttacacgggggaggtaaaactttacgtattcgatccatctgatcctgttatcagtgcataccgcaaaatctttcctgaaatattcagcgatcgggaagaaatgccagcagccctgaggatgcatgttcgttatccggtcgatctttttgctgttcaggctgaaatgcttaccaattaccatatgagggatgttcaggtcttttacaatcgcgaggaccgctggtctgtagctgaagaactttacgaaaacgagaaacttccagttgaaccctactatgtgctcatgccctttgaaatcgatgggtcattttccggaaccgaatttatacttatccttccttttaccccgtacggaaagaacaatctcatagcctgggtctatgtttcgtctgatggagatcattacggcaaaggaggaatttacaaatttccaaaaggaaggttaatctacggtccgctacaggtagaggcaagaatcaaccagaatcctgagatttcaaaggagctgactctctggagtcaggcagggagcagggtaataaggggaaacctgctggtaattcctctgaataccggcgtgctctatgttgagccgctttatctcaagtccgaacagggaagtatacccgagctaaaacgggtcatcgttgctgaccttgaaaaagttgtaatgcaggaagatctagaaaaagcaattagtgttcttgcaggaaagtttcccttagaagaggaggatggagaagcccaacctttaaaagttaaccttgaagaaataaggcggttttttaaccgaatggaagaagcacttaaaaagggtaatctgaaggaatttggtgaactctacgaacagctaaagcagttaatcggggtagattcgggcaattctacttcagctgcaaccagataaaatgggcctatatacagacatcatcagggaaacaatcattgagttttaccgtaaaaatattcctttccttgcggctgctgtttcattctatgctttccttgccttgattcctttttttctgttgcttgtttcagctgcgggtatcattggacattacctgccggttctgggtattgacctaaagtttcttctgaccgcgttacttggaaagtacggatctcaggtctatgattatgtccggaatattatcatcaggcgtttcagttatggaatcacgggcttaatagcgcttgccatcagcttttcttttttactgacgccggtcgagcaggcacttaaaatcatcttcgatgaaaagaggtcaaaaccgtttattaagcagcgcttttttgggcttctgtttttccttcatattctcttccttttaaccttagctgccgtgttgctcgtgattgttcagggagttttaagggttctcaggcggacaggtgcttttgccggtggtctgatagatctgcgtttactataccggctaactgagtacgtgctgccggtcttttttgtggtcagcgtttttctgcttttttattttgcttaccgctacctgactgtaaaaaggccttcaaggaaaaatgctgcctgggcagcagttattgctgcagttttgcttgagctggtcaggcagggctatcttttgtatttatcagagtttccggtatacgatttgatttacggagctttcagcttctttatggttacgcttatctttatttattttgccgcggccatttttcttttcggggcggtacttttgcacaggttagaaaaaagttaatatgtctatagaattactatgattactatcttttccctgatataatttagctagttacaacaggaactatttttttgtggaggttggcatgatgaaggtctatgaattgaacagccatcagaagcaagaactccagcagctctttgataaatgggttaacttcagcgatgaaagaaagtattacgggcacgatattggagttatgccctctcttatcagaccgtttcttggaaagacggagccggctgctgtggtaaaagcgctgagcgaagaggatgttgccaaacttttaaaatgggcgtccgaaaacgaagtcccagtagttccaagggcagcagccatttccggctatggcggggttattccttcaaaaggcggcattgttcttgatgtaacttctctaaagggaatttatagtgttgacagggaaaacacggtggcagaggtaggagcggggacagtctgggaagatcttgagcgtcagcttgagccttacggtcttgcaccccgtcaggtaccgtcctcggcgccggcatcaacggtcggcggctgggttgctcagggaggtacaggttacggtggctatgcttttggctggttcattgaaagcgtggtcagggtgcgacttatcgatgcttcaggtgaagcaaaagagtttagcggtaccgaccttgaggctatttacggaaccatgggtgcccttggtgttattacccgtgtgtggttgaagctacgaccaaaggaagaaataattccggtactaattgcctttgacagtgcgcgcaatttcgcagaggcacttaaagaagtttatctcgagtcgcttgaactttacacgttgaatttcattaacccggatggggctgctctgaaaaacaggctgccgctgagtactcaccacggacatcctgagggcaaaaaatttgaacttcccgagaagtacctgttgctggcaggggctttcagttccagacaggctgagattgaaaggctaaaggaaattgctgttcgcaatgggggcgagatcttaaacgatgaacttgcagcacatgagtgggaagagcgctacaagcccatgaaggtaaaaaggcttggcccttctataattccgtctgaggtggttgttccactaaactctctttatgcggtgatttccgagcttgaacaccacattaagctgccatttttagtcgagggcacagctgtgaagaataaggagatagttttactggtgcttatttctcacgacgaaaggaaattttcttatcactttgccttcggactgtcactcagcgtcttaaagacggcacttaagtacggtggccgtccttatacttccggactttattttggaggctatgcccagagggtttacggagccaagaggcttgatcagatcaaaaaactcaaggaaaagctagatcccaaagggatcttaaaccccgaaaaagtcgagggcaaaaaaagcctggttagtttacttggaatcgccggagtttttgagcctgctatcagattgcttggaaatctttcccgggtgcaaccaggcgaaaaaccctttgaggccagaggtcttcctcctgaggttgcctggtatgcctatgcatgtgcccagtgtggctattgtgttaaggagtgcgaccagtactatgggcgggggtgggaatcacagtcaccgcgtggaaaattttactggctgaagagatatattgaaggaaaggaagagcttacccaggagcaggtcaataaatttatggtctgcaccacctgcgaaatgtgcagtttcagatgtcagcttgatatgcccattgaagagtcatgggagaaactgcgtggtctgtttattgaagaaaaaggctatctgacaatcccaccgtttgaaatcatggctgcctcgcttagaaaagaaagaaacatctgggcaaactttgccagcgatcgttcgggctgggtccctgaggaaattcgtccgaaaattaaggataaggctgaggttgcttactttgctggttgcacagcttcttatgtggaaaacgacattgctaaggcaactgttacacttcttgacagggcaggcattgaattcacctaccttggaaatgatgaggcttgctgcggcattcccatgctggttgcaggtaaatgggatgtttttgaagaaatcatggagcataacgtagcccggatgaaagaaaaaggagtaagaacagttgtcaccagctgtccggcatgttatcttgtctggtcactttattaccgtgaatgggcggaaaagaaaggcatagactatccgtttgaagccaaacattactctgaagtgctggctgacagagcccagcaattaccttttgcaagagagataaatgaaaaagtaacctttcacgacagctgccacatgggcagggctctgggtgtgtatgaggagcctcgtcagcttattaaggcagttccgggtgtagaatatcaagaaatggagcacaacagggaacgggcacactgctgtggtagtgtgctttccctggtaagcgagcctgaagttgcctatgagattggctcaatcagattgaatgaagcaaagaaaataggtgcggaaactttgctggcagtctgtccttgttgccagttccagttaagagtttcggctcaaaagaaaaatgttcctataaaggtcagggatctggctgcctttgtagctgaggctctaggttatgagttcaaagatgctaccccggatgcgctgtcaatgtgggttacctttgaggcaatgatcaaactgcttgaaccaaaaaatatggcagagctaatggaggcacttttccctcagatgtttgcggctatgccaggttacatggttgcagccataagagctgccagaaaatctaaggcaatgttaaagctcatggaaaagatgattccttacatgatgccttatatgatgccgatggtaatgccgaaagttatgccagacatgctgaaagaagttgagaaaagggtgccgatgcccgaggtaatgaagcaacaaatgccggatttaatgcctaaggccatggaaaacctgcttccaaaaatgcttccggctgtagctccactcgttgcccctaaaatggtcaagtacatagaagaaaatctctaggcaggtattgatttttcggttaaaaactggtaaaaaaatagcgaagggaacccatgataacgctgaaggcagaacctgtcttcagcgccgcacagctctgctccggcctcaatggccggagcatctgtttttttggaattgccattttttgaaattgtcggatcttttattataatcacggtaatatctgccagcataacttaaagatgagggaatatttttcatcataatataaactagggggctgcgatggaaaccaaacaaactacaaaattgaggtattctctcggtcttgacatcggaagcgaaagtgtcggctgggcagtgattgagcttaatgagcatggccagcctattgggctggttgacatgggtgtaagagcatttgatgctgtaagacaggaacagcagaaagcaacaacgcccgctcaggaaaggagagttgccagaagtcaacgtcgccggctgaggaacaagaaaaagagaaagaaaagactaatcgaagcctgcataaattacgggttgctaagcaataaacaagaagctgatgcgtgtttggtcactttgccaggtgacaaatctccatgggatttgagggttgaaggtcttgatagaaagcttgaccgtagggaatggttcagggttctttatcatctggttaaccaccgtggctttaagtccttcaaaagaggtgaggacttagaaaaaggcagaaaagatgatgttaaaaagatgaaggcagcagcaaagcaattgagtagcgaatggagagacagaggctatcgaactgttgcggagtttttgtgcaacgattctgattggatttctaagcatggcttaaggaaaagaaacaaagagggcagttacgagttcaccattttaagagatgatcttgtagaagaggcaaagcttttgtttgagcagcaaaggcgctttggtaacgagtttgcctcagctgtttttgaaacagaatacattgacattctcgatgaaaagccccgtttgcttgagggtgaagatttaaaggcgaaagttggttattgcacctttgagcctgacgaaaggagagcgccaaaggcaacctttactgcgcagaaattcagagcccttcagattattaacaatctcagattcattaatcccgaaactggcgaaatcaaagaaagcctgacctctgacgaaataaaaaggctttttaatttggctctcaatcgcaaggaggtaaaagctgaacaaattttaagggagcttggtttgcggggttggttgattgaaggctacgacaaaaacaacgaaaaaataattgtgcttgaagattttcacaagcttaaggaagcactagaaaagaaatttcctgaaacctgggggaaacttttgaccgatattgacctttatgatcaggttgcatcaattttaacttattatttagcgccggagtctacaaaaagagagctgcaaaaattgcagcttgacgacgaagttattgatgctcttttaaacgtttcttttaaaggccacgccagtctttcgctcaaagccctcaggaagattattccttatttggaacagggttataaatatagcaaggcatgtgagcttgctggttatgatcacagagccctgccggagaagcacaggagaaatcatattccgccttttgagagtgaggagttcgataagcaactcaaagcagaatactttggtataaccaatccaaatgtaaagagagctctggctcaagcaagaaaggttgtaaatgccatagtccgtcattatggtattccttcaagaattggtattgagcttgccagagaaatgacacttagccgaaaaagaagggaggaaaccagactcaacaatgaaaggcgtaaagaaagggaaaacatcatcaaaaagctaaaagaagagcacaacgttgacaatcctagtgcaaaactggttgataaatatatactttatgagcttcagggtgggaagtgcgcttactccttaaaacaaatagatttaaatcgcatgattcacgatccgtcttatgttgaaatagaccacatcataccaagaagtatttcctttaataattcattttcaaacagggttctggttcttgcctcagaaaacaggaacaagggagaccgtcttgcagctgagtatgtaaagagctactatggcgaggaacactacaataaatgtttggctttgtttgaggaagctttaaaaaaaccacacgatcatagacatagaaaaagagagctggctttaaaattaaaactttttaaaaaggaaagccttacagatgaggaactggtggaattcagagagcgctaccttataaatacaaggcatgcagcccgctttttcaaaaaggtgctttgtgcatacctcgacatcgaagatccaagagttattaccataaatggcactataacacgtgatctcaggcatttgctcggagtagaagacctcaaggagggaagatttagtgacaaacaccacgctgtagatgctactatatgtgctatttgtgatttttcaaccgtttacaagctctcaaattattacaaatacaaagatggcttttacaagattgatggcgatacactaataagccagaatggtttgcgccttaagcttgaagatcttgcctggccttctttcagagaggatattgtaaagaggcttgagaccctggtggtttcccgtgcaccaaacagaaaggttacgggcagaggtcatcgggatactatttattccttaaaacacgtcaaaaaagtagtcgatcttcctgaaaaagggaaaatttcaataagctctgatgcaccaaggccaacaacccgcgttagacttgattctctaaagcccgaacagataaaggcaattctcgacaatccggaaaaagttctcgttgattatcagagtaactatcttctctacgagcgcataataaaaagactaagagaaacagaaccagatgacggaaacaaggaaaggtgggcagtgcttgcttttggaccggatacagaaccaatccgggtaccttcaaaagatggcaaggaaggtccggttgtaagaaaaatcaaaatattcacagatatcctttcgggtgtggctgtaaggggagggatcgcgccttacgacaatatagtaaggcttgatttctatagaagaaaagaaaaaaacggcaggtacaagtattatgttgttccagtttacgctgcagatatagccatgggaattgtgccggataaggtagctaccacaggaaaaccggaatcagagtggaaaaagcttgatgatagctttgaatttcttttccacatttttaagggcgattgtctgcgtatctacaaagacttaaaagaacctcccacagacatgtactttacttcttttgatagaaatactgtaagattgaaaggaaattacctagacaggtctaataagaataagcaggggaaaatcgtaacagttgaggagtcaatcacgaatgcagctagaattcaaaagctccacgtggacattctcgggcgtttgtccgtcgtggaaaaggaaaagaaggttttttagttgaacggctggcgcaatctcatagttacgtcagatgtcagattaaaactactgaacaacaacattcatcttgttcgccaggatggtaccataacgcttccaattaccgatattgatgcaatcatcattgaaaactcttccggaaccatctctatccctcttttgtgcaggctggcagaacttggggttcttctcatagttgtgggcaggaattaccttccggttggcgtttttcttccctacgatatgaacacctctagttcattactattgttttctcagcttgaacttaaagaaccttttaaaaagagaatctggcaaaaaatcgttcgcaaaaaaattgagaattgcgccaatactctagaacttttagataaaccaggcagtcagactctcttgcaaatagcttcggaagtcaggtcaggtgataccggtaatcgtgaatcttgtgctgccaaaatctactttaaaattcttgacccaaatttcaaaaggtttagcaattctcccatttctgcagctcttaattatggctatgcaataacaaggtctctcgttgctaggtcgctggtggcttcgggcttgcattgtgagctgggtgttggtcacaggagcaaaaccaatccttttaaccttgctgatgattttaatgaggtcttcagggcttttgtcgattaccttgtattttccaatcctccagatggtgatttaaccacggagtataaaacctaccttgctaccgttctcaaaatggaatgttaccttgaaaacaaggtatatactgtctccactgctgcagttaggattgctcagctttatgcaagtgccgttaaaactaagaacttcaggctccttagtttgcccgattttaaagaggtgagcttcagaacttacgagtaatcatggcaaggcttatgcgattgattgtattttttgatctgccggtaaaaacaaaaaaagacagaaaaatttatgaagagtttagaaagtttttgctcagtgaaggctactacatgattcaatattccgtttacggtaggatttgtggtggactcgaccgggtagagactcagttgcgcaagttaaaaaagaaccttcctcctaagggaagcgttcgttgcatggttgttactgaaaagcagtatgcctccatggaaattctcgttggtgagccaaaacttgaagaaaaatctcttacccagacccctctcccgtttggcgacttgattttttagtgtgttttaaagctcaaaaacaacgcttaaacagccaaaataaccctacctattatagcaggtagggattttgaagggaacccatgaccttttcgacggctttcaacacaataccacaattatagcaggtagggattttgaagggaacccatgacggctgccatggtttatatggatagcgttttattatagcag

SEQ ID NO: 1484 - DNA, 23315 bp, synthetic construct
  source 1..23315: mol_type = other DNA
  misc_feature 1..23315: note = Synthetic
cgccatgcactaaaagttaccctaggtttagaagatgaagaggtaattaaaacatttagtttctcagtaaacgaatcgtacgaaataactagtcctggtagtggacttcgccaagaaaaatcgagcagcactttaccaaactttattggtagtactgtaagtgttgctgaagaattttgtaatgaacatggtatagatttccatatcgaatatgtcgatcccgatagtgagcactataatccaaatgtggctgtaggattaataggggaccaaagtgaatttattggtgtgctactttcaacagttgatgaactaactgtttatgtagtaaacagtagagaatcaataagtgaagaacctgataatggcgatgaaactaactccggaactgactcagaagatgaaaataattcttctgacaataatgaaaattctgaagataatccagatgatggaaacgaagatgatacaactggtgatgatataacagatattatcttaggaaattaaaaaaatcaacgattaatgtttcgttgatttttttgtgcttttctttttacgattatttttctttctcttagtaggacttacataaccatttgatctatttgaagaattatttttagtcttagtttttgtgttaacattactcttagttttagttttactaactgctgtagttttctttttagtagtactagttttagccttatttgctttagtagaattagtagtgctggtggcttttttcttagtagttgagactttctttttagttgcagcaacacttttagctttttcttcaacttcttttggtgcttccactttaataactttcttttctttaactgtattaactggagaactagtttttaattttgctttttctaatttatctagtattatccaaagtattccgataaccaaagcgagtaaatatattgaaattaatacaataaaaataatatcaattttatcaaacgattttcccatctacaaccaccacatttaaacctattatagtatattttacgaaaaaataacagttattttacacacttttactggattttttgtatatgatttgtcgaaattgctcgaaaatgatataatacatatgaataagatggtaaggaggcgttttttaagtgcgaaaaataattgtttttgttacacttttcgtttgtagttttttcttaatgtataacgtttccgctgcatcatatactgctagggcttatattaattcatcttgtaatgtccgtactggcccaggcacccaaaatactaaaatatcttcggcttatattggttcttattataacctagttgaagataaaacttatactgatacaaataaccattatgattgtaatagtgattggtatcaaatttattataatggcacagcaactggttatgtttgtggtgaccatgtcgatgtcgttagaagttatagtactgatgatgttgcaccatctacaacttgtgaacaagaaatgagcaatttaggattcccatcaagttattggggaggcctttgtgctttaaaagaaagacatcctaattggcaatttgtacctttaaaaataaattatgactggagttacattattgaaaaagaaagcccatgtggttggaatttaatttatggtagtaatgaaaatagtggttttattgattctacttgtacagcatatgatagtggttatgttggtataaatcaaacgggtattgcttattacatggatcctcgtaacttcctatctgaccgatttatattccaatttcaagcccaaaattacgataataattttgcctccacttatgtaactgctgtaactaacattattagtggtagttcattttataaataccatttaaatgctggtactaatctagcagaagtaataaatagtaatgctactactttaaatgtaagccctatatttgctgcttccagaatgcttcaagaattaggaaattctgattccctatatagtttatatagtggtagttatacagcagatcctaatactacatatgggcaaaagtttatcgaactaacaggtagtgcaacggcatatcaaggttactataatttttacaattttggtgttagtgattcgtgtgttcagtcttatggaacggcatattgtggtttaaactatgcctatcgcctaggatggaatagtgtgaatgctgccatccaaggtgggctatctcaaatagctaataattatattggagctggtcaacatactggctatttacaaaaatttaatgttaatcaaagtaatccttctgatattgctactcatcaatatatgacaaacattgcagcaccatctagcgaatctgcaacaaattataaaacttatagtgatttaggaatattagaatcagctttcatattccatattccagtttttaataatatggatgctacaataaataatagtcctaatggaccagtagatggtggtgaaaataatccaccaagtagtttaccaattagtacaatagtaacatctagtggttataaatatgctagtggttatatctcaggaatagcaataggtacagatgtttcaaatattaaatcaacacttgaagcggttggtggcccaaatactgtaactatttataatcaaactggttcagttgttaataatggtatagttgcaacaggttataaagtagttatcaataattcaagtagtgtagaaactttagaaataataattaaaggtgatacatcaggagatggcaaggtcaatgccttagatttattacaagtgcaaaagcatattttgggtattaatacattaaatggaacatataaattatcgggggacacatcaggagacggtaaaatcaatgctttagatttattgcaagtgcaaaaatacattttgggtttaagctcaattacccaataaaaaggaggataaattgaaaaagttaaattttataattttatcattaataacattaattttattaccattaagtgttaatgcagctagtggaacaattaaaataactgggtcttctcaagttgttgtaggaaataaaattacacttactgtaacattatctagttctacaaaaattggtagttgggaaatgaatctagattatgataaaaactacttggaattattaagttctactagtgattctggtggcactagaatggcaagtgtaatgcaatcaactacgggagtgagttcaaaaaagtatacatttacatttaaagctaagaaaacaggggcgacaactttaaaagttggaacatatgatgtttatgcagttaacgaagaaaaaatgtctataacatctacaggtaaaacagtcaagataataactcaagaagaactagaagcaagttattctaaagataataatttaaaaagtctttccgttgaaggttttgaattatcaccagcattttctaaagatgttacagaatacactgtaacagtaccagaagatactaaagaagttacaatcaatgcaactgaaaatgattcagcagcaaccgtatctggaacaggtactttcgaagttactcaaggaactaatactttccaaattgtagtaagagcagaaaatggtagtgaaaaaacatacacaattacggttgatgtaaccgattcgaatccaataaatgttactatcgacggtgataattatacagttgttaaaataaaagagtttttaccagcagtcaatgcttacactgaaacaacagtaaaaataagtgattttgatattccggcttacactagtgaacttactggttttaccttagttggtttaaaagatagtgcaggtaatattgctttatacatatatgatgccgataataattcttatacggcttataacgaattaaagtttaatcaacttactatttatcccaaagaaacagataatactttagatggttatgaattgggaacagttacaattaatgattttgaaattccggcttattatacttcaagtgattcaagatttgctatcatctatggaattaatgttgaaactggtgaagaaggattcttcaaatatgataaaactgatcaaagtattcaaaaatacgatgatgaaatgattaattcattactggaaaaaaataaactttattcttacataataattggttttagcgtcattttagtaatcatgtttattatattaattactaaaggtcgtggcaagaagaaaaagaagaaagacattaaagtagaaaaagtcgaatttaaagatgaacctgaaaatgtttctgagaataaagaagaaaaagcagaacaaccagtagaagaaaataagattgaagaagtcgtcaacgaagactttaaattagatgaagaaatatatgataatgtcaataataagaaaaaatctaaaaagaaaaagaaaaaatagttgacaatcattaaataaaaagattataatcgaatataaaaaaggagaaatattgtcaacatttaaaatattaaaagaaaataaagatttttgggaaattgaaactgatgttgtattagggggaacttgtgtaaaaaagcttgttaaaaccgccaataatgaattagcaatgtttaagtacaataaatacccgatgtgtacagaattagcatcggaaaaaatgtgttatgaaattgctaaagcattagaatttcggtgtgctaaaatagatttggcaatcgacaagaatggaatctatggtattctaaattatatctttatatctcccaattcatctcatacagatgcatcgctatatctaagagatgataattttgaaagaaaaaaaacatatactatcgaaaatataaaagcatttttagacaattatgaaatagatttgttttcccagttcatagaaataatgatttttgatgctttagtaggagaacaagatcgtcatgaagaaaactggggaattacaactataaaaaaccctttattaaggtatagtatatcgccattatatgataatagctgtaatttgctaagagatcaaattaataaattggataattttgaaaatccagaatatttaaataattatatcaaacgaagtaaaacagctatttataaagatggtaaaaaaatcaatcattttgatttaataaaagaattaattgaaactaatccggaggcatcaattactagaataaaaaaattagaaaatttaactgataataaaatttctaatattgttaataatattccagaagaatatctgactcaaaaacataaaaaatatatagttaaatatatttctaagagaagggatattttgctaaatatgataaaagttgaggtgaataaaaaatgaaaacactgctgctagtatggaaagatttcgaaacaagaaccagatatgtagtaggaaatcttacatatgataacaaagtttatttttttaaatatacaaatcctgaattgagcgatgcccaaaaacaaggatttacttgttatccgggttttgaagatttaacaaaagtttatgaatcaaaagagctattttcaaatatttctagtagattgccaaataaaaatagagatgattatttagaaatattaaattattataatctaaattcatcagatgatgaatatgaaatactaactagaactaagggaagattgttaactgatacatttgaatttgtacctacttttgacaaaaataaaatagagtttgaaattgcaggaactagatatagcgaagaaattgaaaagtatcttaaagaaattaagcctaatacaaaattagcattggaaccaacaacatacaaagatgaaccagcaattaaagtttatggaattctttcaaaaaaagtctttttgggatatgtaccaagatattatgccaaagaaatttatgaacaactagaaaaaaaagttaattattcagcaatgataaaagacgtaaaatttgaaagtttaattaatgatgaacatattactgctaacgttaaattattattttcgtaaaatttaagattaatgtcttaaattttttaaattggtcaaaaattgttgtataataataatggtgataatagtgaacgatgcttatcaaaaaagtaaagaagaaatattaaaagaatataaaacatcattagatggtttaactgaacaagaagctaaaagaagattaaatctttatggtaaaaatatcctaattgaaaagaacaaaaaaagcaaattacgtatttttatcgatcaatttaaaaatgtcatgattatccttcttttagtagtggggctaatgtccttattttatgctatttttacaaatggtgattttcttgaaccaattgtaatcttaggaacatccctaataaattgtttcatgggttatttgcaagaatctaaagccgaagatgcaattgaaaaattgaagagttatcaatcatcgaaaaccactgtcaaaagagatggcaaactagaagaaataaattcggaaaatttagttgatggtgattacattattttggaagcaggagataaagtacccgcagatgctagaattgttgaaagttattttgctaaatgtgatgaagcaatactaaccggagaaagcatgagtgtcgttaaaaatgaaaatcaaataactaaaaaagttttattatcagaacgttctaacatggtttattctggtacagtagttgttgctggtaaaatagaagcaatagttgttgaaactggcatggataccgaaattggtaaaatagccgctactattgatgtatcaaaagaaccaataacaccacttcaagtaaaagtaaaaaagatttcgacgtttatctcaggtattgcagcatttttagttgcctttgtattatgttatggcgttatcatggattatacagttttaaatgtagtaatgctttgtatttctatgattgttgctagtgttcctgaatgtttaccaattgccataactgcaaccctttccatcggagttagtgagatggctaagaaaaaatcaattgtccgtaatatggcagcaattgaaactcttggagcaactgaagtaatatgcaccgataaaactggaactcttacaaccaacaaaatggaagtaataaaaatatttactaacgaatcagtcataaatttaaaagacatcaaaaaatatcctgaacttatcgatgtcatgatgtattgtaataatgccaccaaagaaaataatggttcatatacgggagattctgtcgaagtggctttaagtacttttttgactaaacaaaaaataaatattgaaaagcatctaaaagaaaacttaagaaaattagaactaccatttgactctgatcgtaagatgatgagtacaatttatccattaggtaaaaaagaaatcatctatactaaaggtgggttagaatccatactttctaaatcaagtcatattttaatcgatggtaaattagaaaagttaactaaaaaatacaaagatgaatatttgaaaatggaacaaacattttctgaagaagcattaaaggtactagcctttgcttttaaagaaatcaataaaaaaataaacaaagaagatgattattttaaagaagaaaaaaatcttattttagtaggtatgattggtttaaaagatcctgctcgtaaaaatgtagcaagcgctatccaaacttgtcgtgaagctcacattagaccaataatgcttaccggagataatttggcaactgctttagccatcggtaaagaagtaggaatttgtaagtctgatgatgaaggaattaatgctagtgacttaaataatttaaaaactaaagaagtaatggaatatgttaataaatattcagtatttgctcgcgttagcccagaaaataaagttcaaatagttaaagccttacaaaagatgggtaaagttgttgctatgacaggggacggtgtaaatgatgctccagcaatgaaacttgctaatgtcggagtgggcatgggtaaaagtggtaccgatgtaaccaaaaatgttgctgatatcatccttttagatgactcttataataccataactactgctgtatctgaaggaagaagaatctatgataatgttataaccaatgttttatataatctatctagtaactttactgaaatagttattattttacttggtatgtttatgggaagtaacataattacagccattcatgttttatacatcgatttagttgctgatacattgccatccatttgtttagcctttgaaagtgcttctaaaaacaacatgaagaaaaaaccaaatggtttaaatcgtaaaatatttacaccatttttcatggcttttctaatattttccgtaatccttgaagccggtattagtatcatggtttatttcctatttagagatagtggagaaaatattgctcaaactctagcattatttagtatagttatcaatgaatttgtttttgcgtataactgccgtagtttaaaagatcaaatatttgaaaagggaatattttctaataaacgtttaaatattggcatcttaatattattaataattcagttaattgtcttctttaccccagctggtaaactatttggtttagaagtaataactttatcgcaatttgcttttgtaatgttagtaaatctagcatcatttatattcctagaattagttaaacctttattacgtttatttaaagatgaataaagtatgatataatataataaattttggaggccaaaatggatgttgcaaaaataaaaaaagaattaatagaacagaaaagaagcaaatttaaaggaaatatatatcatttttctcaagttgctttttcttataattctaataaaattgaaggaagcaagctaactgaagaacaaactgaagctatttttgatacatcatcatttatacctaaagatgataatttaatcatattagacgatttaattgaatctaaaaatcattttaaattatttgattatatgttagataatgtagataaaccactttctaaagaaatgataattgcaatgaatgtattattaaaacgaggaacgtccgatgaagataatcctagatataatatcggaggatttaaagtagtacctaatataatcggaacaattaatgtaattaaaacaaccccaccagaggatgtagaaaaagaattagataaactattaagagattataattctttaaataaagtatcacttaaagatataatttggtttcatgttatatttgaacgtatccatcccttcggcgacggcaatggtagagttggtagaataattatgtttaaagaatgtttaaaaaataatattatgccatttataattttagatcaagataaagattattatctcagaggattaaaagaatataatagagataataagtatttgattgataccataatgcattcccaagacatgtatgaagatattgctaatcaattgttagattttgaaattaatgaatagtcgcaagactatttttttgtttagaagagcttttgaatataaaaaattgttaataaattaatagtgaggagttcagagctgtttactagagttcagagctgtttactagagttcagaggagttaaatagagttcagaggagttaaatagagttaaataatatattgaaagttcaatatgaaaactataatgtgaggtaattatgagtttaaatttttcaaagactaaacaaaagagtataaggtatagaagtacaaatttattatttaaaattttatgcaaaaataaaatgaataaatttataaagtggattaataataaaattttttgtttcaatatttaaatttgtggtaatatatacatagaaagaacacctttattttatggattttataggtatattataccatgtgttctttttttatactttccgataaatttggactctgtccaccttattaaaatattgtcgaatatggtaatatttgttataattggcttataaggaggtaactatgagtaaatatagcatagggttagatttaggggttaataatgtgggttggtcaatagttgatattgatacagcccaaatcgaaaaatgtggggtacgtcgttttaatactagtgatagtgccaaggatagacgatttcaaagaaatactagaagaagattaaaaagaagagacactaggaaagaggatttgctaaaactttttggtaagatcaattttccaactactaacacaattgattctaaattgatagaaaaaagatataaaggaattaacgaacaaataactaagcaagatatcgtaaatattttgtgctttttagtaactcatcgtggctatattccttttggtgatgaagaagtagaatttgttgatttgcaaggaaaactaccgtgtgaatattattataatctttatgaaaatagtattaataataaatatcgcgcattagcaacaactgttaaaaatacagataatgaaagagaaataagaagattaattgaaattcaaagtaaatactatcctgaattgaatgaaaattttctagaacaattatttggaaaagatggcaaaagtggcatatttaatcgtaaaagaaaattttgggaaggcccaggatcaataaattcctttacagaatatggtaggtttaaaaataaatttgataaacttgattacctagttcaaaaagatgaaaatcctagttatgaaaaatacttatttgaagatttaattggcaagtgtagtgttgatccagatgagcgatgtgcatcaacaggtaacttttatgctgaaaaatttaatcttcttaatgattttattaatatgtattttaagtctattgaaggcttttctaatcaacaagcattttatcaaaaagacaatacatcatataaattaacaaaagaaggattagatttagtatttgaatattgtcttaatcatgatactattaccataaaaaagttattgaaagatttatttaatactacagaagataatattggtggcttcaaaactgatgaaaaaggtaaaccagaattatcgacgatgaacatttatcgttcgattaaaaaaatatttgctaacaaaaatgctaatatggaaatctttaaagaagaaaatatagacaaatataattctataatcaattacatgggaattgttcctggagttgttgagttaataaatatcataaatgatatggttattagtttagatgaaaaagacattgtagctttaactgatgctctaaaaactaataaaaagaatttaaaataccattctttatctgaaaaagttttaaaaagagcaattaatgatatgcaaaataattgcttaaactacatgcaagtatttaaaaaatatgattatgccaaaaaaagtcgaaatttatttattgaaaaatattccaagtttagtaataacctaagtgttgatttgttaaattctgaatttattgatgatattattgcttctccccaagttaaaaagactttaagacaagcaattaaaattataaatgccattattgaagaaaaaggtaatttaccatattctatttctattgagtcagccaaagaaacgatgaatggggctaaaaaaagacaagaatattctaaaattcgggacttaaatactaagttacataaacaagccgaagaatatttaaaatcaatatctgcaaatgttacagaaaaaaatattgaaaaagtaatgctttggaatgaattttctggagtatgtccatattgtaataaaagtgtaaatattaattatttattgaatggttcttatgaaattgaacatattttaccaagaagtgaatcatttgataactcttatgaaaataaaacaattgcctgtgcagattgtaataaaaataaaggcaataaaacacctcttcaatatttaaatggcagtgctaaagaagcgtttataaatagaataaattccaacaaaaatatatcagatattaaaaagaaaaatttcttatatgttgatgacattagtaaatataaaataagattttttaatcgcaatctaagagatactgcttatgcaactaaagaaatagtaaatcaaataaacatttttaatgattatttaaaatataaatacaatgatgatactaaaaaaattcttacaatttcaactcctggacaatttacaagtaatattcgtaaaagatatgacttagaaaaaaatagggatgctggagaacaaccgtatcatcacgcagttgatgcatcaattatagcattattaccaacaacagaattgggtagtgaaattattgagtttcaaaataattctaaatttttcctagataccaatgccgataaaaaaatggacaatattggctataagatgaatgtatattataaaagtgaaagtaatatagagtatgataattatattatagatttaaagaaaataactgatgaaaataaagaattatttaaatattctccagaagtagttaaagaagcaaatcgccaattatcagatgcaaacattataaaagtaatatttaaaggaaaagattattttcaaattagtcaaataaatgatatatattctttaagtgaaagcgataaaaaaatattagataaagcatttgatgatagcaaaaatgaaaccttattatgccaagacaataatataaaattatataataaattaaaagatatttatcttaaatttaaagactctaaagaaccatttgtagattattgtagagaagttaataacctatctaaagaagataattttgattatttaatccatggaataaaatcatcagaaaatggtccaacagtaaaaaaattaagatattatattccaattaatgatccttactttttagaaaaaaagaacataaataaaaaagaaaatactttaattgctttagatggattatctcaagtgtgcactagagtatactataatgaaactaaaaattgttttacatttttaccaatcccagccatttgtactaatttgaaaaatggtaaaatcaataaaaatcatcgtttatataaacaatattatgataaattaattggtgaagataaagtaagacatatagttgatttatacaatggtaatacaattgaagtatacaaaaagagtggagaaataattagaggagaagtaagttattatgataaaacggaaaaaagaattgttttaaagaagaaaaataatgaaaattctcctaaaaaatttattaaaaatgattataaacttatggtttatgacatagacccacttggtaacgaaaaaataaggttgacttttgaaataaaataaagtatattataagtgcagtgtcaagttagttgtacattgctctcaaatattacaggttttcttattataactctttatgaggaaaccattggtcacctttatggtgacctttttatatttatggcatttagaagtattataataagtaaagcaactaagataaatttagatttaaataatattgtagtaacttatgatagtgaaccatatcatattaatttagatgaaataagtacaatcattattgatgacccaagatgtttagtttcactaagattattgagtgaactttgtattaaaggaataaatgttatatttacagatgcatctcataaaccagttggaagtcttaccactttatataataatgctagagcacccaaaaagcacaaagaacaaatattatgggataataatttaaaaggttatttgtggacaaccattgttaaagaaaaaataaataatcagagattagttttagaaaaactaaaaaagatagataaaataaacattcttgaagaatatttaaattctgttgaatatggtgatgtatctaatagagaaggcttagccagcagaacatattttaaagaattatttggtagcacatttaaaagattcaatgaagatattattaacttttgccttaattatacttatcaagtattaagaagtaagatatctcaagagataatttcttgtggttacataccaacgcttggaatttgtcataagagtgaatataaccaatttaatttggctgatgattttatagaagtttttagaccaataattgattattatatttttcttttgttagataatactaaagaagaattcttaactcctcaactaaaaggagatttagtaaacatattaaatgagcgcgtgctatataaaggaagttcttataaaatacatagtgttattagaatttatctacaagatattttttcttatttagaaactggtgatttagcaaaaatgaattttccaaaaataatatggaatacgtaaattattataaacaaatgcgtatgttcttaatttacgatttaccaactgttgaaattgaagatcaaaaaatatatcaaagattccataaccaattaattaagttaggattttatatgttacagtattctgtttatgtaaaagtagttcaaaacgatttatcttataaacaatacatcaacaaaataaatagtatattaccacagaaagggaatattgctattcttaaattaacagaaaaacaatatgaagatatggtttatcttcgaggagaacaaaataaatttgataccctagtaggtggaaaagaattaattgtttttggaggtgatactaatagttgaattaaaattgatgggtgaatatgaacaaaacatatctattgaaaaagaaaataaaattaaaataatagattataaaatgtttttgaatttttataaatacttttatttaaaacaagatgtatttattcaaaataaagaaataactaaaaaagattgcgtaattatagatattacttcagttagtggtatttttaaacaaatagagtttagcaaaggaactattttatatgattatatatcacttaaatatagtgaaataccattagaagataagcaaaaattttataatgaatacttaaatcaaattgatattttaaaagaaaaattaaacattaattctaaaattattcctgaagatagtatagataaagtagtattacaaaatattgatataagtatagattttgacaatttgttagaagcattcaatgtaatattaaataatataatgaaagaaaacattaataaaacttatatcatattttatgattcaaaattaattgaaattaaaccagaaagtgataattattatttatttgatgtaaatcagtttttagatatcgaaaaatataatttgttgattagtcaaaatgttaatgaattagatgttaattatttaattaattatattgaaaacatttggccaataaattatgaagaaaatgaaatatgctttttattagaacactattttaaatacttaatttatttaaaagatataagtatatttaatgaaaaactatacttaattggatttattttgaataaaacatataaattaaaccaaagaattaattgtacaaattcagacattaacaatattattaaatcatttatagacacattttaaaatatatgatatgatttctataggttttaagatactgtaatatttgagagatgtacaactacaaaagtaccagttataggaacacacacgttttaagatactgtaatatttgagagatgtacaactaagacatttaataaattttataaattattagttttaagatactgtaatatttgagagatgtacaacaatataatcagaataaccacttccaggataagttttaagatactgtaatatttgagagatgtacaacatttagaataaaaactgtaaataaatctttgttttaagatactgtaatatttgagagatgtacaacttattagccttcagaaacagttggaacgtagttttaagatactgtaatatttgagagatgtacaacaaagacaaaaatggtgatgttcaagtctatgttttaagatactgtaatatttgagagatgtacaaccaattatcataacagttaaaatatccttcagttttaagatactgtaatatttgagagatgtacaacaatgatttacaattttgtatcaaattttcagttttaagatactgtaatatttgagagatgtacaacaaataagttgacttaaaactatgactaactgttttaagatactgtaatatttgagagatgtacaaccatatttctttggtacttttagatccatattgttttaagatactgtaatatttgagagatgtacaacgctgtccaattaaatattttattgatcattgttttaagatactgtaatatttgagagatgtacaaccaattcttgtattaaaaatttgcattacttgttttaagatactgtaatatttgagagatgtacaacaattgaattctaacttgaccattccaagtcgttttaagatactgtaatatttgagagatgtacaacaactaatttaagattaggacaatcttttaagttttaagatactgtaatatttgagagatgtacaacatagttattttgttaataaggtggggactcgttttaagatactgtaatatttgagagatgtacaacgtaaactccgtacctatcatcaatgctagggttttaagatactgtaatatttgagagatgtacaacatacatttatttgttataaggaggggactcgttttaagatactgtaatatttgagagatgtacaacacccacttattgtattactactaatgatatgttttaagatactgtaatatttgagagatgtacaactaatgctccttaaaacgcaatcatcaataaagttttaagatactgtaatatttgagagatgtacaactgtagagattatctttcctaggttattttcgttttaagatactgtaatatttgagagatgtacaacaaatgaacgaagaaagaaaatttactattggttttaagatactgtaatatttgagagatgtacaacggagtatgtcgaatatatatatacgcttttgttttaagatactgtaatatttgagagatgtacaacaaattcatctataaatagcccataatattggttttaagatactgtaatatttgagagatgtacaacggtatcataaaaggtgcttgcggtcatagggttttaagatactgtaatatttgagagatgtacaacaacattatcaaaatatattttcattgtccagttttaagatactgtaatatttgagagatgtacaacacattttctacagtaactaagtcaattaatgttttaagatactgtaatatttgagagatgtacaacagtacatatttaataaatgaaggagaagaagttttaagatactgtaatatttgagagatgtacaacacattaagattattaatacccatatctgttgttttaagatactgtaatatttgagagatgtacaacccattgcattatatacatgatattgggttggttttaagatactgtaatatttgagagatgtacaactaatttgttatttatttcgttataggttgagttttaagatactgtaatatttgagagatgtacaacatatatgctaaaagcatttaaagattattagttttaagatactgtaatatttgagagatgtacaacactagataactcatcttcaaatcctactccgttttaagatactgtaatatttgagagatgtacaactacaagtatagtaaatgatacaggtggagagttttaagatactgtaatatttgagagatgtacaacatattattgtcgctaaatttgtattatgtgttttaagatactgtaatatttgagagatgtacaacttcgcccataccagttgccgtaggtgtttcgttttaagatactgtaatatttgagagatgtacaacgagcaactaaactctaactttacccttagcgttttaagatactgtaatatttgagagatgtacaacataagtaaatagactttcgcggcataacaggttttaagatactgtaatatttgagagatgtacaacattcacgaatactatccaataatgaatttagttttaagatactgtaatatttgagagatgtacaactcatttagaattcctccttattatatcttcgttttaagatactgtaatatttgagagatgtacaactttaaaaaataaattagctaacaaaatgaagttttaagatactgtaatatttgagagatgtacaaccctaatataaaaatacataaattacgaatagttttaagatactgtaatatttgagagatgtacaacatgtaattagtttagtagggcgattaactagttttaagatactgtaatatttgagagatgtacaactcttcttgccactttcctttagcagtttctgttttaagatactgtaatatttgagagatgtacaacatttaatgaaagcatatatattttataatggttttaagatactgtaatatttgagagatgtacaacattttttgtttttttgttaatattcgctttgttttaagatactgtaatatttgagagatgtacaaccttttggttatcaatggtacaaaaatggtggttttaagatactgtaatatttgagagatgtacaacacctatgcgttgcccctgactatactttgtgttttaagatactgtaatatttgagagatgtacaacttatgacctttcattgctaacttcatcattgttttaagatactgtaatatttgagagatgtacaacagtcgattctttattgacagtatagatatagttttaagatactgtaatatttgagaattataattactttttaaattatttataattaggatttatcgtaaaagaaaataaaggatatgtaggtttgtcaaacatatgtgacaacgtatatggttggcaaacctacactgtgtgtttcaattccttatagagtgactatatgccgagaaaacgtactgcctttctgcaatctaatcacaacctgggttcctgatattttacggcaaattggaatatgtcacggatctatttgaaacacacattatcgtaaaagaaaataaaggataattcttttattttcttttcatttaggttataatattattactaggagttaaatatgaatttagttgtaaatgaacataatgtatttgttatagttattgtaactcttttgacaagtttaatacttgtgccaattgtaaaaaaaatagcaattcatgtaaatgctatggatgaacctaatgctagaaaaatccataaagttcctatgccaaggctagggggattagccatttatttagcattccttttaggctacatgttatatggcgaagtaagtacacaaatgctatcaattctaattggtggtttcctacttatcttaatcggttttattgatgatattaattcagttccagccagatataaactaattgttcaaataattgctgcgactatcgttgtattatatggtgatttatcgtttactgaactatctttattaggaaaaaagatatattttaatgctttttggggatcaacactatcaattatttttattgttgcaattactaatgctattaatttaatagatggcctagatggtcttgctgcaggtattagttcaatatactttttaactattgctattattgctttcatattaaatcgtatcggaggattagatgtcataatttccttaataatgcttggagcaacattaggttttcttgttcataacttcccaccagccaaaatatttatgggggattctggaagtttattcttaggatttatgatatctgttatcgctcttttaggatataaagttacgacatttacatctttaattgtaccaatagtaatattggcaatacctatttttgatactatatttgcaatactaaggagaataataaaaggtcaaaacattggagttgctgataaagaacatttccatcatcaacttttaaaaatgcgttatagcccaactaaaagtattttaataatttatgctatcgatattgcttttgcagcagtttccatcttctatattctaggagataaccaaatagccattgcaatatatatagttttaatgattttactattatttgttgttttaaaaacagatatcttatttgatcatagtaaaaagaaacaggtgatagaaaatgaaaaaaaaccaaaaaatgtcaaaggaaaaaatagagaaaaaaagaaacgtaaaagaaaacattcttaatatttctactctaatttttctttttttaatacctttatttagcactacttatttttatagtagctatactacattattcgaagtaatatgtatctttttaatttatataagtacattaattatttataaagagtcacggaaaaatagtaaatatatatttacttattatttactatgtattatatatttatttattaattattttagagaagattctttttattcgctagttcctggaaactttgattacaatttcatctcagaaggattaacaattattaaattagttaccccaataacgtttctatattcattatattatcaaaaaattgaatggaaaaaatatctattagttttaaaagtatgggttattttaatatctggatcaatcattattacgaatatttttaaaattagtttaagttcatatagtgatctaacaattaccaagaatatatttgagtgggggataaataattactatcaagaaactgctagcaaaggattttttatgtatgctaatcaggaagcggttattatgctcatgttattattagtatttatttatgatttcttatataaaaatcaaaaaagtatattttatattacaattcttatgttatcaatgcttatgcttggtactagagtagcatcggtcggaggatttttaaccattatttgtgcttatgtattttatattatatattgtctttacaaaaaaaaacaatttgatttgaaatcattatttcttgtaatacccattgttatctggggacttctattaccgatttccccttatgctaaccgcaatattgaactaaataatattcctgaagaagtttcaagtgattcctcttcggaaacaaataatatccaaagtgaaataaaaaaagatagtattaatactaatatagaatatgtatatgccaattacaaccctgattatctcccaagtgtttttttcgaacaatattatccaattgaatatgattcagaattttggtatgaatttgtaaaaaataccccgatagaaaatatgaattatcgcttaatagaaagtagtattataaaaagagtggtagacataaatgataacagtttagatattttgtttggtataagcaatgtccgcattcaaaatatcgtcaatattgaaagagactttattttgcattactacgcatttggtattgttggttcaatcattttactattaatatatataattatgcttatttatagtctttataatttttttaaatatcaaacttattacttatttataataacaacttctattatattattcctgttttcggcttatttaactggtaatataataaattcgattaatgtaatcattccttttacttttatatcaagtggtatatttcgaagcaaaaaggttgataaatagaaactttttttgttataatacattaagaaaggatttctttaggatatgaaaataatcaataatttaaaatatacttataaaaaatatggatttttattacaacaattagtatctagagattttaaagtaaaatataaaagaagtgttttaggtattttctggagcctattatatcccatattaatgatggctgttatggctatagttttttctaatgtttttagaatgtcaacgccaggtgttagttatttagcttatttaatgatagggttaacattttttaattattttagtgaagcttcaaatctagctatgagtagtgttgtaggtaattttagcttaattaataaagtatatattcctaaatatatatttccgctttcaaaatgtctatttgtaggaataaactttttacttactttaattcctttatatgctgtaataattcttacaggaacaggccttaattggtggcatttattattacctttttcttttatttgtttatttttgtttactgttggtatgggattcattttatcaacgatttcagtattcttaagggatatgttttatatttatggaataataacaacgatttggacatatttaactccaattatgtatgatataagtataattaatccaacattacaatttataatgaagtttaatccaatgtatcaatttattaattttgctagatcaataattctttatggcaattgtccaaccataggacagtttgcaggttgttttgtttcagcaatagttatattctttataggaatatttgtctttaaaaagaatcaagacaagttcatttattatgtgtaggagggggcaacaatgaaaaagaaagaaataatgattaaagtaaacaatgtatcgatgcgttttaatttaggcattgaaaaaggattttctctaaaacaaggatttatagatttgtttaacaaagaaaaaagaaaaaaaaataaaataaaaaataacaacttttgggcattgaaagatgttaattttgaaattaatagaggtgaagttgtaggttttattggttcaaatggtgctggaaagtcaactcttttaaaagtggttgcaggtgttatgaaaccaactaaaggaaatgttgatgtttatggaaatatttgtccgatgattgaactaggggccggatttgatactcagctaactgctcgtgaaaacatttatttaaatggagcggtgatgggatattctaaagaacttattgattcaaaatttgatgaaattgttgaattttcggaacttaaagactttttagatgttcctgttcaaaatttttcttccggaatggttgcaaggcttgcattttctatagccacaattgttgacccagaaattcttattgtggacgaaatattatcagttggagatattgcgtttcaagctaaaagtgaagcaaaaatgatgcaaatgattggtggcggaaccacagtattatttgtgtcacattctatcgagcaaataaaaaagatgtgtaatagagtagtatggattgaacatggtgtagttcaaaaaattgggggcaaagaggtatgtgatgaatatcgcgattttatgcgtaaaaagtaagagtgtttcaggaggtagtattgt

SEQ ID NO: 1485 - DNA, 23276 bp, synthetic construct
  source 1..23276: mol_type = other DNA
  misc_feature 1..23276: note = Synthetic
gaatcaaaattagaagaaaaattaataagtcaattaagtaaacaaggttatgagatagtaaaaattgatgatgttcaagctcttgaaaaaaactttagagaacaaataaataagcataataagattgaactgaacggtaaaggtttatcagacaaggaattcgaaagattaatgattaaaatttctggaaaaggagtttttcaatctgcaaaagaattaagacaaaaacacgacattcaaagagatgatggcacgactgtctatatagaactttttaacacaaaggattggtgtaaaaatatatttcaagtaactcatcaaacaacagtagaaggaaagtatgtaaatcgatacgatgttaccatcttaattaatggattgccattggttcaaatagaattaaaaaaacgtggaaatgatttgaaagaagccttcaaccaaataaaaagatataaaaggcattcttatatgggattatataaatacatccaattatttgtaataagcaacggagtcggtaccaagtattttgcaaatggagatcaagaattaaattacggatttactttttactggacagattctcaaaataacagaataacaacattagaacaattttgtttattctttttggatagatgtcatattgccaaaatgatagcaagatacatgataataaatgagactgaaaaaatgttattagtcatgagaccatatcaagtttatgctgtagaaaatattgttgatagagcattaaatacaaacaataacggatatatatggcatacaacaggatcaggaaaaacaataacatcatttaaaacaagtcaaattttgtcattagaaccaagcattaatcaggtattctttttagtggacagaaaagatttagataagcaaacactagatgaatttaataaatttgatccgggctgtgttgatcttacaaatcaaactgataagcttgttgagcagataaaagatagtacaaagccattgataattacgacaatacaaaaaatggccaatgcatgctcaaatccaaaatattcacatataatggacaaatacaaagataaaaagacagtatttattatagatgagtgtcacagaagtcaattcggagaaatgcataaacaaatttcttctatgtttaccaatgcacaatattttggctttacaggaactccacgttttaaagaaaatccatcacaagatggtagaagcacagctgatatatttgaaaagtgtttacatacatatttaataaaagatgctataaaagatggaaatgttttaggcttttctgttgattatatgaaatttatagaatctaatggacaaactgaagaagatgttatggttgaaggaatagatacagatgaagttttcatggctgatgaaagaatagctttaattgcagatgatattattaaacatcattatataaaaacgagtaatggcaaatataatgccttatttacagtttcatcaattcctttacttataaagtattatgatgcttttaaaagaattaaccatgacttaaaaattggagcgatatttacatatggagccaatgaagatttagataaaaatccagtccattctcgagaatctttagacagaataataaatgattacaacggaatttataaaacatatttttcttcaagcacattcgatgcttactttagagacatttgtaaaaaaataaaaaatacagaaatagacattgttatagttgttaatatgctattaacaggttttgatgcaaaaagattaaatactttatatgttgataaatcacttaagtatcatgatttaattcaagcattctcaagaaccaatagggtagaatcagacacaaaaccatttggtaatattgtttgttacagaacaacaaaagcgagtgtggatgaggcagttaagctattttcacaaacggatagcgtagatacagttattcaggcaccatatgaagtatacaaagataaatttaacgatgcagtaaaaaaattgttagaaataacaccagttgtagaaagtgtagattgtttagaaagagaagaagatattaaatcttttataattgcatttagagaaatggcaaaaatattagtaagcttaaaaacatttaatcaatttgatttagatagtgatgaatttataataaatacccaaaactttgaagattataaaagcaaatactatgaactttacaggaagttatcgaatgataaagaaaaatgttcaattttaaatgatgttacattttcactagaattaattcagactgataaaataaatgtttcatatattctaaatttaattagaaatgtagacttatcaaatgaagaacaaaaacaaaaggatatagaaaatattgaaagtaaattagttaatattacagatgatgaattgttcttaaaagcagatttaataagaagttttttaacgtctattttaccagcacttaaagaagaggattctattgatgaagcattaaacaaccacatgaacaaagaaagacaaaaagaaataattaaatttgcagttaacaatgatataaatttagaatctttacaaaaaattatagatgattacgaatatagtggaatatttcctgataagttaattaataattcgattgaagttgatgattattgggaaagaagagatattaaaaatagagtaaaagaatttattagaaatctactcaaaaaatttatgtaggaggtaaaaaatgtcaagagaagataaacaacaaatacaacaagcagaacttcaaaagagattatggagtatagctaatacattacgggggaatatggacggtaatgattttaaaaactacattttaggattaatattttacagatatttatcagaaaatttagtgaattatgtaaatcatacattgcttagagacaaaatgtcatacagtgacatgtttaaagatgaaaataaggttaatgattttaaggttgacttaattgaagacgagaacataggatactatattgaaccagaatacctatgggaaactttaattgaaaaaataaaaacaggtaaatttgatatctctatgttagctaaagctattaacttaatttcagaatcaacacaaggaaatgaatcagaagatgattttgaaaatttatttgaagatatggatttaaataactccaaattaggcagaggagaagctgaaagaactaagctaatttcaacaataatgttaaaaataaatgatattgactttcaccatgaagatgcagaaattgacgttctaggggatgcatatgaataccttatatccaattttgcagcatcagcaggtaaaaaagcaggagagttttatactcctcaacaagtatcaagaattttagctaaattagttacaataaacaagtctaaattacaatcagtttatgatccaacgtgtggttcaggttcattattattaagggttggaaaagaagctaatgtaacttcatattatggtcaagaatttaattcaacaacgtacaatttagcaagaatgaatatgttattacatggaatatcattcaagcattttgatattaaaaatgcggatacattggaacacccaatgcacatagatatgaaatttgacgctatagttgcaaatcctccatattctgcacaatggagtgctgatcctaaatttttagaagatgaaagatttagtgcttatggaaaattagcaccaaagtctaaagcagactttgcatttattcaacacatgatatatcaattatcagataatggaacaatggcggtagtacttcctcatggggttctttttagaggagcttcagaaggagttataaggaagtatcttatcgaagaaaaaaattatttagatgcagtaattggacttccggcaaacattttcttcggaacaagtataccaacatgtatattagtgtttaaaaaatgtagagaacacgaagaaaatatcatttttattgatgcatcaaaagattttgagcctggaaaaaatcaaaatagattaagagatgaagatgttgacaagattattgaaacatacaaaaatagagtagaaatagaaaaatattgtcacattgcaccaatttcagaaattaaagaaaatgaatataatttgaatattccgagatatgtcgatacttttgaagaggaagaagaaatagacatcaaagctgtccaacaagacctaaaagaaatagataggcaaattgcagaagtggataaggaattaaatgtatatttaaaagaactaggattagaagaattttaaaataaaaaaggatttatacaaacatattttgcataagtcctttttttaatttttgtaatttaattaatttattttgctcgagtttaattttagaatctaactttataaatggaattgtaaattttttttgttgttctattgaaatatatggtattttatgttttaaaactgagcttcttacaatttgaggttgacctgatcctgaaattaaatattttaaattttgagcttctaaaatattttttaaatatagcttatctacatttttattctcatcaacatttaaaaccatggaattacctgttatccagcattcatatggtgtcaaattaattgttcctgaattttctcctctgcagctaatagttacctgcataaatttatgattaaatttgctatatttaccaataattccatttgcaccaaatacataatatttaccattgtctaattcactttgtgaaatagtttgtggttgataaatatttgctatacacgatagttcagttaaattattattagctattttataataatttttcttcaatagcccttttttaaataacttaaggtcttcaatttttttactttgtaattctatttttttatctagtaatgatagaaaatttgctaccttaagttgttcttcttctgatggtaatttgaatttgaaattattcatttgttcaagatttaaatttggttgtgctcccacagatatatttagtaaaatatattttttcattatgtttgaatctaatacatttaataagaaataaggatttaattttttttggtttgttcttaaaatggctaacgcttgatttgtatttgatggaaggtcttctttttctataattccacatttgccaatagttgcgccagcgattgcaaacaaaacatctttttcttctaaaacagatctttttaatgaagttatatgtgtaatttcatcgacatataaacatttattattatctatttttttatttattaatgattctatttttataaattttattccatattctgaaaatctattaggagttgttccttttgtaattaaattacaacaatcacctaatctaattaaattccaatcatccttaaattctttaaatcttaatttaggaacattcatttaatcaccacaattctagtccttaagtttaataaatagatactaatctattaatattagtatagcacattatctttataaaaaaaagaaaaagttagacactattttactttttctttaaatattttactaactaaatcaatgcattttttcttttgggaatactggggatgtacatataaatttaaagttatattcacactcgagtgtcctaatagttcgctaactgttttatagtcacatcctagagaaatgcaatttgtagcgaatgtgtgtcttagcgaatgaaagttaaaatgtttaatcttcaaatttttaagcaacttattaaaatattttctgtatgttcttggttcgatatacttattgtcgtttgataaaatataattgtctgaattagtttttagttttttgagaatatctgaaaattccttgcttattggtatttctctatttgcattttgagttttaggagtggatataataacctttgagatattattttctttatcttttatataaattctttgaatagttttactaattaaaaatttattttttttaaaatcaatgtccttccactgtaaagcacataattctccaattctaatccccgaatataatgatattaaaaatccaatatttttaggtgtgcaattatttaaaacgtaatcagttattttattttgttcttgtttagaaagaatatatatattcttttcattattatttttaggataattaaatttaagttcaatgtgtttaattttatcttcgtttatagcttttcttacacttccttttaagattataactatatcttttattgttttttcagccaatcccccagaaccgttttttcttccactttttgataaacttaaaataaaatcttgtaataatttgtgattaatttcgttaagtgggaagcttcctaaatttggaacaatatgattgaacactatatttgtataattagcgtatgttgattctttaacataatttcttttttctataagccattcataaacccagtccttatataatatttttttactccttagtaacatttgtggtcctcctttctgcttatgattatacattaaaagcgaaaaattatctttcaagtattaaacttaaggacttgaaaagtggtgattaaatgaatgttcctaaattaagattcaaagaatttaatgatgaatggcaatcaataaatttggcaaatatatttaaatactttaatacaaattcattatcaagggaacaattatcagaatcaggaatattaaaaaacttacattacggagatattcataaaaaatataattctatattaaatgaaaatgatgaaattacaagctatgttaaagatataaattatgttaataaatatgaattattaaaaaataatgatcttatttttgcagatgcttcagaagattatgagggaataggaaaagctgttgaagtaattaatgtgaacaatcatactatatcaggcctacacacaatattagctagagataatttaaatgtttttgcgccaatgtttaaaggttattattttaattctccaatagttcataatcaaataagagttctagcaaatggctttaaagtatatggaatttcgaaggatacaattaataaactaaacattaaaataccttctattcaagagcagtccaagatagccaatactctttacttattagataaaaaaatagaactacaatcaaagaaaattgaagaccttaagttatttaaaaaaggacttattatccacattagaaaaaacatagaagtagaaaaaatacctttaaaaaatatattaactgaacaaaatcataaaactaaaaaaaataatgaatatgaaatactatcttctacgtcaaaaggaatttacttacaaaaagattactttaataaacaggctgcaagtgataataatgaaggttataaaatattaaaaaagaatcaattagtacttagtccacaaaatctatggatgggaaatataaatattaataccgaatataatataggcattgtttcaccatcttataaaatatttaatataaataataatattaatattgatttttttaattattggattaaatcttctaaagcattatatgaatacaaagtttcttcagaacaaggtgcaagtatagtaagacgaaaccttaatgttgatttattttatgaaattatagttaatgttcctaaaggtgaacttcaaaataaacttggtaatattattaaactattaaatttaaatcttcaatacaacgaaaatctacttcaaaaaataataaagttcaaaaaaggacttatgcaaagtatgtttgtataactgacaattttaaataatagttttgacataatcacttttatgcaaggaaaaaatgttaaatcatttttgtatggggtctatcttcggatagagccctatttttataaaattgaacaaagtaattttgttgtaatacagtttgacatatggtaaaatataactaaccaaaggctgctacatgatgaagtaatccaagcaagaaaaatgttaaaaaagtaaggtaaagtaaaaatgaaaatgatagaacacttaaaagaaacaagtaaaggaaatgcctacaatgtatattatagaatatcatatgatccaaaataatatgaaaaaatcacaggtaaaaaaattattgaagaaataataaaaaattatagtaatccaagcaccataattgaactgtgttctgaaaagaaattaaagtttttagaaaaaattttaaataatgaagatgatatttacgacgataagcatgtctgggaacatgtaaaattaatgacaaaaatgataatctatgacaatggtgaaactgtaagtatttacgaagaaataatagaaaatgtaaaagaagcattaaaaatagttgattggaagaaagtaaaagaaagcgacaaattaaatgaagttatactaggttatttacgagtaaacggaaactccacaatccaagcattagtggcaatgatgtcatttttacttgacatgcctcaaaataaaatagaaaattggatagaaaataatagattcataaaatgttatacatattatacggatgaatattttgaaagtattggtatgtcacttgatattataaattacttgaattacatggatgtaattgtattcgatagtgtattaacagctcaagcaatcaagattggtgctaacatgagagaaaatataatcgaagaaacaagtaatagtaaaaaaatatacaaattataaataaaaaaacaacacttatcaaataaacaaagtgttgttttttctaataactaaattgcctacatttatacatagcaagtaattcattaacatctttaatattatatattttatttataaagcaaaatctaattattaaatcataatagctactataagaaagagtataagaacaagttgataaaagttttaataattcatcaattgataattctagtgataatcccagtaaaataatattacttttcttaggtttatagtttttaacgtttttaattttattaaataatcttctatctatatgaactttattataaacatcagcatcttttaaatctttatcatctatatatttaaaaagtagttctttaaaagtataattctctatattttcatctatatatgtatcaatatcttcaacttcatcacacattatatttctaatagaaaataactcttctatccagttatcatttacatattcattcttaatatactcatttaatttatcttttatattcatatttgtctccttgaaagtgaccatttttcttatcgcttctgataacattatatcatgaaatggaggaaaattatgacagatttaatttttatattggatcgcagtggttcaatggcaaatcaagttaaagaaacaattaaaggatataattcttatatcgagaatatggaaggagaaaatattaaagtaacaacggttttatttgatgatgagtatgaaatgattactcgaagaaagaatatcgaagatgtaaaaaaacttacaaaagaactttactatccaagaggatgcacagctttatatgatgctataggcaaaactataaaatatatggatgaagaagaaacaaaaaaagttatatttataattataactgatggtttagaaaattgttcaataagatactcaaaagacagaataaaaagtatgatttatagacatagcaattgggaatttatttatcttggagcagacatagattcttttagtgaaggtgacaatattggcattgactcaaaaaatatttcaaattttggcaaaggaaataaaggtacgaataaactttttaaatctataaaaaaagtagttgatatgttctgtgaagatgctttcatttctgaagattggaaagaagatttagaagaatataataaaaaataatttataataatctgtaaagaaataatagacttatcaatttatatctgatacaatgaatatggaggtagtaaaatgaagtatattataggactagacttaggaataaacaatgttggttggtctgtagttaacgcagaaacaactgaaattaaatcctatggtgtgaaaaagttcagcacaagtaatggcgcaagtgaccgtcgtaattttagaaattcacgaagaagattaaaaagaaaggacacaagaaaagaagatgttttaaaaatattaaatgatataaactttccaaataatcttacaattgacacaaaattgattgaaacaagatgtaaaggtttaaatgaaaaaatatcgaaacaagacatcacaaatattttagcatacatggcagtacatcgcggatatataccatttggtaatgaagaagtaagtttcgtagatttaaaaggaaaatacccatgtgaatattatcgagataagcttttaaatagtattaataacaaataccgagctcaaagagaaaccgtaaaaaataaagataatgaaaaagaaattagaaaaattttaaaaacacaacaagaatattatccagaaataacaaatgatatcatagaaaaacttgtagaaacactaaacagaaaacgtaaattctgggaaggacctggaggattaaattctttaacaagttttggtagatttaaaactgatgaagatgtaatcaaatataaagaacaaaaagataaaaatccagattatgaaaaatacatattcgaagatttaattggtaaatgtgaagttgacccagatgaaaaatgcgcttcaacaggaaacttttatgctgaaaaatttaatttattaaatgattttataaatgtatcatttttaagtatcgatgaaattaacaataaagaagatttttatctaacagataataaaacatataaactaaaagaaactggattaaataaagtatttgaatattgtcttgaaaaagaaaatattactattaaaggtctattaaaagatctatttgcaactagtgtaaataacatatctggttttcgtcaaaaagatcacgatccaaataaaccagatatgtcaacaatgaatatttataggtcagttaaaaaaatatttgccaaaaataatgcaaatatggatatctttaaattagataatattgataaatacaatgatattatcaactatctcatgttggttccaggcaatgtagaacttataaacatgataagtagtatggttatgtcattaactgaaaatgatgaaaatgccctcaaagaagcatttaaatcaaagggaaaagatttaaggtaccatgcattatgtgaaaagattttgaaaagagcatgtaatgacatgcaaagtttacaaaaaaattacatgcaagtttacaagttaaaagattatggtaaaaaatcaagagaactattcataagaaaatatgaagagcaaaataaagataaattacttttaaattcaagttttatagatgacattgtagcatcgcctcaagttaaaaaaacattgagacaagcagaaaaggtaattaatgaaatagtaaaagatatgaaatctttaccttatgcaattgctgtagagtcaaccaaagaagaactaagtggaaatgacaaaagaaatatgtacattgctatgaacaaaaaaaataaggaacttcatgataaagctgaaaaaaccttaaaatcacttggatatgacataaaccaaataactaaaaagaaaataacaaaaataatgctttatgaagaattcaacggtttatgtccttattgtggtaagcccatcaatattaacagtttaataaatggttctgatgaaatagaacatattcttccaagaagtgattcatttaatgatagtttagataacagaacaataagttgtgctgattgcaatagcaaaaaaggaaacaaaactccgcttcaatatttaactggaagtgataaagaaagttttataaatcgtataaaaagtaataaaaatataagtgaacttaagaaaaataatttcctatttgatggagatataagtaaatatagaacaagattttttaacagaaatttacgagatacagcttatgcaacaaaagaattgattaaacaaattaatatttttaataattatcttgaatttaaaagtaatagtaaaaaaatattaacaatgtcaacaccaggtcaattaacacatgatatcagagaaagatataatttggaaaaggatagagatgcaggccaaaagccattccatcatgctgttgatgcttcaattgttgctcttttaccaacaacatcaatcggtaaaaaaatcttaaattttcaaaataatgataacttttttattagtcaagatagcaaaaaaataatgcaagacattgccactgagttaaaatattatgatacaaaaaaagataaaattgaatatgatgattacattaaggatttaaaaacaataattgatacaaatccaaagtttatgtattcgccagaagtaaacaaagagccaaacaaacaattatttaatgccaacatgtataagttaataaaaaaggaagacaaatactataaaattgaacaaattgataatatttatgatccaaaacttgatttaaaacttttagaaaagttatttgacgattctaaaaatgaaacgttattatgtcaagcacaacatcaagatttttatagcaaattaaagaaaatatattttgaatacaaagatagtaatattagtccattcgaagcttatcaaagagaagttaataacttatcaaaagaagacaagtttgattatttaattcatggtataaaaatgagtcaaaatggacctgttgtaaaaaaattaagatattatacaccaattagtgaaccttatttaattgataaaaagtctattaataaaaaaaatactacatatttagcttatgatagccttgcacaagcaggaatagaagtatattataacattgacaaaaataatttagtttttgtgccaattccatccattgctgtaaatttgaaaaatagagcaataaattatcagcatccggtattagtaaaatattgtaaaaaatatcttaatgattgtaacgcaaaaagaattgtaactttgtttaatggaaataccatcgaggtttataaatcaaaaggcaatatagttaaaggagaggttagttcatttgacaaaaatagtaatagaattagactaagagacggatcttcttttgtaacaagtgaccgaggattctcagtaattgactataacccaataggaaaatctcaaaaaagattgactttcatgattaaatagggtatattataagtgcagtgaccaatagttggattggacattgccaaaaattttcagttttcttattataactcttaatgaggaaaccgggactacccttgaggtagtctcttttttttataatatggcgtttcgtagtatactaataagcgaagcaacaaaaataaacttagatttaaataatattgtcataagatacaacggtgataattattatatcaatttagatgaaataagtaccttagttttggatgatgctagatgtttagtatcaataaagctgttaagtgaattatgtgaaaaaggaatcagcgtaattttaactgacggttcacacaaaccagttggtacattaacaacactttataataatgtcagggcaccaaaaaagaataaagaacaaatagcttgggatgaaaatttaaaaggttatttatggacagaaatagtaaaaaataaaattaaaaatcaaatagaagtattaaaactattgcacaaaacagaaaaaatgcaaatacttgaagaatatattaatactgtagagttcggggataaaactaacagagaaggtttagcaagtcgaacctattttaaagaactttttggtataagttttaaaagatttaatgaagatatcataaatttttgcttgaactatgcatatcaaataataagaagtaaaatatcacaagaaattgtagcactaggatatcaaccatcttttggtatttgtcataaaaatgaatataacacatttaatttagcagatgattttatagaagtttttaggccaattattgattattatgtgtacaagattttaaatgaagctgtagatgaatatcttacaccatctttaaaaggtaaattagtaaatatagttaatgaaagagtagaatacagaaatagcagttacaaaattcataatgtcataacattttacttacaagatttaactaactttttagaaaatggagatttaagcaaaataaattttcctataataatatggaatatgtaaactattataaacaaatgagattattactaatatacgatttaccaatgattgaagatgaagatagaagaatttatcaaagatttcacaataaattaatatccataggattttatatgcttcagtattcagtttatgctaaagtaattcaaaatgaccaagcatataggcaactaactacaaaagtaaataaaatattaccgcaaaaagggaatattgctttattaaaagttacagaaaaacaatatgaagaaatgatatatttacgaggagaaaaaaacaaatttgatgttttggtaggtggaaaagaactaatagtttttggaggtgatacatgattaaccttaagctagcaggaaaaatagaagaaaatataacaatagaaaaaaacaataggatattaatagttaactataataaatatattgaattttacaaatacttttatgaaatggcaaatatatttatagaaaataaagaaattgctaaaaaagattgtatttttattgatattacaagtataggctccataatgaaagaactagaatttaagaaaggaacaattctatatgattatattttaataaagtataacgagataattgtggacaaaaaagacgatttttataacagttttcttaagcaagttaactatttaaagaatagtattaatttagattttgaattcatacctgaagaaatgatagataaagttataatgcaaaatatagatgttaaaataaataatcaaaaattaataaatgattttgaacaaattttgaaatttgtgattaagaataacattagtaaaacctattttatattatacaattcattatttatccaactaagcaaaaatatggataattgttacacatttgacattaatccacatttaaatgcaatcgattacaatatactaattacagaaaatatatttatatttaatcataaactattaactaattatttaaaaaacttatggccagttgactattatgaacaagaaattgaggctctattagaagaatatattagttatggtatccataaaaaatttttcacaactaagaaagagaaactatacttattatcaaaaattatgaataaagagtataaattaaatcaagaaattacatgtgataaactcatatttgacagtattattaaatcttttatagacaatctatgataattatgatatcatgtctataggttttaagatactgaaattttttgataatgtccaacaaaaataattaataatatcactagaattatgttttaagatactgaaattttttgataatgtccaactactaatatctatatacattatattactatgttttaagatactgaaattttttgataatgtccaacaatatttataacaagtgcttgtaataatgtgttttaagatactgaaattttttgataatgtccaactggttttaagaaatatgcatatattaaacagttttaagatactgaaattttttgataatgtccaactttctttgaatttttttaacgtttccatttgttttaagatactgaaattttttgataatgtccaactaaatgcacttgcaataataccaattgtgtgttttaagatactgaaattttttgataatgtccaacttgcatttggactttatataatacacctttgttttaagatactgaaaatttttgataatgttgtaaatgccaatattttttgaccaatctaatgaaaaattatgttttttcattaattttgtcaaaggtataaaacctaagaaattttactttaaattattttgttttatttaaataatactgacaaatagaaacttttttgttattatattattaacggaggtactaaaatgactgaaaaagaattagattcaagtataaatgattatatagaaacagaaacacataaaaactatgcaaaacaacaagaatgggatatggccattggacttcaagaagtagataacttaaaaccatctaagtacttagaaaaattgttacaagaaaatataatcggtgaaaaaacaatttatgaagtagaacatgaattgaaacagtactatgtagaaaaagataaaacaggtaaaacaattcaagatgaatttgagtgtgacatagtttctacaagaatagtagagttattagaagaagataattttgaattatcagtagattatataaaatacatccatgaatatttatttaaagatatttacgaattcgcaggagagtttagaaaagtggatatttctaaacaagagagaatattaaataatgattcagttgcctatggtgattgcaaactattagaacaatcattagattatgatatatcactagaaaaaaataaaaactatagtgaaatgaatatagttgatgtgattaataatataactaacttttcttcaagtatatggcaaatacatccatttagagaaggcaatactagaactacagcattatttatagaaaagtatttagtatcacttggatatgatctagataatactatgttcaaagaaaaatcagtttattatagaaatgcaatggtaagaagtaattattttaataattatttaaatataaaacaagataatagttacttaactaaattttatgaaaatttattattaggtaaaaataataatttacactcaagagatttaattgtaaaagaattatttaatgacaattaaaacacatactataatttaaccattatgaaggaaataagttatttgtaaagttatctagacaacaattcaaaattgtattatcataaatacatgaaaggattgatacaatgaaaactaaagtatattttacaaaaaaaataacaagtgaaagtttagttaaaatttatgaaagcttaaatcatgaattaaaaggtaaggtagcgattaaaatttcaaccggtgaaccaggtggacataactttttaaaaccaaacttaattaaagatttagtaagtaaattaaatggtacaatcgtagaatgctgcactgcttatgctggaaaaagaatgaatccaattgatcactggaaagttatcaaagaacatggtttttatgatattgctccatgtgatattatggacgaagatggtgaaattgatattcctataaatggtggaaaacacttaaatggtataaactatgtcggaagtcatattaaaaattatgattcaatgttaatgttatcacactttaaaggccatataatgggtggcttcggcggagctttaaaaaatatgtcaatcggagttgcttcaaaaaatggtaaagcatggatacattcagcaggaaagacaactgtaccggatgaatgctgtaaattagaaactaaacaagatgattttctagaaagtatggctgaagcagataaatctgtcgtggactatttcaaaccagaaaatatagtttatataaacattgccaataatatttccatagattgtgattgcgataacaatccaaaagcccctgaaattgctgatattggtatatttgcatctctagacccagtggctatagataaatgttgttacgatactataatgaatttaacagaagaaggagcaaactcactaaagaagcgaatgcttgataaacacgcaattcataccgttaatgaagcagaaaaactgggcttaggaacaacagaatacgaactagtgaggatagatagataattatgaaattagagaaaattgtagaaatattaacaaaacaaaataagacaatatcaacaatggaatcttgtaccggcggaggtctcgcaaatgccataaccaacatacctggtgcaagtgaaatattaaaatttagcgcagtaacatattcaaatgaatttaaaatcaaaatgggtgtacctaaagaaacaatagatgaatactcagtttatagcatggcaacagctatagaaatgtctaagaaaatatcacagtttacaagttcaaattatgccataggtataacgggtaaactaaatagagtagatccccataacttatctggtgatgacaatatagtttactttagtatctataataaagataaggatattaattacaatgactttctaaaagcaacaaaaacatctagaaaagaaaacaaagaagaagtaatagaaaaaatagtggataacttttacgaaatattaaaaaaagaagactaaagcaagtccccttgataaatatttcttttagccatctcttggtcaattccatttaaaaccataaatttctttacgagccattctggtgccactaattcatttaattcagggtccccagtaatcctcataaccacaacatcttcatttaaaaatctaagttgagagcaaacaatatcaatatactcctctctagttaaaatatgaaatttattagtttcatataaactagcaagcggagtatttttggctatataaagcatatgtattttaattccatcaaccttacaatcattaacaaatttaattgtattaatcatatcttctttagtttcataaggaagcccatctataatatgagcaacaacaaaaatatttctttcatgaagtttatcaacagcatctttaaatgttttactatcatgcccacgatttataaatcttaaagtattatcattactactttgaagtccaagttccacgattaaaaatgtttttttatttaaatcctccaaataatctaaccattcatctgataaacaatctggtcttgttgcaatatcaattcctacaactttaggtatcataagtaatttatcaacataacctttaactaaatttttatcattataagtattcgtaccagattgaaaataaggaatatacaaactatttggccatttttgttccataatttttcttccattttcaaattgctctaaaatatccaatctattatcactaatactagcaacagacttattagaacaatatatacaaccaccacttgcttgatttggacatatactatttatatctaaaggtactttaaaaactttttgcccaaactttttcttaaaaaagtaattcaaagtatgatatcttttattatctaatgtatttttaaacatataaccacctgttagtattttaacacgtaaactttcaaaataaaagttgttatttttaagatttgtggtatactagtattagttgctggaatagctcagttggtagagcaatgccctcgtaacgcataggtcataggttcaagtcccatttccagcaccatttagaaataatccccgtaatatcggggttttattatgaaataaaattattttgaataaataataaattttatatatacaaaaagtatacgatatgttataatggacatatcagaaaaaggaggcataaaaatgcgagtatacggaatgaatgttttaaaggaactagacaagaaaaaaatcaaaaaagtattcacatcacgtaaagaagtttgtaagtattgtagtgaaaataaaataaaatatgagtttgtagataaccacctattaaacaaaatgtgtgaatataatcaccaaggggtagtaattgatgcttttgattatgattattatagtctaaaagatgtggaaggtaatcttgttttaatacttgaccacttagaagacccgcataactttggggctatcatcagaacttgtgcagcagtaggaataaaatcaataatcatcccaaaagatagaagtgtcggagtaacagatgttgttgttaaaacaagcgtaggtacaattaattatgtaaagataatcatggttaataacttagtagccacaataaaatctttacaaaaagatggcttctttgtttatgcggcatcaatggaaggcgaagactttaggaaagtagattatagcacaaaaagagcattagtaattggtaatgaaggagctggagtaagtagacttgttaaagaaaatagtgatgtattagtaagcatcccaatgaacaaaaatgtagagagcttaaatgcatccgtcgccgcaagcattcttatctaccacatgggtgaaaatgtttgatattagtgattctgaactaataatgctataccgtgaaaacaatgaagaagccttagatatattaaatcaaaaatataatatagtaacaaaaagaataattaataagtattatccctttttaagaaaattaaatatcaattttgatgaactaacattaagttgtcatgagttaataaatgaagcgctagatacatataactcattatataaagcctcattaaatacttacataagcttaattatagatagaaaagtaaaaaagacaattattaatgcaattagatataataaaaaaaatattgaagtttccaatataaattttgataataccgcaagttatatttcaagtaattcactagatccattagaagctatctgtgcaagtgaaagtcaaaaaaatctaaatgaaataatattgaacaagctaaataacaatgaactagcaatattttcattattactagatggcttaagctataaagatatagcatttacattaatgcaaagttataagcaaatatataaaaaagttcaaaatataagaaaaaaattaataccagaattacaaaaaatacttgattaaagcttgcaattaccttttatttatgctatattataaatgaacacgaaagtgtttttttaaatggaggtttttaaaactatggcaaaagaagctaaagaaacaaaaaaagtaacaaaagttactaaagacaccaaaaagaaaaatattaaaacaagtaagaaaggtcctaaagaaagttatttcaaaaaagttggcaaagaacttaagttagttaaatggccaacagctaaagatgtattaaaatacacaatttcaacgattgtattttgtataatcttatgtgcattatttatggcacttaacttaatattatcagtagttaaaggatggtttgcataatggaaaaactttggtacgtagtaaatacttattcaggacatgaaaataaagtaaaagaaaaattagaagcaagaacagaatcaatgggtatgcaagattacattttccgtgtaattgttcccgaaacaacagaagttgaagtaaaagacggagtaaaaaaagaaaaagtaaagaaaatgttcccaggatatgtactagttgaaatgataatgacagatgaagcgtggtacattgtaagaaatactccaggtgttacaggatttattggttcaagtggaaaaggagcaaaaccaactccattacttcctcaagaaattgatagaattctagctaacatgggtatgagtagagtagatgttgaatctgaacttaaagtcggagacacagttaatattgttgatggaccattcagtggtatgactggtaaagttgataacattgaccttgaaaataatagattaaatattataattgacttatttggtcaagaaacaaatgttgatgttgaagtcttccaagttagcaaaatgtaattaaaaattcgaagtttaatcttcggattttttttcatctttaaatacctctagattctttttaattctttcattattaggatttatttttaaagcctctttagcatttttaatagcattttcataatcacctaaataaaagtatgaaatagataataaatcatttaatgtttcatcataactaaatacttcattcatatatgttttaggattatacttaatttccaaagctttattaccatatttacaaacattttcataatcttctaaaatataatacaaaatagcagtttcagtatatgggtctcttaaatatggagcttcatttatagcttttataagccacatgagtgattcatcatatctgtttaaagctttataacatctagcaataaacctcatagatgcacatctttcatctttccaagtagcatttttcattttcaaatgtttaattaatgtatcaatagcatcgttccatcttccataatacatatactctctacctaaataatgcatatttctatcattatctggtttttctttcacagcaagctctaaaagtggcaaataattagagcgagatttttctctatctggataatgattaacaataacatcatcagtaaagacttgtttttcagaatggtcaaattctagtacctcgtgtacaggattaacccatttacagccacttcttttatgtattttatcagcataatatgtaacttttggaattccatcttcaatataccagttataaacatatctaagtctatcagtatcatttttccaagcttttaaaatattttctttccagccatcgagcattatctcatctaaatctaaagaaatgcaaatatcaaagtcttcgggtatcatttttaatgcttcatttcgagctacatcaaatctccatggtttaatttccatttctttaacggttattccatgtttctttaattttttggcagaatcatcacttgaaccagtatctaaaacaaatattccatctgcatccttgatagattcataccatctatcaacaaatttttcttcatttttacatatagcataaacacatatctttttaataaaaatcaaatcctttctagttacccaagtattcaattgttatgagcactggggaattaacaaaataagaatcactatttatattatttaaatccggagtttttaaataaatactttttttaccaagattaactaaactatacaaaatacttggatcaacaactgctacaatcccatcagcacttatttctttaggcatttcatcacttataaaattacttgcacccacatatatattatcgctatcattagttttaaaacctatagcaacaaaatctttcgaaggatcaaatacattatctttttttacataagcatttactttaaaagatattttataatgcccagctttattaaatttaat

SEQ ID NO: 1486 - DNA, 23276 bp, synthetic construct
  misc_feature 1..23276: note = Synthetic
  source 1..23276: mol_type = other DNA
cacttttgaaaaaatgtgtgttataattagtaataagtagtggtgataaaaatgaaaccttttataaaatggccaggaggtaaagaaaaagaagtaaaaattatttcaaagtgtctacctgtaaatattgataaatattttgaaccttttgtaggcggtggtgcagtttatttttcattagataaggatgagtatttaaatatagaaaaatatataaatgatatttcagtagaattaacaacgctttatcgtttaattaaagaagaaaataagtatttttttgattccttgaaaaatattcaaaaaaattggaatatattagaagaggttataagaaaacactcatatgaattcattaattattattacagatatttaaatgatgaaatagaatttgatgatatgaaaaatgagttgaaaatatttatagatgttaatgaaaaagattttaatggagtaatgaaagataaagaatttaatccttgtattgatttgttcaagaaaacaattaatgaatatgtttgtagaagatttaaacggttaaaagtattatcaaaagattcaaatttaactgaagaagattttttgaattcggttgaaacagctttaaaagggtctttctataatcattatagatatatctataataataaagataaagatgctaaaattaaaataaaagaagaatttgcttctgcaatttattattttatacgtgaaaattgttattcatcaatgtttagatataattcagatggcgatttcaatattccatacggcggaatggcttacaataaaaaaagaattacaaataaaataaataaaagtttatgtaattatatgaaaaatacaaccattgaaaacatggacttcatggattttttgaaaaaatataaaccaaaggaaaatgattttgtttttgttgatccaccttatgatagtgacttttcaaaatatgcaaattcagaatttttaaaaaaagatcacgaaagattatgtgactctttaagcaaaatgtcagctaatgttatggttgtaatcaaaaagacagattatatctttgaattatataaaaagcataattttaatatatacgaatttaataaaaagtatctagtaaattgtaaaaatagaaataaaagagacgttattcatttaataattactaattatgaaataccagatgaagaatcaaacggagacataacaagagtttattaacaatcgaaggtcaaagtgccttctttttttatatatttaaaagaatacataaaaattcagtagaatatttatactagatatgtgaaatatagtataaatatttaaaataaagtaagaaaaaagttgacatacatgttataaacatttataatatgtagcaaggaggcagattatgaataatgcaaaaataaagagggaaagatttgtaaaaatcgcagaaaacagaacaaacaagattattgatatgataaaattattaggaaattgttctaataaaaataattatacatatagcgaaaatgacgttaaacaaatatttaatgctatagaacaggaattaaaaaataccaaaataaagtttcaagaagctgaaaatttaaaaaaagagtttagactaaagtaggaggagtaaaagatgaaacaatgggcatttccaagtgcagagcacataggaataaaaggatttaatgatataggagaagaatttaaagataatccaatgtataacttggcaaaagaaatttgtcaaaattcattagatacaaaggtaacagaagaatttgaaaataatggacaaccaattatggttgagtttaaagagttttggataaaaccaaatgaaataccaggaaatgaaaaaaatgaatttaagaaggtgtttgaagaagaattgaaatacagtgaggaatattatgaaaatgataaaacggttccagatttttataaaaatgcactgaatattttaaacagtaccagtataagatgtttgcgtattagtgattccaatacaacaggattattgggatcggataaagaaattcattcaccatggagtaatttaactaaaaattctggagtcacggacaaaccagaaggttccgcaggtagtaagggaaaaggaaaatttgcatcgtttatatgttcagaattatacactgttttttatagcactaaatcaaatgatggattagatgcttcatgcggaatttcaagattaagcggatacaaaaaaagtgatgaaactatcacaataggtgaaggatactatgaggatgataataaaccattaaaatattgtctgaatttagataaaaattatataagaactacctatggtacagacatatatataattggttttaaaaatagtgaaaattggaaagaaaaaatgtgttcagctattatagaaaattttttcgtggcaatttataagggagatttagttgtaaatataggagaagattttgaaataagtaaaaatacaattggagaattaattagtaataaaagtatttctgattttttattgctggacacagattgttactataaaattttagtcgccggtgatgatgaaatattgtcaaaaagttatagcatgtttgaaaatgatgatatagaattacttttaaggaaagatgatatagatataaatgatgtaaacaaagttgctacagtaagattaactggtatgaaaatattggatttgaatcgactaccaagattaggaaagtatcatggaatattatttatgaaaggactaaaggtaaacgattattttagaaaacttgaaaatgcaacacataataattggtctgctgatagagtacaaaattcatcagaagcaaaagataaaattaaagaattgaaaaattttgtaactaaatctatttatgatttaatggcaggtaatattctagacgaagttgatgctacaggtgttggagaaacattacctgatgaagatgagatttctgatagtaatgacaatgctttaaatgaaagtgttgaaaatgaagtagtgaaaactatagaaataaaagaaattcccatcaaaaagttaaagaaaaatgaacaaaaaacaaatggcgatgatatagattctccagcattagaacccgatgaagatggagatatcaacaaaactggtgaacatagtggacacaatactccaccaaatccgaacccaataccttctaaagaatataaatattctgaagttaataaaagattaataccaagtaaattaagacttacagcaaatttagaaagatacgaattaacattggaagtaaatagggatgaaaaaatattaaaaattgatgttgaaatatatggagaaagcagtaacgaaaaagtaaaatttaaaaatgtaaaatgttttacggagaacgttttaataaagcataatattgcaacggaaacaaatcaaaattcaattattttgaaaaatttaaaaaaggaaaattcttacaaaattcaatttgctattgatagtgatggaatatggcctttggaggtaaaaatttatggcgaagaataataatatgttatttacctatccaattttatgtaattttaatgatgattataaagatgtaacatttatagcaggttcaacaggtaaaatgactaaaacaagtaaaaagtcaacaattgaaacatatgtagagataggagatgaaaaaattaatgagcttttagacaaaaaagccttaaagattataataaaagtgttttgttcatgtacaaaatacagaaaaatatttgatattcaaagaggaatggataaaatagaattgaacaacaaagatattaacaaaagagtagaattcacaacatatataatagctaatgaaacacttgcaaattattcatcaagcaaatttaatgatgattataaaggaaaaagtttttatatagaaaaaggatcagtgatggcaataggaaaagaagagagcctcttttttgaaaaagatatagatgatttaacaacgataaaatcgattataaaaataagagatagtaaagaagaaaatgtaccaatgaaggtagattggtcagataatataacgatatcattgccaacatctgattataaaatttattgcagatattctgaatattgtgtatcaatagtaaattcaatgattgttatacctagcataatgtatgttttagatcagatagaagatgaagaagaagtgatggataaaaagtggtatagagtattatccaaaaaaataagtgctgatacaggtaaagaatttaatttaaaatatataaaatcaaatggctcttttgaaataattcagaaattatttgatataccaatagatgaagctatgaaagaaatagaaataaaatatggaggagaaggaaaatgataataaagtatctaaaaaatgatgcagtcgatttgctgaaaaattatgatttaaatgaaaatttaaaaaaatattcaggggataattcttggcttataactaaatatcaaaataatggagttaatttatttggttcttatgataaaaagcaattcaatgattttaacttaatttgtaacgttgaaacagataatgatttcgaaaatatgaaaaccatttatgaaagtcttaaagacttaacggactcacaagctagtgatgaaagaatttggtcaggtcttgcccataattactgttgggattatatgcaaaaaagatggccattacctgaaaataaagaaaaaattaaatcacatattcttaataattactttttttggaatagtaccaaagcagttttcttaaatggaatatcaagattatggtggtatgcaagatacacttatgatgaaaattttgaaaatccatatatgttaacagaatatatttgcaataatgatttaaatgggaaaatatatcccttattatcttgccgatttgcaatgaatccacaaatatttaaaaatataattttgtcagtgaaagaatatgaagaagaaaaaaatataaaattaacaagggaacaatttggagatttaaaaaaatatttaaatagattgagcggaaaaatagtaattgatactctatcatctaaggaattaaaagaaaaaatttatttaaaattagatagtcttttaaaacaataataattgactaaaaacatgaatgaaaagaataaatagattaaaagtaataagaaacaattcagacaatattgtattcttcggtggtgctggtgtatccactgaaaattatatacctgacttccgaggtagtaatggtttatataataataaaagtgagttttaagatactgaagatcttcgaaaatatccaacaaaaatataaaaatggtataatgttgctgacgaaaaagtatacaaaaaaatcagcaaagcattatgcaaaagtcctaaaatgagtagtgtgtctgatgtaattggtggaataacaggtaataagtgtgtaggaaagtgtaaacatactgaaaaatattggaaaaataaaggaacattaacccctgagacatttgcacattttgaaagtgcaaatgtttgtaaaaatttggaaaattaagctatataaaagaaatatttttgaataaacataattactttaaaacagttgtcaataagacgaattatataatgatggtaatgatgaaaataatttgatatgagaaaggaaaatcttatgatagcaatattaatgataatcactatttttctatcttttataatgtgtgtactgtctgcaataagagcagaacttgataaaacaagatcataatttacaacattatattgacaaaatgataacagatgtgtattatattaactaaagaagggataatatgaatatatttgtaacatcagacacacattttaatcataaaaacataattaaatattgtaatagaccatataaagatgtcgaagaaatgaatgaagcaataattagtaattggaataactttgtaacaaatgattacattatttatcatctcggagactttggttttggaactaaagaagaattaaaacaaatttttaatagattaaatggtcaaaaatatttaataatgggtaatcatgataaaaaagtaggtagaaattactattttgaactaggttttcttaatgtttatcgcaaggaataccaacttgataattacattttaacccatgaaccaataaatgtatctgccttgaacaaactgattataaaccacttttactaatgaggaaaaaataatggttttatttgtaagtggaagaacagacatcatagcattttacacaaaatggtttttaaatagattgaatgaaggattcgtcgatgtaagaaacccatttaatcctaatttagtaagtagaatcaattttgctgatgttgatttaattttattctgtactaaaaacccaattccaattgtaaacgacttagataaaataccaaaaccatttctatttcatgtaacaataaccccgtataaaaacgatattgaaccatatgtccctttaaaaacgaaagtgattgaagctatcaaataaatgtcaaaacaaattggtaaagaaaacatagtaataaggtatgactctattttcattagtgacaaataccacctgaagagagcgtaagctcttatttttgtttgttttaaagggtttggagcctattaagtgattttaggtacacttttaggtacacaaatttagaaaaaatgactgaattaaatatttaattcccgctttaataacaaatttaaattttatatattaatttatttaacaaaatctattttatatcactaacttttatgatatacttaaattgtaattttaatgaaaggagtgtgatttaaatgaatagaattacaaataattataatcaagtaaatcacactatgataaataaatagtgtgataccttgaaataggagaaacttaaaatgaataaattatatattataacaggtccagctggagtaggaaaaagtactattagttatgaaataggaaaaaaattagcaaaatcagtagttattgaaggagacacaatctataacttctttgtaggtggaagaataaaaccttggtaccctgatgctccattaaaccttttttggagtaactgtattatgttaataaaatcatatttagaaaatggatatgatgtagtatttaattatataattaaaaatgaagaattagaaaaattaaaaaaagaattcaaagattatgatttatcatttacatgtttattagtagatgaaaaaacaataatggaaagagacttattaagaccagaagattgtagaatgcatgaaagaagtctaatactattaaaagaattcattgattgtaattatgatactacttatatactagatagttcaaatttaactattgatgaaactgttgaaaaaattttaaataaataacttttcaacaaattattaatgttagaaaaaaacaaaagttttttgtaagagcaccattattaggatggagctctattttttttatttaaaatcaatgactttttagcaagttaatactaaatataaaacataaattcttaatttatcaattttaaatgcattgacaataatacggataaatggtataatgtccgtatgaatgaacagagaggtgaaattatggattttatgacaaaagaggaatttataaatgaaagtaatatagaaatcattcaaaaacttatggaaagaaataatggatatattaccacaaaagaacttgaaaattttgatataagtagaaattatctatcaattatgactaaaagaaatatgatagaaaaagttgctaagggaatatatatagattctgctaagatcgaggatatatattatgtacttagtgtaagtacaccaaaaataatttattcacacatgactgcactttattttcataatctttcaattaaagcaccagatggttcttttgatattactgttacaaaaaaatataataatccaaagctaaagaaacacaacgttttttacgtagatgataagttttacaatgttggaattactgaagttgaaacaccacaaggtaataaagtaaaagcatatgacatagaaaagtgtatatgtgatataattcgttctaaaaagagaatggatcttgaacatgtaaaatatgcaataaaagaatatcttaaaagaaaggacaatgatctaattaaactatctaagtatgctgaaatgtttggcataaaagaaaaagttatggattttatgagcatgatgtatgaatagtatgcaagttaaagataaattgaaaaatattgcagtaaagaaaaatattgaatttaacacgttgcttaggctttatatgtatgatagatttatagaaagattagcagtaagcaagtatcgtgataattttattttaaaaggtggattttatttaagtgcgttatttggattagaaagtagatctaccaaggatatagacactgcaattaaagatactaattttactaaagaaaatgttgaagagatgattaaatcaattatttcgatagatattaatgatggagccttaataaactttgtggagattagtaatatacgtgaagaagatcaatatgggggctttagagttgttttaaatgtcaaagtggatacaattagagaaacttttcaaattgatatagcaacaggagatccaatcactcctaaaccaattgtgtataagtatcttccaatattaggagatagatatataaatatatggtcatacaatattgaaactgtaattgcagaaaagctagaaacaattttaagaagagcagaagccaatagcagaacaagagattattatgatttatatttaatatacacaaaaggatggaacaatgtaaattttaatgatttacataaagctatagataaaacttttaaaaaaagaaattatactggaaatattgaagaagccatagctatattaaaagatagtgaaattattaaaaataggtgggattcttacaagaaaaagtatgaatatgcaaagaacattgattatgataaaataatgcaatgtattgaagaaatcgttaaggcaataataccaatttcagtataaaaagtaataaataacgtaaatatagatcaaatttttcaaaaaatgcaaataaaattcccaaataataaaaaactcatgatataatcattcccgaaaggaaggattatattatgaaatataaagatttagaaaaagaagggtggataaagttcgaagacaaaactattttagaaaaagaagtagaaaatgataaattatgtaaattaatttatcatgcatacaaaaataatgtaaaatataacaaaggtaatgtaaatgaaaaattaaaagaatggtttaataatattaagtatattaataaaaaaataaataaagtaactaaattaagttttattaagaatataatgtcttatggtaataccattgacgtattaatacttgatgtaaatcaagtgccttatataatactggatataacaaatggtatagatatgttaaataatgataatttacaaattacaaaaacaaataatacaaaagaaaaaatattatatgcatgtaatgatagtgatgaagaaaatatagacatatgtaatataaaaagtgttacattacataaaaatgttgatatatataataaattaacaaatgaagaaatagattcatcagactatatagaattcaaagatttaaataataacactttttatatagatattttatttaatataatatataaaagaaataatatatatattaaaaataataataaatcaaaagaattattattatttaaagaaaatataaaactaaattatactaataaaatatttactaacaagaaatttaacataatgaaattattttttaattttgaggagtaattcataataacttgtaaaaataatagactaaaatgaatttatttgatagaattaagatggaggaagaagtatggaaaaatatattataggattggacctaggaattaataatgtaggttggtcagtagttgacgcccaaactaataaaatcaaatacttaggagttaaacaatttgaagcaagtgattctgcaaaagatcgcagaacacaaagaaacacaagaagaagattaaaaaggagagaaacaagaaaaacagatatcttaaagatactttcaaacattaatttcccgaataatctaactattgatacaatgttaatagaaacaagatgcaaaggaataaatgaacaaatatcaaaacaagatataacaaacatattatgttatatggcaactcatcgaggatatataccattcggtgatgaagaagttagtttcgtagatttagatggaaaatatccatgcgaatattattacgaaatgtttaaaagttcaacaaataacaaatatagagcattaagaaacacagttaaaaacgaagaaaatattaacgaagttaaaaaaatgcttgaaactcaaagaaaatattatccggaaataactaatgagacaattgaaaatattgtaactactttacaaaggaaaagaaaattttgggaaggcccaggaagtataaatgcacttactgattatggaagatttaaaaccccagaagatgttgtagaatacttagacaaaaagaaggaaaatccagaatatgaaaaatatatatttgaagatttaataggaaaatgtagtgtaataccaaatgaaaaatgtgtatcacaaataaatttttatgcagaaaaatttaatttattaaatgattttataaacatctcatttaaatcaattgaagaattaaataataaagatgatttttatgaaacacaagtaaaaacatacaaactaagagaatcaggattaaataaagtatttgattattgtatgtcaaaagatacactaacaataaaaggtttatttaaagatttatttgctactacaattgataatatctcaggatatagacaagatggacatgaccctaataaaccggaaatgtcaacaatgaacacatttcgatcaattagaaaaacattcaaagaatgtaatgctaacatggatatatttaagccggaaaatacagatttatataatgaaataattaattatatgatgctagtacctgggcaagtagaacttataaatatgttatcgactataatgccattatccgaaaatgataaagaagcactaaaaaaagtatttaaatctaaaaaaacaaatttaaaataccattctctttgtgaaaaaatattaattagagcatgtaatgatatgttaagtttacaaaaaaattatatgcaagtgtataaactaaaagattatggaaaagaaagtagaaaagaatttgtaaaaagatatgaagaaagtaataaaggagaaaagttaatgaacccaacttttattgatgatatcatatcaagcccacaagttaaaaaaacattaagacaatccgtaaaagttattaatgaaataataaaaaatgaaaagtcattgccagatgttatagttgttgaatccacaaaagacactttaaacagtgaaaaaatgagaaaagtttacatagatattaataaaaaacaaaaggcactacatgataaagcaattaaaacattaagttcaattggatattctgaaaaagacataagtaagaaaaaaatagaaaaattgatgctttatgaagaatttgatggattatgtccatattgtaataatcaaatcactttaaaatatttaattaatggctcagatgaaattgaacacatattaccgagaagtaattcatttgatgatagttttgataatagaacagtaagttgtgctaattgtaacaagaacaaaaataatcaaactccattagaatttttaaaaggaaacgaaaaagaaagctttatcgaaagaataaaatcaaataaaaatattagtgaatttaaaaaagaaaatttcttgtttgccggagatattagcaaatatagaacaagattttttaatagaaatttacgtgacacagcatatgcaacaaaagaaatgataaatcaaataaatattttcaatttatatttagaatcaaaaaataaagatgaaaaaattaaaactttatcaactccaggccaaattacacattcaataagaaaaagatatgacttagaaaaagaccgagatactgacataccatatcatcatgctattgatgcatcaatattagcgttattaccaacaactaaaataggtagtaaggttgtaatgtttcaaaatgataataagttcttcttaaatgaaaataataaagataaaatgactgagataggattagaattaaaatattatgacacatcagaaggaaaaattgaatatgatgattatattgctgattttaaaaatataaatgatacaagtaatatatttatgtattctccagaagtgaaaaaagaacctaataaagggttatttaatgcaaacatgtataaagtaattaaaattgatgataaatattataaaatcgatcaaataaatgatatatataatttaagtgatagtgataaaaaattattgccaaaattatttgatgatgcaaagaacgaaactttattatgtaaattacaacacaaagaattttatgaaaaactaaaaaatatttacataaaatatagtgatagcaaaaatagtccgttcgaggattatcaaagagaaataaataacttatcaaaagaagataaatttgattacttaaaacatggtttgaaaatgagtgaaaatgctccatcagtaaaaaggttaagatattacacaccaatcagtgaaccatatttgatagataaaaaatcaataaataaaaaagatggtacatatttagcatttgatagcttagcacaagcaggtattgaagtatattataatgaaacaaaaaattgttttgcctttgtgcctattccgagtgtatgttataatttaaagacacgcaaagtaaatagaaaacataaattatataaaagatataaagaattaaatcttaaagattataaagtaaaatatatagtgactctatataatggtaatacaattgaagttttgaaaaaagataatacaataattaaaggagtagttagtagttatcataagacaaacgataaaattgtattaaaaaatggttcatattttacaaaaagtgacttagaattttcaattattgactataatccgattggaaaaagtcaaaaacgattgacaaaaagaataaagtagggtatattataagtgcagtgaccaaagttggattggacattgccaaaaattattagttttcttattataactctttaatgaggaaaccgggactacccaaaggtagtctctttttttagaataatatggcttttcgcagtatattaataagtgaagctacaaaaataaatttagatttaaataatattgtcattcaatatagtgaagataagttccatgtgaatttagatgaaataagcactttagtactagatgatccaagatgcttagtatctttaaaattattaagtgaattatgtgaaagaggcattaatgtagtatttacggatggttcacacaaaccagttggatcactaactactttatataacaatgtaagagctcctaagaaaaataaattacaaattaattgggataataacttaaaaggctatttatggacatctatagtaaaaaataaaataattaatcaaagagaagttctaaaacgtctaaataaaactgataaaattgatatattaaatgattatatacaaagtattgaatatggcgattgtacaaatagagaaggtttagcaagtagaacttactttaaagaattatttggaatatcttttaaaagatttaatgaagatataataaattattgtttaaacttttcttatcaaataattagaagtaaaatatctcaagaaatagttgcactaggatatcaaccatcatttgggatatgtcataaaagtgaatataacacatttaatttagcagatgactttattgaagtatttagaccaatcatagattatcacgtatataatatattacatgaatcaaccgaagaatatttaacaccatcattaaaaggcaaattattaaatatagttaatgaaagggtagaatataaggaaaatacatacaaaattcataatgtaataatgttctacttacaagatttaacaaattatttagaaacgggagatttaagtaaaattaactttcctaaaataatatggaatacgtaaattattataaacaaatgagattattattaatatatgatttgccaatgatagatgatgaagatagaaaaatatatcaaagatttcataataaattaatatccattggatttaatatgcttcaatactcaatttattcaaaagtagttcaaaatgaccaagcatacaaacaattaatatcaaaaatcaataagatattacctcaaaaaggaaatatagcaataataaagataacagaaaaacaatatgaggacatgatatatttaagaggagaacaaaatagatttgatgcaataataggaggtaaagaattaataatttttggaggtgatacatgattaatttgaagttatcagggagattggaagaaaatgtaagaatagaaaaagataataaaataaagataattaattatgataaatatattgatttttatactcacttctataaaagaaataatctttatatcgaaaataaagaaataacaaaaaaagattgtatatttattgatgcaagttcaatgtattcaattatatcagaaatgcagtttaaaaaaggaacattgctttatgaatacgtttcatcagtatacaataatattgacgtagatatcaaagatgaattctatcaatcatttgttaaacaagtagaaataataaacgatttagtagataataatatgtcaataataccagaagatgctattgaaaaagtggtattacaaaatgcttatgttgaaatagaaaatgataaattaattgaggaatttgttaaaatattaaattatgtaataagtggtaacataaatttaacatatatagttttttataattctcaaataatgaatatagaaaaaaattatgataattgttatacatttgatttaaataattatttggatataaggaactataatttaataatagtggatgaaataagagaatttagttatgaaatattagtggaatatttaaaaaatatatggccgattgattatatagaagaagaggaagaaaatcttatagcagaatattttaattttgttatttatttaaaaaaatttataactcagaaagaaaaattgtttttaatgtcaaaaatattaaataaagagtataaaattaaacaagaaatagagtgtaataaactaatatttgacagtattattaagtcttttgtagacaacatgtaaaaaaagtgttattatatttataggttttaagatactgataatttttgataatgtccaacattgaaaatgctttaattaaaaagacattagttttaagatactgataatttttgataatgtccaacaatgttataattggtattgttgctgggcttgttttaagatactgataatttttgataatgtccaactattcatttagattctgcttgtaccatttcgttttaagatactgataatttttgataatgtccaacaataattatattgataattggggggggattgttttaagatactgataatttttgataatgtccaacaattacttggggcttggggcttttaccgaagttttaagatactgataatttttgataatgtccaacgaatacattaaaatcgagtaatttgcgatggttttaagatactgataatttttgataatgtccaacacatagaaagtcaataaaaatgactttcttgttttaagatactgataatttttgataatgtccaactcatcatgtataagaataattgtgtctgccgttttaagatactgataatttttgataatgtccaactataactaatacggaaagagaagtaaaagggttttaagatactgataatttttgataatgtccaactacaattaagcatttataaatacatattgcgttttaagatactgataatttttgataatgtccaacaacatttattgaaaattcttatgcagcaccgttttaagatactgataatttttgataatgtccaactgaatatgacgcttgtgttgcttttcatgagttttaagatactgataatttttgataatgtccaactgaataaattgtggaaacacaaggcaatgtgttttaagatactgataatttttgataatgtccaactaggtactccataatcatcactcggttgtcgttttaagatactgataatttttgataatgtccaacatataatatatatatcaattaaaggaaatggttttaagatactgataatttttgataatgtccaacaattattaatataattacaactatatgtatgttttaagatactgataatttttgataatgtccaacgttcctagagcacatttagtgtctaataagtgttttaagatactgataatttttgataatgtccaaccactgaagaggaaaatcatagacattatatgttttaagatactgataatttttgataatgtccaacagataacaaataagtcttcttattagcatagttttaagatactgataatttttgataatgtccaacatttgagtgcttcaaaaataacaactggtagttttaagatactgataatttttgataatgtccaacattactgacgacaacgcaactgttactttagttttaagatactgataatttttgataatgtccaacccataatacgtcccttatcttgttcataatgttttaagatactgataatttttgataatgtccaacttttcacaaatttaataaaaggcgtatctggttttaagatactgataatttttgataatgtccaacgtgtttgcattcttataactcaagaatatagttttaagatactgataatttttgataatgtccaactattttattaaaaaagaaaggaagagatttgttttaagatactgataatttttgataatgtccaacaatatatggtagaggtaaatttacaggctggttttaagatactgataatttttgataatgtccaacaaatacatattagatgatgaaaagcttatagttttaagatactgataatttttgataatgtccaaccaaatagaagtcttgtcataagtgcttagcgttttaagatactgataatttttgataatgtccaactaattattgcaaaagtttatgcaaatggtaagttttaagatactgataatttttgataatgtccaactaatgctatcggttctcgtcagttattatagttttaagatactgataatttttgataatgtccaacttgatgttgtagtagtagtggtttcaacccgttttaagatactgataatttttgataatgtccaaccgcttaatcttatataatcatcaaataaatgttttaagatactgataatttttgataatgtccaactatctccagtaacttcaatttcattacttgagttttaagatactgataatttttgataatgtccaactagagagtttaaagcaaaagaaacatttatgttttaagatactgataatttttgataatgtccaactggttgtcactctgaattaaaaaattaattgttttaagatactgataatttttgataatgtccaacgagtttgtattcttattacacaagaatatagttttaagatactgataatttttgataatgtccaactttaaaagtggaattcccacaaggaaaaatgttttaagatactgataatttttgataatgtccaactatttgttttgttaaatgaaaggagagattgttttaagatactgataatttttgataatgtccaacaagaaatattgctaatatagaacgtactatgttttaagatactgataatttttgataatgtccaacgcgaatcaagtgaaagtttcatatccagtagttttaagatactgataatttttgataatgtccaacatgtcctattaaaatggtaacataatcagtgttttaagatactgataatttttgataatgtccaactatttcacaatatgatgataaattggcttcgttttaagatactgataatttttgataatgttcaacagtaaacaaagaaattattacaataaatgaaaatgttggtaaatatattttgaaagataatgacgaaattataatgaatgaagatacaaattcgtttactatacattattcaaaaaatgatgttcatataacaccagcacgaaaaaggaatgataaagaatgaatttaaaattatttaacaaaaatgtaagagttgtattaactgatggagaaatatttgaaggattattcgaagaatattacgaagaagataatacaattataataaatggaattgaattaaatattgatgaaataaaagaaatggaagaactaaaataatttgcaaaaagcaagttaaagtgatataaattaattgtattagttatagagtaccattagacctagaaaactaggatatattgaataatcggctaaagttaaatcgagtatacggaactctggctttataattaatataattgctatctttataggtggcagagaatagatatattacctgtgttgtatctgttttaagatactgataatttttgataatatctaacttcattattaatagaatcttattcaatactattataaaatataattaattaaaaaatataacaattaactatataaataaatattataattacatcttgaaaaatcccctcaaataatactataatatttaaagtgatttattatgatattaaatgtaagtggaagaacagatataatagcattttatacacaatggtttttaaatagattagatgaaggcttcgttgatgtaagaaacccatttaatccaaacctagtaagtagaatcaactttaatgatgttgatttaattttattctgtactaaaaacccaattccaattgtaaacgacttagataaaataccaaaaccatttctatttcatgtaacaataaccccatataaaaacgatattgaaccatatgtcccctcaaaaacgaaagtgattgaagctgtcaaagaaatatcaaaacaaattggtaaagaaaacatagtaataaggtatgaccccattttcataagtgacaaatacccaattgaatatcacatcaaagcatttgaaaaactcttatcactattaaatggctatgttaataaaataataatatcattccttgatgaatataaaaatgttttaaaaaataaaaatattttacaatataaaacattaacagaaaaagactatgaacaaattggaattaactttagtgctattgctaaaaattataatatgacagttcaaacatgttttgaggatagaaacttaacagaatatggcttcataaaagaagattgcctatctcacgaacttgcttactacttaacgggtaaaaaatataaaagttggaagtctcgtaaaggaggaaaatgcaattgtgtagaaatggtagacatcggtgcatacaacacttgtaaacatttctgtaaatattgttatgcaaactataatgaaaacaaagtaaacaataatacattaaatcacaactccaattcatcattaataacaggtacaataacagataaagatacaataaaggtaagaaaaatttgacaaaacggcaataatatgataaaatattccccaatacaaaggggtgtttttaaatgaataatcaaaaaatagaatcgataaagagtctttactctggagcaaaagcatacacaatgtttttagtggaagaacgtcaacataataatgataaggttgactatatcctagatgaagaattttataattgtgcaagattaggttttattaccaacataatgcttgcaataaaagaagaattagttggaaaagtggggtttcatcaatacaaatcacttatatttgaaagtcaattagaagatgcggtaaataaagttgcaaaaaaagtgagtaatggttatgaaatagataactatgtatttgatactgctccaaatttagtggcaacacttcgagataaactagctcatggtaattatcttatcaaaactggtggaaacaaaataacttttaccttagatgataatggtactacaattgatgtaagtattgataaattagtaaactttactataagtttaatgacaaaatatctacaaaaacaagaacctaagaattttcattatcaaacaataatgttaaataaagccagaacaaaaggtaatccaatgaattccaaatcagaagtaaaatatgtgtgtaaaaatgctaaaaaaataaccatggattttaaaagaaaagatggaaaagatttaacagaaaaagatgtaataagactttaccaagaatgtagaaaatataatactatatgcacctcagaagcactagaagatttaagaaaagctacatcatctacttttgattttacatacgaaagaaaaccaattacaaatattaattatgatgtaatatcagatgctctagtaaacgactgcaagggatttgatttggaaaatcaaaatacacttatagcatatatgattgaaaacttaattggtgttaagaatttattacaagaaacgatggcatcagtatcaaatcttgaactactagaaactatatataaagctcaaagtgtcgatatgaattatgtttcaaaaacgataaaaggcaaacaaattatgagcggaataatggaattgacaaatgcaggtataacactatttcaaacactattttcatatgctaatgatgacgtatataaaaatgattttgaatatcaacaagcaacaagtaatggattagactatagtaaactagatttatcctatttaaatgttacactatattcaacagataaaagcccagtagatacatgtcttgaacaaaaacaaaaagctgataaagcatacgcaaacatacaaaaagtaaaagctaaattagtggaaaatcaaaataaagtaattgcaagcaataacaatcaagcaatatctagtatcaaccaagcaatatcaaaattaagacaagaagaacaaattaaattacaagacaaaataaaatgtgatacagaatataataatgcatgcatgtatgaaaaaaataatagtgctcatttgataaaaagatcaattataaatagcataagaaattgtattgctcatggaaattgtcatgtcaaatacggtaaagaactttctgatacaactatcatttttgaagacatacataacgaaaagttaacttttaaagctaacattaattttgcagattttataaatatgatatatcaaaatgaacaaataatttcagaattcttagataatttaacaactcaaaacacattaactagacaaaaatagtaactattgttacccgtatatatatctagaaaaataaaaaatgtaataggttaaaataactattgcattttttattaaaaaaaatatcttgtgtatcaaacatatgtgtgttataataaatatatcaattcaaaaaaagttttagaattgataactacatgttgattaagtattcatattaaaaaaggtgcaaaacatttaaaaattttgttatcttttggaggtaatatgaaaacagaaataacaaaatacttacatcaacacaaatctatgaacttctctagtcttctatttttatatattgataaaagtgggctaaaggattcaatgatttacaaaaaagctggcatcgatagaaaactattttcaaaaattagatgcaacgattatattctaaacaaaaagactattataaggttatgttttgttttaaaattatcactagatgaagcaaatgaacttttaaatagtgctggttatgcattaagcaaaagtcaagattttgatttaatcatccaattttgtttagaaaaaaagatatatgacttgtatatcgtaaatgaaatgctagaaacttttttaaaaactgttctttaacagtattttttttgcaatttttccctaagatatgccaaaaagatgtcgccaaaaaatgtcgcttttaaagcgaccacatcatccatcttttctagtataattgatttatcgaatggaggaaatattatgaaaacaaatatgcaaatgttaagaaatttaattagagaggaggaagaaaatctagatttagtaagatttagtagtcaagaatatttatttaataaagtaaatgaagaattaagtggtaaaattacgattcttgtggataacacagaaaaaatgttagaaaaactaaaagaaacagaagatctaacaaacagaattaattaccttaaaagaacattgttcgaaaaagaaaacgaactaagactagaagatggcagaaccgttaaacaagcatcagtggaaaataaatacaacctaaagttaaaatattattatgaggctcttttgcgtaaagaaaataaaaagataagaatgacagattctaaaagtgcatacttcttagaatataagctaaatattgatagaaatgaaattaaagataaattaaaaaatatcagtgaagaaataaaaaatacaactaatgaaataattagattaaatggcaaaatttttgaaatagatttgccataatggtaccataaagctactgaatggtttaaattaagtaaaaacttaagccggtgctttataaaacagatgattacgtacttcaaaataagaagtctaaccacctcgttaccctgagttttataaagtgggtaagtgcatcccaaattggggtgcactaccaaatattagaaaggaaggttattatgaataaatatgtatatgaaacagaagataaaataaaaatggaactaatattaaatttagataaagtatataaatctttaaaaaattttaaagattgttataaaagaatctacaacaggatggattatcgtagtacgaaaaagtactattacaaaggtaaaatatatacggaagaagaattgattgaaaataattttgaaaaagatgaagaaggtatatttggt

SEQ ID NO: 1487 - DNA, 23276 bp, synthetic construct
  misc_feature 1..23276: note = Synthetic
  source 1..23276: mol_type = other DNA
taaagaagttgctaagaaaagaactagcaagaaaaagtaatacctttttctttacacaaatttgacaaaaaatacaatttgtgataaaatatagctaactaagggggatatatatgtttgttactagggggaatatactatctttattatgcagtactaacattagttataaagaaaaagaaagtataataaaaaaatatgataaattattaagaaaaaatttacaaaataccagtgaagatgttttagtaaaccttctttttagtacccaagtacctaaaagtgctaaaaaagtaatatctcaagtaatagatagtaaatctagagattttgtttgtttaaacaactttgaaaatgtgtttaaaaaatatactaattttaaagaaagtgacctttataaagctcattatcctcatattttaaaaagacacattataatagatttatataatgatattttaagtgtcttagaaaaccccaaaaaagataaaaaattaaaacaattaataatttattatggtgttgataaatctttactagcagaatttctatccgcatcaagtaatgaagatttaatcaagttttgtctagaaactaaatttactaacatagataatattgcttatgttttatatagtgaaaaactaagtttagaacaaaaagaagacatcattaaaagatttgtaagtgaatttaatattctagcaatattaaaaagcccatcaactgaagaagtaaaaaataaaataattgaattaaaaagtaatgagttagaattaaaacttaaaaatattaatgaaaaagagttaattgatttaataacaaccagtgaaaactatcctaaagtagtttatgacatgttaataagaaaaaaaaaagacatgttactttctgttattcaaaaaatgtctttcgaagactttaaaaaaacattaattaaaattaaggatgcacaaatttcaaccataattattaaaaatttcccattaaaaactaaattagttttatcattaaccagtgatataaatgttttatcatggatatataatgatgcaatttctgctgatatcaaagaatttatcttggataaaaaagaaaaagatttaaaatccgctattaaatctagaagtttaagtagtttaaaaatctgttatttaagaaattccaaaaacattcctttaaaagttcaaaaactaataattgaattaaaggatgaagaattaaaacttgatttaaataagaaaccatcatcaattataatatcagaaattttatatggtaactattgtgatttatataaatcatttattataaaaaatggtaattatgatgtagaattattacttgaaaaaagtaatgaagaattaactattttagtttttgaaaccttaaaagacagaattaaaacttatttaaataaattaactatgttagaactaacaactctagattattttaaaacaccatattctaaagaactagcagtgacacaaaataaagatttaattttatctaagataaataatactagccaagaagaattatatacatacttaaaatctttagaaacacatcgtgaaataaagaaattaatcttaaaaagtatgaatataaatgaagatgatttagataattgtgtagaattaattaaatataatgacattgatttagtaattaaaaattataataaaataaaaagttttataaataaatcaggtattccttttgatgcttttattcaatatggttgtggcagtgaaaactataaaagctggtttaataaagtacttgagataattgaatttaacaaagaagaagacttttattccgcagttaaatatttaatgagtgaattatatcatgaagaccaaagtaaagaaaatatagtttatagtattataaattatctatcaataatagatgcttttaaagattgttattatttaataatgaatttagtaaataataatgtcttactaactaaagatgattgtgataacttaaaaagattatttgcatcaagttatagtaagaaaaatgaagtaagagttttagatgatataaaatccataagatttaaaatactagaacaatataaagatgtaatattaaattcaagttctattaaagaattaaaaaatatatttatggaagtaatctgtggaaatgctagtaaatcattagaatatatcggtggttcaaaaacattaattactttaaaagagatagataaagaaaatgagaagatttgtttatttattgatgaattgttaaagttttctaaagtaattgaagcaatataaaataccaataatattgaaggcttgcgaaatattttaaaatactttattattgataaaccagataacttacttatacttgaagcatcatttattaattttaagaaagatttacaaaaattatttgaaatagatgctaaaaataatttaacttcattagatagtgatgttaccaaaagtttagttaatgaagaattatcttctaaatatggtacaatagtatatgatttttctaaggttaattactgtttatatgcacacattttaagtagaagtgaaaaagttgaagatttaataaatggtaattctcatagtaaagcaaacttcttatcagtaagtccgataagttttcttggagaaaagttctattttgatagaacatcaacaacatttgctattgataaaattccaactggtagttttattcatagttctctagtaaatatgagtacaaattttaggataactaataactctggagaagtaaaagaattacatcgaactgaaagaggaatattagaaacaagtgcagtaactgcagcaaattctgaagtgttattatatcgtgatggcataaaaatgagtggaattattttacctggaggaagaattccaacccttgaagaaataacattagctaaagaatataacttaccatttattataactcaggaagtaatgacttcaatacctaatgttaaaaaggtatttagtttaaatgatattgactttgagtttacaaaaataccaaaagaattagaagaaatattaacatccttaacaatggttaatattaataaaacttcaagtatttatacgggaagagaaatcgctttaattactgatgctcattcattgtatgaatcaactttagcagtattagaagacattagaaaaaatggtatcaaagagatatattcacttggggataatgttggagtagggccaaatcctcatgaagtattaaggttgtttgaagattataatgtaacatctatcgccggtaatagtgagtattataatacgttaggaataatgccatttatctattttgataaagaaaaaagtgaaaaccaagaatggacttacaataagttaagtgctagtgacattgaaactttaaaaatgtataagccatcaattgacttagaagttggtacccaaaaagttgcattatgtcactttgctaatgatattcgttgggattatatgggggaaaactctacctgggcatatcaaagaaacttcaaaagaggtaagacatcacaacaatttttatatactaatagtgatgaagcaaaattaaagatagaaagatcaattgcaggaaaagataaaaacgatttaagaattaaaggtttccttaatgctttagaaaatcctttattcaaaggcaaaaaagcaactgattatgatgccattattcaaggacatgttcactttcatataagtgatagactatttaatactaaaattgaaacacttagagcaattggcatgggatatggcaaagatgatttaggtaatgcttgttattatgttttaaaagaaaaatgtgatgggacatttgaaattgaaaaaagattagttgagtttaacagaaatgttttactagcaaatatcgtatcaagtgatatgcctcataaagaaaaagtattgaaatttgtaaaatggtaaaaattttgattttataaaacaagtgtagtataataattctaggaaagaggtgcaataatggaagataaagaaaagatagaagcctgcaattgtggttgtgaatgtgaagaatgcaattgtgatgaatcttgcgaatgtgaatgtggttgtgaagattgcgaatgtagcgaatgctgtgattgcgaagaatgcagttgtgaaaattgtgaatgttaaataaataaagagttccaatttaggaacttttttgttataaaaactactaaataattgcttttatattatatttactgtataataaacccaattagaaacgaggttatatatggagttaattttagtggaagcattaaaaacaattcttagaccacaagtcctaattatgataatactttgcatattaatggatgtttattataaaaagtttattgggatggctggagaattttgggtaaaaagagaattgaaaaaattatcagatgaatatttagttattaatgacataatgataaaaacaaaagatggaatcactcatcaaatagatcatgttgttatttctaaatatggtatttttgttattgagacaaaacaatataatggttatataaaaggcaatgattatgacaaaagatggttgataaaaaatgaaaagaaaaaaatctatgttaataatccacttcatcaaaattatggtcatgttaaatcattagaagaaatattaaacttaccagaagaaaagtttatatctttagtatgcatcccaagcagagcaacattatctgttaaatcaaataatgtaactagaatatatgatttgttggataaaataacttcatataaggaagaagttattggaaatccaaatgaattatatgaaatcataaataatttaaatataacagataaagccgaaagaaaagttcatgttaaaaatgctagagaaataaaaagcaataaagatgaagaattaaaaaacaaatgtccaaaatgtggaggagaacttatcaaaagaaatggaaaatatggagaatttatgggatgctctaattttccaaaatgtagttttgtgaagaaatgaagtttcgtaaataatatacatgtgatacaataataatgaatttaattttttttgtggaggtgcttatgaaagaattagagaaaaaaatagtagaatttgctaaagaaagagattggttacaatttcatactccggaaaatcttgcaaaatcaatttcgatagaatcaggagaattattggagtgctttcaatggaataataattataatttagatgaattaaaatacgaaatagcagatgtgatgaattattgtattttactatgtcatcaaataggagttgatcctaagcaaatagttttagataaattagatataacaagaaaaaaatatccagttgacaaatgtaaaggaaaaagcgataaatatacaaaactataattaatgtaagaggtgtaaagtaatggtagtatatgaaggaacaaaagcagaatttataaatgatgtagatttaaatttaataaccgatagtattttaaaaaggtttaaagaaatatttcatagaagtacaggagaatctgaaattaattcttggcgtgagtccacactgagaatgagaggtgtgttagcagatagcgaaataccagacaatgctggagtagctatagaatttaatattccccatacttctaaaagaattgattttattttaacaggttatgataaaaataagaaaaattccattattattatagaattaaagcaatggaaacatgttgaggctgtagagggaaaaaatgaaatagtttcaactttcactggaaaagctataagagaagttccccatccatcttatcaggtatggagctatgcaagcttaataaaaagttttaatcaagatgtatatgataaaaatgtaggattatatccatgtgcatttttacataattatgatttagcggatgatgacccaattaatagtgaacaatataaaagttatatagaatcagccccaatgtttggcaccaaagattttgtggaattgagaaattttataaaaaaacacattactgaaggtgataacaaagaaggtatttatattattgaaaatggcaaaattacaccttcaaaaatgttacaagatacattcatttctgtattaaaaggaaataaggaattcgttttaatagatgatcagaaaataatttatgaagaagcaataagaattggcgtcagtgctcttagctcttgcttaaataatgaaaaaagtgtgcttattgtggaaggtggtccaggaactggaaagtctgtattagcaattaatttattgaaagaatttttaagtataggacttaatagtttctatgtaacaaaaaatgccactcctagaaacgtatttaaatctaaattaaaaattgataaaatgagcagtttaaataatttattcataagttcagataatttttatgattgtaaacaaaattcgtatgatgttttaatagtagatgaagctcatagattaaataaaaaatctggattttactcaaatcttggagaaaatcaaataaaagaaataattaatgcaagtatgttctcaatattttttatagatgaaaatcaaagagtgacattaaaagatattggttcagttgaagaaatagaaaaatatgcaaaatattataatgcaggaatatataaaatgcaattagaaagtcaatttagatgtgatggctcagatggatacattgcatggctagataacatattagaaatacgagaaacagctaattttgatttggataatacatacgattttaaagtgtttgaaaatccaaatgagttaagaaatgcgattatagaaaaaaataaaaagaataataaatctagattagtagcgggatactgttggaattggattaaaagcggaagaaacaagactgacatacatgatattgaaattccagagtataattttggtatgagttggaatttagataattctgaaacatgggcaattgacaaagactcagttaatgaaattggttgtatacatacatgtcaaggattagaatttgattatgttggggttattattggtgatgacttacgatatgaaaatggacacatagttactgattatacaaaaagagcaaaaacagataaatctctaaacggcataggtaaaattgttaaagaaaaagggagagaagaagcaaataaaatagctgatacaattataaaaaatacatatagaacattaatgactagaggcatgaagggatgttatgtttattgtacagataaaaatttaagtgaatatttaaaaaaaataataaaacttcccaatctgtagggaagttttattatattattttttctattattaaatctaatttatttaatgctttaaaataatcgtcacttgtagtgggattattatcttgtatagcttcaaacctatatgcataagatagttttccatcaaatgtgtcatacaaatcattatatataaaagtacgtagttcatcataaaaagtaaaatctttcaaaaaaatatattccttttttagagttaaaattactttatctatttctttagtagcaatttcatataatttgtcttctcttacatcagaactgccttctaaatcataccaataatcattaaatccatcagaataattaaaaatatataaataatcaattatagaatcatatattctttttagtgacagcaactgtaaatctgttaatttcattttgtcctcctttgtttttattgataataatagtggttcaacagaatctaaattaaagaaaatacgaagactttcaattaattctaaagaccctggaccacaagtaccaaatctccaactgtgaatagattctttagacacatgtaaagtgtcagctaattcagtctctaattgtgtgacatttctattatcttttttacgtagttttgtaaaaagttcgaaaaacgaactagtattaaaataataataattatttttatagaatatttttctttttgccataattcctcctttcaccattaattataactaaataataaaatatataaagtttaaaatttttttaaacttaattaaactaatattttattataataacgaaattaataaagggtaaaatgaattcgctacgctcgcttttgaagggtaatcattattatttgtttaaaggtttatcaaccaaaagcaataatcaaacataattgtgatgataatgacttctttgcatttgttttataactataagtttccatgaggatttatttgaattaccattatcattttttctaggagttgaaacagcaaaagtataattgattttttcttcagaagtagaagcttagaataggaaaattcttataattctttattaaacccaggaacaaaagtttcaagtaaatacttgtttgcttcttcgattgttgtaataatgttaattcttaatctaatctttcttgaaatgtaccatttattctttttataaattttttactttatatttattatgcattttttaaatcctcattactatatatattactggtatcattttaaaaagactttaacaaattaatcatagtttgacataagtacttacttgtgatatattacttatacaaggaaaaaatgttaaatcatttttgtatggggtctatcttcggatagagccctatttttatatgattttgtataatagtttttgtaaaaaatatatactataaaataaaaacaacacttattaaaaaatttgagtgttgtttttagtaactgaattgtttacatttatacatagcaagtaattcattaaaatttttaatattgtaaattttatttataaaacaaaatctaattattaagtcatagtagttattataagaaagagtataagaacaagtagataaaagatttaataattcttcaattgataactcaagggataaaccaagtaaaataatattttttttcttagggttataattcttaatatttttaattttattgaataatcttctgtcaatatgtactttattataaacatctgaatcttttaagtttctatcatctatatacttaaaaagcatttctttaaaggtgtaatcttctttattatcatttatataagtatcaatatcttctatgtcatcacatatatttttaaaagaaaataattcttccatccaattatttttttcatagttgttttcaatatatatttttaatttatcttttaaattcatatttgtctccttaaaagcgaccaattatcttttcacttctgatatcattataccatgaaatggaggaaaaaacatgacagatttaatttttattttggaccgtagtggttcaatgaaaaaacaagcaaaaacaacaattaaagaatataattcttatattgaaaatatggaagtagaaaatattaaagtaacaactgttttatttgatgatgagtatgaaatgattactagaagaaaagatgtggatgaggtaaaaaaacttactaaagaaatatattatccaagaggatgcactgctttatatgatgctataggaaaaactataaaatatatggatgaagaggaaacacaaaaagtgatatttataataataacggatggattggaaaattgttcgataagatattcaaaagataaaataaaaagtatgatttatagacacagtaattgggaattcatttatcttggagcagatatagattcttttaatgaaggcactaatattggaattgatgaaaaaaatatttcaaactttggaaaaggaaacaaagggactcacaacttattcaaatccataaaaaaagcggtagatatgatttgtgaagatgctttcgtttccaaagactggaaagatgactcagaagagtacaatgaaaataattcataataatctgtaaaaataatagacttatcaatatatatctgatacaatgagtgtggaggtaataaaatgaagtatattataggactagacttaggaataaacaatgtcggttggtctgtagttaatgcagaaacaaacgaaattaaatcctatggtgtgaaaaagttcagtataagtaatggcgcaagtgaccgccgtaactttagaaattcaagaagaagattaaaaagaaaggacacaagaaaagaagatattttaaaaatattaaatagcataaactttccaaataatcttacaattgacacaaaattgattgaaacgagatgtaaagggttaaatgaaaaaatctcaaaacaagacatcacaaatattttaacatatatggcagtgcatcgtggatatattccatatggtgatgaagaagtaagttttgtagatttaaaaggaaaatatccttgtgaatactatagagataagtttttaaatagtattaataacaaatatcgagctcaaagggaaactgtaacaagcaaagataatgaaaaagaaattagaaaagttttaaaaacacaacaagaatattatccagaaataacagaagatgttatagaaagaattatacaaacattaaatagaaaacgtaaattttgggaaggccccggtggactaaattctttaactaactttggtagatttaaaacagaagaagatgtaacaaagtataaagaacaaaaagatataaatccagaatatgaaaaatatatatttgaggatttaataggaagatgtgaggtggacccggacgaaaaatgtgcctcaactgacaatttttatgctgaaaagtttaatttattaaatgattttataaatgtatcatttctaaacattgatgaaattaacaataaagaagatttttatttaacgaataacaaaacatataaattaaaagaaagtggcttaaatagggtgtttaaatattgccttgataaagaaaatgtaactattaaaggcttgttaaaagatttatttgccactactgtaaacaatatgtctggatatcgtcaaaaagatcatgattccaataaaccggacatgtcaactatgaatacctatagatcaatcaaaaaaatatttgctaaaaataatgcaaatatggaaatttttaaattagagaacattgataaatataatgaaattattaactactttatgctagtgcctggaaatgtggaacttataaatatgattagtagcatggttatgccattatatgaaaatgataaagatgcacttaaagaaacttttaaatcaaagaggaaaaaattaagatatcatgctttgtgtgaaaaagtcttaaaaagggcttgtaatgacatgttaagtttacaaaaaaactacatgcaagtttacaaactaaaagactatggcaaaaaatcgagagaaattttcatcgaaagatatgaaaaacaaaataaagggaaattaattttaaattccagttttatagatgacattgtagcatcacctcaagttaaaaagaccttaagacaagcagaaaaagttattaatgagatagtaaaagatatgaaatctttaccttatgcaattgccatagagtcagccaaagaagaactgagtggaaatgacaaaagaaatatgtatatttcaatgaacaaaaagaataaagaacttcatgataaagcagagaaaacattaaaatcacttggttatgacataaatcaaataacaaaaaagaaaataacgaaaataatgttatatgaagaattcaacggcttatgtccatattgtaataagtccattaatatcaactatttaataaatggttctgatgaaatagagcacattcttccaagaagtgattcatttaatgatagtttagataatagaacaataagttgtgcagactgtaatagtaaaaaggaaaatagaacgccactccaatatcttaatggaagtgataaagagagttttataaatagaattaaaagtaataagaatataagtgaactaaaaaaagaaaattttctattttatggtgatctcagtaaatataaaactagattctttaatagaaatttacgtgatacagcttacgcaactaaagaattagttagacaaattaatatttttaataattacctcgaatttaagaataatggcaaaaaaatattaacaatgtctacgccagggcaactaacgcatgatatcagagaaagatataacttagaaaaggacagagatgcaggcgaaaggccattccaccatgccgtagatgcttctatattggctttgttaccaacgacatcaattggtaaaaaaattatgaaatttcaaaacgatgctaacttttttattcaagataacagtaaaaaaataatgcaagatattggaatagaattaaaatactataatacaaaagatgataagattgaatatgatgattacatcaaagacttaaaagaaataagtgacacaaatccaaaatttatgtattcacctgaagtaaataaagaccccaataaaaaattatttaatgccaatttatataaagtgataaaaaaagaagataaatactacaaaattgaacaaattaatgatatatatgattataaagtagatttaaatctattagaaaaattattcgatgattctaaaaatgaaacactgttatgtcaatctcaacacaaagaattttataacaagcttaaaaagatatatgaaatatataaagacagtgacataagtccatttgaagcttatcaaagagaaattaataatctatcaaaagaagatgagtttgattatataacacatggcattagaatgagcgaaaatggccctgttgtaaaaaaactaagatactatacaccaattaatgaaccatatttggttaacaaaaaaacaattaacaaaaaagatactacttatctagcttatgatagtctagcacaagctggaatagaagtatattacaacattgataaaaactgctttgtttttgtgccaattccatgtacatgttacaattttaagactggtaaagtaaataaaaaaaataatgaatatataaagtattaccaaaaaaatatagggacgtataacgttcaatataaaacaacattgtataatggtaataccatagaaataaataaaaaagatggttcaataattaaaggagaagttagctactatcataaaacattagataaaattgtgttgaaatcagagcaagcttttacaaaaagtgacctaggtttttcaataattgattatagcccaataggaaaatgtcaaaaaagattgacattcatgattaaatagggtatattataagtgcaatgaccaaagttggtgggcattgccaaaaatcattcagttttcttattataactcttaatgaggaaaccggggctacccttgaggtagtctctttttatttagtgaatatggcgtttcgcagtatattaataagcgaagcaacaaaaataaatttagatttaaataatattgtcatacaatatagtggtgatagttatcgtataaacattgatgaaataagtacattaattttagatgatgctagatgtcttgtctcattaaaacttttaagtgaattatgtgaaaaaggagttaacgtagttttaacagatagttctcacagaccagttggaactttaacaacactttacaataacgtaagagcaccaaagaagaataaagaacaaatattatggggaaatagcgtaaaaggttatttatggactgaaattgtaaaaagtaaaattcaaaatcaaagagatgttttattacacttagataaagtagaaaaattacaaatacttgatgattactttaataccatagagttcggtgatgcgactaacagagaaggtttagctagtcgtacttactttaaagaactttttggaattagctttaaaagattcaatgaagacattataaatttttgcttaaactatggataccaaataataagaagcaaaatatcgcaagaaattgtggctttaggatatcaaccatcatttggaatatgtcacaaaaatgaatataatactttcaatttggcagatgattttattgaagtgtttaggccaatgatagattattatgtcttcaaaatattaagtacagctgaagaagaatatctaacaccatctttaaaaggtaaattagtaaacatagttaatgagagagtagaatacaaaaataatacttacaaaatccacaatgttataacattttacttacaagatttaactaattttttagaaactggagatttaagtaaaattaattttcctaaaatattatggaatacgtaaactattataaacagatgagattattacttatatacgatttaccaatgcttgaagatgaagataaaagaacttatcaaaggtttcataacaaattaatatctattggattttatatgttgcaatattccgtatatgccaaagtaattcaaaatgatcaagcatacaggcaattaacatcaaaaataaataaaatattgccacaaaaaggaaatattgctctattgaaagtaacggaaaaacaatatgaagaaatgatatatttaaaaggtgaacaaaataaatttgatgctttagtaggcggaaaggaacttatagtttttggaggtgatatatgacaaaccttaaacttgcaggaaaagtagaagaaaacataacaatagaaaaaaataataaagtgttaataaccaactatgataaatatatcgaattctacaaatacttttatgaaatgtctaatatttttatagagaacaaagaaattttaaaaaaagattgtgtatttatagatattacaactattgctgggattattaaggaacttgaatttaagaaaaatacattattatatgattttatattaataaaatataatgaaatagctattaataaaaaagatgaattttacagtgcttttcttaaacaaatagaatatttaaaaagtaatatgaatttagaatttgaattaattccagaagagattatagataaagtgataatacaaaatataaacacaaaaataaactatgcaaggctaataaaggattttgaaaatattttacattttgtagttagctataatattaataaaacttatatcattatatataattcttcattttttcaaatgagtagaaatttagataattgctatacatttgatgttaattcatacttaaatgtaaaagattataatatattgatttctgatgaaattagaaatattaattatgaactgttgattgaatatttaaaagagatatggccggttgattattttgaacaagaaattgaaaatttgttagaagagtactttagttatggaattcacaaaaaaatttttaaaaacaaaaaagaaaaaatgtatttgttatcaagtattataaataaagaatataaatttcaccaagaaataacatgtgataaagttgtatttgacagtattattaaatcttttatagacaatctataatatatgtgatattatgtctataggttttaagatactgaagatttttgataatgtccaacgctgatagtgcgtctagtaatactgaggtagttttaagatactgaagatttttgataatgtccaacgaacgtgctaaaaatgatcctaaaaaattagttttaagatactgaagatttttgataatgtccaacataattttaaaaatggtggtgtttatacaagttttaagatactgaagatttttgataatgtccaacgaaaaaatgatgcataaatcattaggtatagttttaagatactgaagatttttgataatgtccaactcattttgttaaattcctatatattcgattgttttaagatactgaagatttttgataatgtccaactatatatacaataagcaacacggaatatgtgttttaagatactgaagatttttgataatgtccaacagcatatcaagagataatattccaaatacagttttaagatactgaagatttttgataatgtccaacatatacaaaaactataaaaaaagaatatgcgttttaagatactgaagatttttgataatgtccaacaatgcttttattaatacgttattcaataaagttttaagatactgaagatttttgataatgtccaacacgttttattttagttaattcataacgtgagttttaagatactgaagatttttgataatgtccaactatttctacgatagtatgcaacatgtgtatgttttaagatactgaagatttttgataatgtccaacaaaagtaccaatttaatgaataatataattgttttaagatactgaagatttttgataatgtccaactatttcaatagacacaaaatttggacttcagttttaagatactgaagatttttgataatgtccaactaatttaaaagtagtagcccgtgttgtagagttttaagatactgaagatttttgataatgtccaacatttcttcactaggaatattaatcaatcttgttttaagatactgaagatttttgataatgtccaacttaaagatataaaatatagtacgaatattggttttaagatactgaagatttttgataatgtccaactgttggtactcgtaacagctgagtcattgcgttttaagatactgaagatttttgataatgtccaacaaaaatactggatgtcgctgaaccagttgagttttaagatactgaagatttttgataatgtccaaccttttctttctaaaaatcagttttgaacagttttaagatactgaagatttttgataatgtccaacgtattggacctaaatctttattttgatatcgttttaagatactgaagatttttgataatgtccaactagttaaatacaaaaccatttatacgatagttttaagatactgaagatttttgataatgtccaacacaagtggaagctaatagaagtgtaaataaaaagtcaagaataattaaatagtattttaagtatatttaataacaatgaaagaattagtagttggggggcttatatttcttttttaaaagaatatatgatgaagatatgctgttgcaattcatcatctaatcgaaaaatggaaggaatttatctttgaataatgaagtcggtggagaaatattattcggaaaacaaactaaattcaaatatattgatttaagtagaaaaaatgataaaatatattaggttgaaggaagtagaataatatggacaataaactaaaaaacgataattctttggaaacacaattttggagtgataatgtggaagttgataccaatagtccaatgataaaattaattgataaagtatggaatttaaaagaagattatattcctacagaagaagaaataaaacaatttaataaagaaatggaaaattatcataaaaataaaaataacacaaaaaatgaagaatttttaattatgctatcttgtagatagcatagaggagatatatgaccagtattatatctattcgttaatgatacaataagaatatataaaaagatgaataatgtttggaaacaaatgacatctaatgaacaacaaaaatatttgattttaattttatggaatttttaaggtattaaaaattttgagtttaacggtgtacctggaaatgttggtaaaatcattatagaattcagtagcttaaaaaagcaaatattgccgtccgaaagtgtcattaatggcaccgcttcgaatttagcaacatctgctttttatgacaataatataccgcaatttaaacaaaatgtcaaatcagatatatctaatgatattatatgtaaatattatgatactacattaagaggagagatattaacattctgttagtaaaaaactctaataatttatttaaaatcattgaaaaaaatacatatatatcttataatcaaattgcgagtgatgaatttgtaaatattaacaatttcagaaaaactaatagtgaaaatgtacaaactggggctatcgaaacgaacagcaacagcagtaatgaatatgctaaaaacggaagaacagctacaagaaatgatggactatataatagagaacgaggacataataacagaccatcaaactctacaacatttagcgaaaatactttacggggacaaaaactaggtaatagttcgtttttatttttattaagagagtcatgtctgtttatttagaaataatttcgaataaggttgaatgtcagaatattatccaaaatagtaattataaaacgacttcctattttggaagtcattttataattattgttttctataatcaaaatattcccagattatataaaataaaaatctaaaaaaatttctcaaaatgcctccttctatatcgaggcccctgacaagattattatataaaaatagtatttaattgtaaagttatctagacaacttttttaaattgtattatcataaatatgaaaggattgatataatgaaaagtaaagtatattttacaaaagaaataacaagtaaaagtttagttaaaatttatgagagtttaaaccatgaattaaaaggaaaagttgcagttaaaatttcaaccggagaacctggtggtcataattttttaaatccaaatttaattaaagctttagtaaataaattaaatggtacaattgtagaatgttgtactgcttatgctggaaaaagaatgaatccaagtgatcactggcaagttatcaaagaccgtggtttttatgatatagctccatgcgatattatggatgaagatggtgaaattaaaattcctataaatggtggaaaacatttaggtggcataaactatgttggaagtcatattaaaaattatgattctatgctaatgttatctcattttaaaggccatataatgggtggcttcggcggagctctaaagaatatgtcaatcggagttgcttccagaaatggtaaagcatggattcattctgcaggaaagacaactgtaccagatgaatgctgtaaattagaaactaaacaagatgatttcctagaaagtatggctgaagcagataaatctgtcgtggactacttcaatcctgaaaatattgtttatataaacgttgccaataatatttcaatagattgtgattgcgatattaatccaaaagattcagaaattgtcgacataggtatttttgcatctctagacccagttgcattagataaatgttgttatgatactattatgaatttaactgaagaaggagcaaattcattaaagatgcgaatgcttgataaaaatgcaattcataccctagaagaagcagaaagactaggtttaggtacaactctatatgaactagtaagtattgattgaggttattatgaaattagaagaaatagtaaaaatattaacagaacaaaataaaactgtatccacgatggaatcttgtaccggcggagctcttgctaatgccattacaaatatcccgggagctagtgaaattctaaaatttagtgcagtaacttactcaaatgaatttaaaatgaaaatgggtgtaccaaaagaaataattgatacatattcagtttatagcatagaaactgctattgaaatgagtaaaaaaatatctgaatttaccaattctaattatggaataggtataacaggtaaactaaatagagtggatcctcataacttatctggcgatgataacagagtttactttagcatatataataaggataataacacaaattacaatggttcattaaaagtaacaaaagaaaccagaaaagaaaataaagaagaagtaataaatttaattgttgataaattatatgaaataataaaaaaagaagactaaactaagtctccttgataaatatttcttttaaccatttctttatcaatatcatttaaaaccacaaacttctttataagccaatccggagcaatcaattcatctatagttgggtctccagttattctcattataacaacatctttgtttaaaagccttaattggtcacaaataatatcaatatattcctctttagttagaatatgaaacttatctttttcataaatactagctaaagaggtattttttgctacataaagcatatgaattttaatcccatcaataccacaatcattaacaaactttattgtatttaacatatcttctttagcctcatatggtagaccatttataatgtgcgcaacaacaaatatatttctttcgtgtaatctttttacagcatccctaaaaacttcactattatgtccacgatttataaaatttaaagtattattattactactttgtaaaccaagttctacaattaaaaaagtctttttatttaattcatctaaataatctaaccattcatcagttaaacaatctggtctagtagcaatatcaattcccacaactttaggtaatactaacaacttatcaacataatttttaactaaatttttatcattataagtattagtgccagattgaaaataaggaatatacaaactatctggccatttttgctccataatttttctcccattttcaaattgttctaaaatatcaaggtcattattacttattgtagcactagatttattagaacaataaatacatccaccattaatttgattaggacaagtactattaatatctaaaggaactttaaatactttttgaccaaacttcattttaaaaaagtaatttagtgtataatatcttttattatctaatgtatttttaaacataataccacccgctaatattttatcatgtaaaattataaaataaaagttgttatttttaatatttgtggtatactaatattagttgctgaaatagctcagttggtagagcaatgccctcgtaacgcataggtcgtaagttcaagccttactttcagcaccatttaaaaataatccccgtaaaatcggggttttattatatctttttttaatttacctcttattaacaacttaaatattaaaaaatttttcaataaaaacaaattttatatatacaaaagattatactatgtgttataataaatttatcacacaaaggaggaaataaaaatgcgtgtatatggtatgaacgttttaaaagaattagatactaaaaagattaaaaaagtatttacatcaagaaaagaagtatgcaagtattgcagtgaaaacaaaattaaatacgaatttgttgataatcattttcttaataaaatgtgcgaatataatcaccaaggggtggtaattgatgcctttgattatgattactataatattaatgatatagatggagattttgttttaatattagatcatcttgaagacccacataactttggcgccatcataagaacttgtgccgcagtaggaataaaatcgataataattcccaaagatagaagtgttggagtaacagatgttgttgtaaaaactagtgtaggaaccataaattatgtaaaaataataatggttaataacttagtagcaactatgaagaagttaaaaaaagatggtttctttatatatgcagcctcaatggaaggccaagattttagaaaaatagattatagcacaaaaagagctttagtaattggtaatgaaggttctggcgtaagcagattagttaaagaagaaagtgatgttttagtaagtattccaatgaataaaaatgttgaaagcttaaacgcatcagtagctgccagcattcttatttatcatatgggggataatgactaatataagtgattctgaactaatcatgctatgtcgagaaaacaatgaagatgctcaaaaattacttgatgaaaaatataatattgttataaaaaaatttattaaagataactatgaagcaattagagttttaaacattccttttgatgatttatataatgaatgttttgaaacttacaaaagagcagttgaaaattatcgtaattataataaagcaagtttttacacatttacatcaacattaattaaaagaaaaataaaaaaagtaatattaacagaaataagagaacaaaagaaaaactcagtagtattacttagtgatttagaaaatcaaaaacgaaataatgaatttattttagcagatagtaaagacccattagaaatagtttgtgaacaagaacaatctcatgatatatatgaaataatattaagtaagttatctattgcagaaataaatataataactcttttaatagatggtttagattgtaaaaaaatatcaatattattaaaaaaagattattcatatatttatagaaaaatacaaacaataagaaaaaaactaattcctgagttgaatttaacctaaaattgcttgatttttacatatttctatgctatattattaatgaacacgaaagtgtttttttaaatggaggtttttttaatggcaaaagaagctaaagaaacaaaaaaaataacaaaagttacaaaagatgctaagaaaaaaaatagcaaagcaaaaaaagtaagtaaaggtcctaaagaaagttatgttaaaaaagtaaaaaaagaacttaaattagttaaatggccaacagcaaaagaagtattaaaatacacaatatcaacagtagtattttgtttaatattatgttgcttatttatgttgctaaacttattattatcagtagttaaaggatggttggcataatggaaaaactttggtatgtagtaaatacttattcaggacatgaaaataaagtaaaagaaaaattagaagcaagaacagagtcaatgggaatgcaagattacattttccgtgttatagttccagaaacaacagaagttgaagtaaaagatggagttaaaaaggaaaaagtaaagaaaatgtttccaggttatgttttagttgaaatgattatgactgatgaagcatggtatatcgtaagaaatacaccaggagttacaggatttatcggttctagtggaaaaggagcaaaaccaactccattactacctcaagaaattgatagaattctagctaacatgggaatgagtagagtagacgttaaatctgaattacaagttggagacacagttaatattgttgatggaccattcagtggtatgactggtaaagttgataacattgaccttgaaaataatagattaaatattataattgacttatttggtcaagaaacaaatgttgatgtagaagtatatcaagttaataaaatataattaaaaaagttgaaggttcttaatcttcagctttttttgtattttcaaatatttctaaattatt

SEQ ID NO: 1488 - DNA, 18442 bp, synthetic construct
  misc_feature 1..18442: note = Synthetic
  source 1..18442: mol_type = other DNA
tcggttccaagggttgggctgttcgcccattaaagtggcacgcgagctgggttcagaacgtcgtgagacagttcggtccctatccgtcgtgggcgtaggaaaattgagaggagttgttcttagtacgagaggaccagaatgaacatacctctggtgtatctgttgtcacgccagtggcagtgcagagtagctatgtatggaaaggataaacgctgaaagcatctaagcgtgaagcctccctcaagatgagttttcccattgtttacaagtaagatcccagaaagactatctggttgataggtcagaggtggaagcatagtgatatgttgagctgactgatactaatagatcgaggatttaaccctaattgatattaatggttatatattttgattttatacattatcttagttttcagagaattatttctctaaattttatttcattagtgacgatagcaaagagggtacacctagttccatcccgaacctagaagttaagctctttaacgccgaagatagtataatgctaaaataggtagtcgctaatgattttttttatgcaaaaatgtcaataacatttgactttatatatattattgtgttatatttaattcataaatttagtgttgattgaaacataatagttttgtaaatggtaatttagaaaattcatggttgatgaaaatgaatcaagtttataaagtgaaatacaattcttgaactaaatcgttactcgcgttaagagaaaaaggtaatattaatattataaagtagaatggtaccacgaatagttcgtttctatatttataatattttttttgaaaggaaggtatttttatgaatttatatgaagatttaatgtatcgtggacttattaaggattttagcgatccagagttaaaggataaattaaataatgagaaactaacattttatattggaacagatcctactgctgattcaatgcatattggacattttagttcgtttttaatcgcatcaaggcttgctaaatatggtcatcatcccattcttttaatcggaggagcaactggtttaatcggtgatccaaaaccaagtaaagagcgtccaatgatatctaaagaacaagttttaaaaaatgttgatggcttaacaaaacaagctaaagaaatatttggttttgatgttgttaataattatgattggtctaaagatattaactttttagatttctttagagaatatggaaagtacataaatgttaattatatgttagataaagatataataaaaagaagattagatgagggaattacatattgtgaattttcttatatgttgatgcaagcaatggattttgtccatttatatcaagataaaggggtaactcttcaagtagcaggatcagatcaatggggtaatatcactacaggtattgaacttgctcgtaaaaaattagatgtaaaactatatggttttactatgcctttaattttagattcaaatggtgttaaatttggtaaaactgaaggcaatgctttatggcttgatgaaagtaaaacttcttcttatgaattatatcaatatttaatcaatactgatgataaaatggttattgattatttaaaaaaattaacatttttaactaaagaagaaattgaacaaatagaaatagaccatcttaaagccccagaaaagcgtctagcacaagaaaaacttgctgaagaggttattacattccttcatggtaaaacttcgtttgacaaggcaaaacatatctctaaagtcctattctcaggtaatgttaatgaacttagtgatgatgaaatagaagatgcctttaaacaatttgataaattaaaattagaaaatataccattaattgatttattagtttctaattctgtagcatcatctaaaagagaagcaagagaatttattaaaaacaacgcaattacattaaatggtgaagttattaatgatgaaaattatattattgataatgatagaaaatataacataataagaaggggaaagaaaaaatattatatatttgaaaaataaataaaaaatagatttcaaatttaattttgaagtctatttttttaattattacttaatctgtttataataagtgcaattacaataagaatataaccaactaaagatatataaatattaaaattaaatattggtgtaattcttaagattaaaattgatacggatgttcctataattgatgctacaacaagtgatataatattaactaaattatcttttctattaaacagtatttcacttccatattttattatataaataatggcacatgatataaataagtttgtaagaagtgaaaatataaaattaggattctttccaaaaattggaagttcaaatagtccccatattataatgggtatgtttaacgtactaatatcattaaataaatggttattatttgttgaataaataaaattagttactttgtttattggaaaaaattcatatatataattaataaatatacctgctgctaaaataaatataattccaaatataagaaaaaacaaatacatatatttacccctttcatatattattcttataataattataacttaaattagttaaaagttcaaataaattattgtataaatgtcaaatttcaattatactaatagtataagatataagtgaaaggacttgattttttatgcaagaaaatgaatatagtattataaatcgttatggagataattttacttcaaaaacatatataactaatccagcgataggaagagaagaagagttaaaaaaattaatattagttttattaacaccagataaatctgcaatattaaccggtaaacctggtattggtaaaactgctatagtagaaggacttgcatataaaatacaaaaagaagaagtccctgatgctttaaaaggttatgaaattgtaaaaatagatacacaggctttagtaggtacagttaaagatactggtgatacaagagttcaagctttaatagatgagataaaaacaaaagaaaagtttattttatttgttgatgaaattcatactttaattaattctaatagtgataatgcccttgattttgcaaatatgtttaaaacaggtttaggtcgtggtgatattaaagtaattggggcaacaacatcaaatgaatatgaaaaatatatcttaaaagataaagcattcgtaagaagatttactaaaatagaagttgaagaaccagatagagaaatgactataaaaatccttatgggtactctgcctaaaatagaaaaaaatatgaatgctaaattagcatatacaagttttattcaagaaaaaataatggcttttattgttgatattacaaaagaatttaatagagtttatgaaacagaaggtagatatcctgatatagcattaactcttcttacacaagcattttctgaggctgtttttgataataaacaaatagtaacaattgaacatatagaaaaagctataaaaaatagtactgctatatatcctgatgttataaataaaggtattgtaagtttaagagaagaatttaaagatttatttaaacaagaagaagacttaagaaaggattttttaagaaatgaataaattaaatagtattatatatcgtttaagaaacgttttatttcttctttttatggtaggacttataagattaatacccaatattaaagaattagaatttattggaacaatatttatcatatttgtatttatttattttttacttgatttatatttttatggttgtaaaagtaaagagttaaataataataaatttcaaaatatattagttatctttttatatgtttatgtttttattgtttctcaaagatatattaactcaattaatgattttacgtatgaagtagataatatgtattatttaataaattatataataatatctttagctttaatatgtataagtattaataattttatattactttcaataaaaaaatagttttttaactattttttttatacatatttatatattcatcatataattctttaaatctagtaaagtgaacaatttctctttgtcttaaaaataaaagtggagcaataacatcaggatcgtttgttaagttaattaagttttcatatatagcacgagctttttgttctgctgccatatcttcagacaaatctgcaataggatctcctgtagtagcgaaatagcttacggtaaaaggtactccgttagtgtctgttgggtataatgctcttttatgttcagcataataagtatcaagaccagcttgttttaattcttcaatagtagcatctttcattagttgataaagcattgtagaaatcatttcaacatgacctagttcttcagttccaatatctgttaaaagggcttttcctttatcagtaggcattgtatatctttgatttaaatacctaagagctgctgcaagttctccattagcaccaccatattgagtaataatggttttggccatttttaaatcttttctttttatattaacaggatattgtagttttttttcgtatttccacattacttattcacctcccaaggaaaagatgagtcccaattccatggtgttttgtttagtgtttcactatatgttgtaatagcaccatattttgtttcataattttttttagcagtttcatattcttttaaatatttatctcttaaattaagcatattaacatcatttgggtaaatatctaagtataaatttaaatcaactaagttaaaatcatatatttgaagtaataacatcatataatctttttcattgtttggatttatttcatatggtttataatttttataaggatcatataagttatcaaatatattaccacgtataaatcctttatatggatctatattattatttacattattattagagtaattataattgttaaaatcataatcataatagttattcataatatttttcctccccatattaggttatgtttatcattttttattgaatgggttaataactataaataagtattttcataaataaaaaaattttaaaatttggaaaaaattactaaatattaaaatcatatgttataataaaattaactgattgttatttgaatgtaattaggaggtaaattatgacaaaaaattacagtattggaattgatatgggagttaataatgttggatggtctattttaaataatgatactaaaaaacttgaaaattatggagttagacttttccctacatcaaatgacgcaaaagaaagaagagaagttagaaacacaagaagaagattaaaaagaaaggaaacaaggcttgatgatactttatatttattaaaaaaatatggtttcaatgaagataatacaattgaagaaaatttaattgaaaaaagagttaaaggattaaatgaaaaacttgaaaaacaagatatagttaatattctttgctatatgataaaacatagaggttacattccatttggagatgaagaagttacattggttgatttaaatggaaaatatccttgtgaattttattatgaaatgtataaaaatggtggtaaatatagaaatagaaaaatgactgttagaattacagataatgaaaaagaaataaaaaaaatattagaaacacaatctaaatattataaaaatataaatcaagattttataaataaatatttaaatatattaacaagaaaaagaaaatattgggaaggtccaggttcaataaatgatttaactccttttggaaggtttaagactcaagaagatgttgaaaactatttagaggaaaaaagaaaaaatcctagttatgaaaaatatatttatgaagatttaataaaaaaatgtgattatgaattagaagaaagatgttgttgtaaattaaatatttactatgaattatttaatatgtatcaagattttattaatgtttcatttaaaaatattgaagaattagaaaataaagattgtttttatgaaacaaaaaatggattatataaattaaataaaaaaggacttcttatggtaaaggattactgtatgaataattttaaattaaaatatacagatattttaaaaaagctatttaatactgataaagataatatttctggttatagaattgataaagaccataaaccagaatttagtacattaaatagttatagaaaaataatgttagaatttacagaaaaaggatttgatactacttgggtaagcaattataattgttataatgagataatggaaaaaatgactttaacaccgggtggtgttgagtttataaaagaaatagaaaataataaattagttccttataaatttaatgaagaagaaaagagtttatttaaagagttaaaagaatattttaataaaaaaacattactatcttatggctctttgtcacaaaaaatacttcaaaaagcaattaatgacatgcttgatttagaaaagaattttatgcaggtaagtagaataaaagattatggtaaagaagcaagggaaaactttattaaacagtataaaaaaacttcaaataaattagaaataaatgctagttttgtagatgatattatagcgtcacctcaagttaaaaaatcattaagacaagctataaaaattattaatgcaataattgaaaaagaaggatgtttacctgtttcgatagctattgaatctacaaaagaattaaatagtgataaaaagaaaaaagaaatagaaaaagagcaaaaaattcaagaaaatttaagaaaacaagcttctaattatttatctgttgtttttggagatagtaatgcaacagaaactaatatattaaaaataatgttatataatgaaacaaatggacattgtgcatattgtaacaaaccacttaatataaatgatatttttactgataatattcaagttgaccatattttgcctatatcaaaatcttttaatgattcgtttaataataaaattatttcttgtaaaaaatgtaatgatgataaaaaaaataatactccttatcaattcttaaaaaataagaattattttgaagaatttgaaaaaagggttttagaaaataagaatataagtgattataaaaaggataatttattatacaaagatgacttagataaatataaaactagattttttaatagaaatttaagagatactgcttatgctactacagaacttattaatcaaatagaaatatttaataactatttagaaattttagataaaaaaagaataaatactttgtctgtaccaggacaaataacgtctagtattagaaatagatatgtaaaaaatgaagataaaacaagccttgaaaaaaatagagatgctggtgttttccatcatgctgttgatgcctcaattgtagtatctgttagtgatacacatatcggtcaaattatgttaaaagcacaaaatgataaagaatattggattaaaaataaaagtggttatgatgatatatataaatatttaataaatttaagaatagatgatacaataaatcaaatagaaaaaattaataatgaaaatataaaaatttctaaacaagttagtaaaaatcctcaaggtaaacttgctaattctaatatttataaaatgataaaaaaagataacgaacaatatataattaatcaaatagataatatttatacatttgattttaaaaaagatgaaaataaaaagttatttgaaaaactattaaacgaagaaaataatgaatttactttattatgttatgataatgataaaaatacatttaattatattaaaaaaatatataatgaatataagaatgaaaaaggaaatccatttgttaattatttaatagataaaggagaaatatcagatggtaatagtcttgattatgatataacaggcataagaatggttactaaaaaagggaatggtcctattataaaaagattaagatattatagtaaaaagaatgatttatatatattaaataagaaaaatataaataaaaaagatagtaattatttagcattagatagtttaaaacaattttgtgtaaaagtatatgtagataatgataataaaaagtttgtatttttaccaatatatactatttcattagatcctaaaacaaagaaagtaaatgaaaatgatgaattttacaaattattttataataaatatataggtaataaaaatgttactttctttgcagatatttataatggaaataaattagaaataacaaaaaaagatgggacaatagtaagtgggtattattctacttttcataagacgcataattatttagttttaaataacgacaaaggagttatgcaaagtgataaaaaaatatcaattattcacactgatattttaggaaatgagaaaaaaaggttgacaaaagaattataaaagaggtatatttaatatgtaacaagtagtttgtttctcaaattggaattatttgttgcatatttctcaaattatacagggtttcctattataactcattatgaggaacccaaaagataccttcgggtatcttttttgtataattatggcttttagatctatattaataaataaagcaactaaaataaatttagatttgaataatatggttgtatattatgaagaacaaaaatattttataaatttagatgaaataaatttaattgtaattgaagatccaagatgtttagtatcattaaaattattaactaaaattggttcaagtggaataactttagtttttgttgatgaatcacatatgcctgtctgtgcgatggaaacattatttaataatgcaaggtcagcaaaaagatataggcaacagattaattgggatataaatggtattaattatttatggactagtattgtaaaagaaaaaataactttacaaaaagataatttaattagaaataataaaacaaataaaataaatataattgatgaatatataaatacaataaaagaaaatgatatatctaatagagaagggttagccagtagaacttattttaaagaactttttggttcagaatttaaaagatttaatgaagatatgattaatttttcattaaattatatatatcagataataagagcaaaaattgctcaagaaatagtaaaatgtggttataatccttgtttaggaattaatcataaaagtgaatataattcttttaatttggcagatgattttattgaagtttatagacctatcgtagattattatgcttatgaaataataaaaaatgataatagttcatatttaactccatcattaaaagaaagattaattaatatagtaaatgaacgaataatttataacaatcaaaaaatgaaattgcataactcaataacattattcgttcaaaatatgtttacttttttagaaacaggagatgttagtaagttaatatttcctaaattagataaatgaaagtaagtaattataagcaaatgagattaatattaatttatgacctgccaatggaggatgagttagatagaaaagtctatgccaagtttcataaaaaacttcaaaaaataggttatcatatgcttcagtattcagtttatacaaaggtgattgtaaatgatgataattataaacaagtaaaaaaacaaacagaaagtattataccaagtaaagggcaaattattatatttaagttaacggaaaaacaatatcaagatatggtttatttaaggggtgaacaaaatatgtttgatgtgatagtgggtaacaacgatatggttgtttttaaagaaatagaagatgaaagaacttaaatttgaaatagaaaatcatataaataatatattaattaaaaaaaataataatattatttataaagataaaataaaaatattagaattttataatattttacaacaaggaattaataaaaataaagatgtttttatatcaaataataaaataaataataaagaatatgctttaataaatttaatggatataacatctattatagaaaattttaagtataataaaggaagtttattatatgaatatattaacttaattgttaataataaagaagaatatttagataaaattgaagatattgttgatggtttaatgcaagatataaaagataatgtagatttaagtatatcatgggaatttaatagtagtttgtttaaaactttatcatctttagtagatattgatattaatatcaatataaaagagttaactgttgttataaatgaaatattagactatattatgaaatataattctaataaaatatatattatatttattgataaaagtcttattaatattaattttaataacgataatttatatatttttaatgtaaataataatattgaagatttaaatgattataatttattatttttagattattattatgattttaatttaaatgttttattagaaaacataaaattaaattggaataaagaatataatgatgattatatattaaatttattaaaagattttataaatatatatttaaaatatgataatatttttatatcaaataatgatataaaacagttaaaaaatatattttataaattatataatatacaaaataattcaaattctatagaaattttataattagtatgttattatatttataggttttaggatcctgtataatttgagagatatacaacagactggtggcgttttgagattcaacttaggttttaggatcctgtataatttgagagatatacaacaattgatgatgctccagctgataacaacacgttttaggatcctgtataatttgagagatatacaacccaattatttaaaattccattaatataaccgttttaggatcctgtataatttgagagatatacaacgaattttaaatataatacatacattgttaagttttaggatcctgtataatttgagagatatacaactatcatcattcaaactatcatttaatttatgttttaggatcctgtataatttgagagatatacaacttattctcaggttatgttaggtgacattgagttttaggatcctgtataatttgagagatatacaactttatttgtatattttcataactgccataagttttaggatcctgtataatttgagagatatacaactgaaactaatacaagtgtaaatacttcttggttttaggatcctgtataatttgagagatatacaacatcaatagaaattgttacacttcctttattgttttaggatcctgtataatttgagagatatacaacatatttttggtctaggtttattgataaaacgttttaggatcctgtataatttgagagatatacaactgatatgtgttatataacaaaggatgtactgttttaggatcctgtataatttgagagatatacaacgtagaacagttgaaacttacaacgatattcgttttaggatcctgtataatttgagagatatacaacagaagcaataaataaatggctagatgaagagttttaggatcctgtataatttgagagatatacaactagtaagaaataaaacgactggaactgcgggttttaggatcctgtataatttgagagatatacaacttcagtcctatcacttcgcaagactgttatgttttaggaccctgtataatttgagagatatacaacactttaggaactattattactaaggtttttgttttaggatcctgtataatttgagagatatacaaccgtatttacaattgacattgctatttaattatggtatattatttgcataaagaagaactccttgagatttgctcataggttctttttttgttataacaggataaataagtaatttattatattttcactaaatttttataaagtttatatgttaagtcttgcaaaagtgttaatttaatgttatcatataaaagtaataatttttatggcgatattggtgaagtggttaacacgcttgtctgtggaacaagtatgcatgagttcgatcctcatatatcgccccaaatggtaatttaactttgtatttgatacaaagtttttattataaaatagttatcgaacaaatgtacttttattacttgatttaataaaataaatatgatatattaagaatgtagttaaaaagtatccttaataaggaggtaatgtatggattttttaaataaagatgataataatataattatttgtaagccaaatgttaaagactatttattgaaaaaattagaacaagaaaatgaattttttaacataaagtttatggattttaatgaaataaaagagcatttatattttagttatgattacaacgcgattaaatatttaactaacaaatataattataaatatgatatagctaagatgtatattgataatatttattatgttagtgataaagcttataaaagtaaaaaattaaataaattagtgtcgttaaaatgtgaactagatgaaaataaattattaatttatgatggtgtttttaaaacatatataaaagataaaaaaatatatatttatggttatgattatcttaatgatttagaagaaaaaatagtaagtgaattaaagttattaacaagtgtagttaatattagtaaagaatataaagaatttacacctgatgtatatgaatttagtaaaatacaagatgaagtagaattcgtggcgtttaagataagtgaattattagaaaatggtgtaaatataaataatataaaattatgtaatgtaagtagtgattataatatttatatagaaagaatatttaatctttataaaataccagttgttttaaataataagactaatctttatgctactagaataggtaaatttttcttagaaaatttaaataaagatataaatgttacaatttctttacttgatagttttaaagaaaaagatattgtagataaaataattaatatatgtaataaatatgctatggaagatgattatactttaattaaagatttacttgaatatgatttaaaacatacatatattgataataatttatataagaattatgttgaattaataaatatagatgacattattagtgatttaaattatgtgtttttaatgaattttaacgagggtgaaatacctaaaacaaaaaaagatgaagattatataacagataatataaaaacagaagttaatttaagaaaaactgtagaaattaatacccttgaaaaaatatatactttgaagaatattaaatcaattaagaatttaataataacatataagcttaactttcaaaataaggtgtgttttaaatctaatttacttgaagagttaaattataatttaaaagaatttagtaatgaaaatacaacttattctttgttatctagtaagataaaattaaatgaaaaaatagatgatttaattaaatataataaaaaatcaaatgaacttgatttactttataatagttttaatgataatatgtataatagctatgataataaatttacaggaatagataaaaatgacttttattcttatatcaataataaaaagactttatcatattcttcattatctaactataatgaatgttcttttagatttttaatggctaatgttttaaatttaaatccatatgaagaaacatttttaactattgtgggaaatatgtatcatcatatcttagaaataggattattaaatgaaattgatgttgataaagaaattgaactttttttatcaggaaaagaatttaccaataaagaaaagtttttcttaaaaaaattaacagaagatttaaaattcactttagaagaaataagaaagcaagcaaaaaatatatcattagataattatttatttgaaaaggaaattaaaatagaaaaaggaaataatttaagtataacttttaaaggatttgttgataagattatttataaagaagaacaaggtaaaaaaatagcagttttaattgattataaaacaggaaatactgatatagatttaggatatataaaatatggaattaaacttcaattaccggtttatttatatttagtaaatgaagagttaaaagatgtttcttttgcaggattttatttacaaaaattaataaataaagataacaaagatttaaaacttgaaggttattcaaatagcaatgttcatattttaagtatgtttgataaatcatatgaaaatagtaatttagtaaaagggttgaaagttaaacaagatggaagtttttataaatcatcaaaagtattaaatgataatgaaataaataaaataatagaacttacaaatgaaagtatcaataattcaattaagaatattgaagatgctaaatttagcataagtcctaaaaaaagtgatgattttaattcatgtgtttattgcccttttaatgatttatgttttaaaacaaataatgattatatagaaatagaaaaagatttatcttttttagagggagaaagttatgagtaagtggacaaatgagcaacttttagcaattaatagtgaaggtaaaaatataatagtgtctgctggagcaggaagtggtaaaacagcggtattgtcagaaagagttttaagaaaaattaatgataacgtacctattaacaaacttttaatattaacttttacaaatgaagcagcaaaagaaatgaaagatcgaattagaaaaaaattaataaatgagaaaaaaagtgatcaattaaacttacttgaagaatcatatataactacttttgatagttatagtttatccattgtaaaaaaatatcattatttacttaatgtaagtaaagatataaaaataattgatgatacaattatttctaatttaaaagataaatttatcgatgaaatatttgaagaactttataaaaatgaagatgagaattttttaaagttaattaatgatttttgtttaaaagatgatagaaatataaaagaaatgattttaaatatttctaaaaaaatagatttaaaaatagataaagaattatatttaagaaattatataaatgaattttataatgatgaaaatgttgaaaagttatatttagaatataaaaaactaatagataaaaaattatctaatataagctatttacttgatttatttagtaattattctgatagtgattattatgaaaaagtatataatttagtatatccactaattaattctaagacttatgaagaatataatttgtataaaaatataactcttccaaggacaacaaaattagatgaagatgctaaaaaggttaaagaagagttaaataaagaaataaaatctttagttagtattattatttatgatgatgaaaaaagtgctaaagaaagtatatatttaacaaaaccatatgttgatataattataaaaatcataagtttacttgatgaaaaactaaataattataaattttctaaagatgtttatgagtttacagatattagtaagatggctataaaagtagttaaggataatgatgatgtaagacaagaattaaaagaattttataatgaaataatgattgatgaataccaagatacaaacgatttacaagaagagtttattagtttaatagaaaataataatgtttatatggttggggatataaaacaatcaatataccgttttaggaatgctaatcctttaatattcaaaaataaatatgatttgtatagtaataatatttctggtatgaaaatagatttacttaagaattttagatcaagaagtgaagtcttaaataatataaatttactttttgattatgttatggatgactttttaggaggagcagattatataagatctcatcgtatggtttttggtaatacttcttataatgaagagggtaaaactgctaatgactataaccttgaattatataactataatgaattaaaggattattctaaagaagaaattgaagcttttattatagcaaacgatataaaaaataaaatagaaaataattatcaagtatttgataaagatagtaaggtattaaaaaatatttcttatagtgatatatgtattattatggatcgtggtacggcatttgaaacttacaagaaaatatttgaaagcatgggtattcctttatcaatttatgctgattttaaacttaataatgaatatgatattattactttagaaaatatattaaggattattataaaaataaaaaataaagaatacgacaaagaatttatttatctttatacaagtatcgaaagaagttttgtatgtgatagtttagatgaagaaatatttaagaatatcaaagataataatatatataaaactactacatatgaaaaagctaaaactatcgccgaaactttagatttaagttctccaagcaaagttttaaatgaaataattaatacttttaatatatatgaaaaaatccttactttaacagatattgataaaattttaataagaatagataatctaataaatatggcttgtactttagaaagtattgggtataatgtttatgattttagtgaatatttaaaagaagttagaaataaaaaagcagaaataaaatatagtgaagctaaaaacacttctaacagtgttaaaataatgaatattcataaaagcaaaggacttgaatttaatatatgttatttttctggattatataaagagtttaatataagtgatattaaagataagtttttattttcaagttatggaataacaactccatattataaagatgaagaaaaagaaacatttataaagtttttaataaaagaaaagtatatggaagaggaaataagtgaaaaaataagattgttttatgtcgccttaacaaggtgtaaggaaaaaatgattatggtatgtccactagaagataaagaaaatacacttattgataaagtacttgataataatattagattaaaatataaatcttttaaagatattttagaaagtataaaatataatttaaattcatatataaaatatattaatttagatgatatttatataagtaaagaatataaattaaataaacaaaagacatatgaaaattatataaacaaaaataatgaaaaaataattgttaaagaaaataatattgaaaatgttattacagaaaaaaaacatgcttcaaaaacaattaataaaataataacaaaagaagaatttaataatatgaaatatggtacaaaaatgcattatattttagaaacaacatcatttaatgaaacaagtgaaaaaatagttaataatttattaaaaagtttaaatgttgatggtgctaaaatttataaagaacatgaatttgtatatgaaaaagaagatgttatatatcatggtataatagatttaatgttagagtataaagatcatatcaaaataattgattataaacttaaaaatattaatgataaagaatatttaaagcaacttaatgtttataaagattatattttaagtaaaaaaaatatacctgtaaaaacttacttatactcaataatagatgaaaaactatatgaaataaatatatagtttttttctttttgttaataataaatatgaggtgtttatttatgaatataagtcatatttattatgaaaaagatgttgataaatattatttaggaaaatatttacttgaaaaatataaagatattccaaaaacagttatagaaaatcataataatataaaagagttaagagaaaaagaaaacaaagattttcctattttaaaaacatatttaataataggagttagaaaaacacaaaattttgtacctaattataaagtttctaattatcttgttccatatacttcaagtggatgtggtgcaatctgtttatattgttatttggtatgtaattttaataaatgttcttatttaagggtttttgttaatagagaacaacttttagaaaagataataaaacatagtttaaaaagtgaggaagaaaaagtttatgaaataggtagtaatagtgatttagtttatgaaaatatgattactaataatttaaaatggactattgaagaatttggaaaaataaataaaggatatcttacttttcctacaaaatttcatcaagtagacgatattataggaataaaacataatggaagaacaataattagagtaagtgttaatcctaaagaaataataaataatattgaattaaaaacatcacctttggaaaaaagaattgatgcaattaataaattatgtgctgataattataaagttggtatcttaattgctcctgttattatggtagataactataaaaaattgtatgaagaactttttattactttaaaagaaaaactaagtaacaaagtaaaaaaagaagttttttttgaagttatatttatgacatatagttatg

SEQ ID NO: 1489 - DNA, 16809 bp, synthetic construct
  source 1..16809: mol_type = other DNA
  misc_feature 1..16809: note = Synthetic
ttcaaaaaaagctaaaaaaatgttaacttattgtattgatgaaggaattgatgaattaagtattgtattaccaataattgatcaaattataatgattctaaccgcaacatttaatactgatgttaaagaagaaacaatgttagtaattgtaaataatattaaaaacaaaaacgtttcaagattagtaaaagagtttacgataattaaaaatgaacgtgatgagtttgaacaaaagaaaaaagatgaaaatgaagtaattactaaaaaacctcaaaaagaaaaaaatgctaaagatagttatcgcgaatatttagaattaagtaaatatactgaatcagataatgatgaataaagacgttttaagactttgtataatatacaaggtcttttttaaataaaaagcaaataggtttataagcaatccaatttgataaaagcagaaaatatggtatattataaatatatttgtgaaaggagataacctaaatggcatttattgaattaaatgatatatgtaaagattatggtacaaaagaaacaaaaataactgctttaaatcacatatcttttacactagaaaaaaatgaattggttgtaattcttggcgcaagtggagctggaaaatcaacgttactaaatatattgggtggtatggattttgccacgagtggatcatatcgagtaaatggaagagaaattacgactcttaacgaaaaagaaatggcattgtttagaagaaataatgttggatttgtttttcaattttataatttgatgcctaatttaaccgctcttgaaaatgttatgttatcatcaaaccatgttagcaattcaattaatcctcaaacagcattagaaatggtaggactaaaagatagaattaataacttcccttcaaacctaagtggtggtgaacaacaaagggtatctatagctagagcgattgctaaaaagcctgagattttactttgtgatgaaccaaccggagctttagattctaaaacgggacgtatgattttagaacttttacaaaatacttgtcatacttctcatatgactactataataattactcataatgctattattagtgaaattgccgacaaagtaattaaagtaaaaaatggtcaaattgaagatgtaactatcaataaaaaaccaaaattagtaaaggaaatcaattggtaatgttactatataagaatagtgtcaaaaaaattattaaatcaataggaagattcttgtcacttatttttatcgtggccttgggtagtgccttcttctctggagttagagaaacatcttctgatatgatcaaaactatggataattattatgatgattatgctcttatggattttagaatagttagtactatgggtcttacggataatgatgtaaaatccttacaaacacttaataattctttaaaagttgttcctagttattcttatgaaactttaataaatggtgaaagcactaaaatttattcttatcaagataatatcaataaagtaaatttaatctctggaaaaatgcctactaaaaatggagaaattttagtagaaaacggaacttatcaaataggagacataataaccttagaaccaggttatgaagattatttgaaaacaaatacttatactgttgtaggaactataacaagtcctttatatatctatgataacaaaggaatttccaccatgggagatggcaaactagatacctttatgtatgtacttccttctaatttcaacatggactattataccgaaatatatttaaccgctaaagatagtctatcaaaaacatcatatgaaaaagactatttagaaactatagaattgctagaaaaagaattaaaagaattaaaaccaataagagaaacagcccgttatgaagaaataaaagaagaagccatgatcgaaatttatgatgctgaagaaaaactacaagaagaaactgaaactaatggtaaaaaattagaagaagctaaaaacaccttagataaaacagaaacagaattaaatcaagccgaagctgactattactctggtttaaatactttaaatcaaactaaagaaactacagaaacaaaattagcaaatagtaatcaagaattagccaaaagtaaagctatatttaaaagctccttaaaaaattatggtatagaagaagatgaaataaatacaaccttatcatcattaaactcacagattcaatctttagaaaagcaacttgaaaatatagatccttcttctaaagaatacgaagaaatagaaagtaatataaataatcttaaaacattttataataacttagaaaaattaaaggaaaccaaagagactctagatgaaaaaactaaagaattagaagaagcaagttctacttgggaaaatacttatactgaaaaattaaatgatttaaataatgcttatacagaaatagaaagtggaaaacaaagtttaaaaaaaggtcaagaagaatatcaaaaaaattatgctacctatcaagaagaaataaaaaaagctaatgaaaaaataactaaagctaaagaagatttagaaaatttagaaaaaccggagtggtatcttttaactagagaagacaacagtggttacacaactttctatgaagctgcgactaaaatagactctattgccagtgtctttccgattttcttcattattgttgcctttctaatgggtatgaatactatgactagaatgattgaagaagaacgttctgaaataggattgttcacttctttaggaataagtaaagctaaaatcatcactagttatataacctatgtattaattgctacctttattggtttagtaattggacttttaataggatattatatcgtacctcatgctttatttggagtttacacagcatcatttactatacctgatttaatcacatactttaactttaatgctagtactttaatagtatcagtagccattataactatggttctagtaacttatattactgtaaatcgcaactttaaaaataatccagccgaacttttaagaccagaagctcctaaaaaaggaactaaagttttattagaacgtttaccaggtctttggaaaaaactatctttcacttggaaagtaacaattagaaacatgttcagatacaaaaaaagaattattatgactattgttggtataactggttgtacggctttattacttactggttttggtattaaagatagcataaattctttacttgaaaaacaatttgaagatattataacttatgattctatcttattactaaatgaagaaataaatagtcctagtaacaatataactaaagtattaactgataacaacattgattcttatcgctatatgcatatggaaagctataccttttcggcagacaataaaactctagatacttatgtcatggcttttgaaaattctaatatagataaatttttaaatttaaaagatttaagtggtaataaaattactttatcagatgatggtgttgtaataactgagaaaatggctgatcttctaggagtaaaaataggagacaccataaatattagaaataatcaaaatgaacttttcatcttaaaagtagaaaatatctgtcaaaattatgtcaatcattatatttatatgactgatacctattataatgaggcaattaaagatatatcttataatgcaattatgactaatatggataataccaacaaggaagaaactggcacaaacttaatcaattctaactattttagtagcatccaatataccgatgatagtaaaaaaatgcttgaagatgttatcaatagtatgaatgatatagtttatttaataataggcttttcaaccttcttagctattacggttttatacaatttaaccactatcaatattagtgaaagaagaagagaaattgccaccttaaaagttttaggattctataacaaagaagtttctacttatgtttacagagaaactgttattctaactatatttggtataattctaggagtactaggaggtctaggattaaacttatttgtcttaatggtagcagaaactgatgagatattatttgtaaaagatattcatatcttaagttatgtttacaccttcttaataatgattgcctttactttaatagttcaattcataactagctttattcttagaaaaataaatatgatagattccctaaaatcagttgaataattaaaataatataataaaagcagacaatcaatttgtttgcttttttactaaataaaaatatttattggtcttttttaattactaaaaaatataattaagtgtaagaagaaaggactgataaaatatggatatattaaaagtatcatcaaaatcaaaccctaataaagtagcaggggctttaactaatgtatttagagataaaggagttgttgaaatacaagcaattggagcaggagctttaaatcaagctattaaagctatagcaatcgccagaggttttgtagctccaagtggtaaaaatttggtttgtatcccagcttttagtgatataactatagatggtgaagaaagaaccgcaatcaaattaatagtagaggctagatagtctcttttattttaatttaaaaacatttgacaaaatttttaatactttttataatattaatataaacgttgattggaaaagtaatattaaatagtttttaaagagagttagtggcaggtgtaaactaataaaacctttaatatgaaagaccccaggagtgcttgaagaattaagtagaccaagccggttataccgttatctataaaaagagtgattatagaaatataataaactagggtggtaccgcggattaaacagttattcgtcccttacaaggagataactgttttttatatggaggttaaaatgaaaaatatattcaataacgaacttaatatcaaaaatgttggcgaaactgttactctatatggctgggttcaaaaagtaaggaatctaggaggacttatctttgtagatttaagagatagaagtggtataattcagttagtcataccaccagaaaataaaaattataataaagcattagaattaaaaaatgaatatgtaataaaaaccaaaggtaaaatagcagagcgtactaataaaaatctaaatattccaactggagaaatagaagtagaagtcttagaactagaaatcctaaatacttgcttagaattaccatttgtaattagtaataatcctaataccagtgaagagaccaggttaaaataccgttatttagacataagaagagatgaaataaaaaacaaattaataactagaagtaaagtctgcaatattgttagaaatttttttgaaaataataattttatcgaagttgaaactccaattctttgtaaatcaactcccgaaggtgctcgtgactacttggtgccctctagagttaacaaaggaagtttttacgctcttcctcaatcacctcagatttttaaacaattacttatggtcggaggaatcgaaagatattatcaaatagccagatgttttagagatgaagatttaagagcagaccgtcaaccagaatttacccaaatcgatatggaaatgagttttgcttctgaagatgacataatcactatcaatgaaaatctaattgctaaaatattcaaagaaattaaaggaattgacattaaacttcctctttccagaatgaaatatgatgatgccatcagagattacggtacagataaacctgacttaagatatgatatgaaaataaatgatgtaacagatatttttaccaatactaattttgaactatttaaaagcattattaaaaacaatcaaattattaattgtttagtcgccagagatagtgcttctaaatattctcgtaaagacttagatagactaacagattttgtcaaagatcataaagcaaatggcttattttacttaaaatataatgaagactttactggaagtatagctagtcacttaactctagaagaaaaagaaaatttaaaaaaatcactaaaaattaaagaaaatgacttgattcttatagtagcaggaagttataataatactaaagaggctcttggagctttacgatgcaaattagctacagatttaaatttaattaaagaaaatgattacgctttactttgggtagtagattttccattatttgaatatagtgaagaagaacaaagatatatttccagtcaccatccatttactgctcctcttgatagtgacattgataaactactaactgacaaaggaaattgttattctaaagcctacgacattgttataaatggttacgaagtaggaggaggctctatccgtattcatgatgaacaagttcaagaaaaaatgtttgaagctttagaactaacaaaagaagacatcgaagaaaaatttggtttctttgttaaagctttaaaatatggcactccaccacatggaggacttgcttttggacttgaaagattaataatggtcttaactgaaactaataatgttaaagacgtaattgcttttccaaaaaccactagtgctagctgcttaatgagcgaggctccagataaggtcagtataaatcagttacaagatttaggtatagagatatacaaggaggaaaaagaatgaaaagtcgtaaaaaaaatagtaaattgccaaaatgttcaattttgttaattatattaggatttcttattaacttaattccagtaattttatttgccattttctttattattacgataaataatgaaccaatccataaagatttaattattgaacaagaacctattataagctatgacgaagaaaaaaatgtatataccattacaggatttatccaaaatactagtcatactgattattactatgttgacgttgtatacaaattatatgatgaaaatggcaatgaaatagtaaccattaatgatggttatttagacattggtttaaacgacactatgaaagatttactcgtaaactttctaggagccatagtattttcatgtttaggctatttttacataattagtaatggttctaataagtttatcactcactttatacctcacaaaggtcctagaaaatatttgaaaatagataaagaacaaactaaataatatggtttgtcctttttgtttacgcaaaatgcataaaaaaaatcccacaatatgacaaaatatgatagaattaggtaaaaggaggaaaattatggaaaaaaaatattctataggtttagatctaggaataaataatgtgggatggtctatagtggatatggataaaaaggaaatagaaaaatgtggtgtaagaatgttttctgttagcaaaggagctgaagaaagaagaaattatagaagttctaaaagaacgaaacaaagaaaaaacactagaaaaaaagatatattattattgtttgaaagtataagctttccaaacaccaatacaattgatcccaatttgattgaaaaaagagtaaaaggtttaaaagaaaagatagaaaaacaagatatagtaaatatcctatgttatatggtaactcatagaggctatattccatttggagatgatgatgtagaattcattgacttaaaaggacaatatccatgtgaatattattataacttatatacggagtcaataaataatcaatatagaaatacaagaaaaattgttaaaataaatgacaatttaaaagaaattcaaaagttattagagacacaaagtaaatattacaaagaaatcaatcagaattttattgaacaaataataggaaatgaagaaaaaccaggaatttttaatagaaaaagaaagttctgggaagggcctggttctcctaaagctcttaccgagtttggaagatttaaaactcaaaaagatgttgaagaatatttaaaccaaaaagaaaaaaatcctgaatatgaaaaatatatttttgaagatttaatcaaaaaatgtgatatatacatagaagaaagatgcgcaccaaaattaaatttttatgctgaaaagtttaatttattaaatgatttcattaatataagttttaaaaacattgaagaattgacaaatcaagattgtttttatcaagcaaaaaatggtttatacaaattaaatagacaaggattagagaaagtatttgaatatatttataattctgataaagttatattaaaatcattatttaaaaaaatgtttaatagcgatatagataatttatctggatatagaactgataaaaatttaaaaatggaaataagtacaatgaatggttttagatctgtaaagaatagtttcaaggcaaacaaaggtaatttaaatttaatttatgatatagatacttataacaaaattattaatgctatcactattgccccaggaattgttgaaatcatgagaatgataaaaaacagcaatatagagtttactgaaaatgatgaaaagagtattaaagaaagctacaaaaagcttacagatttaagttaccatagtttatcagaaaaagcattaaaaagagctattgaagatatgcttaaatatcaattaaattttatgcaagtaagtagaaaactagattatagcaaaaaatcaagagaaaattttattcaagaatataaaagaatttctactaatcaaaaactaagtaatattactaataaatttgttgaggatataattgcttctcctcaagtgaagaaaactctaagacaatcaataaaagtaataaacgctataataaatgaaaaaggttattatcctgacaccattgtaatagaatctgccaaagaagctaatggtaagcaaaaaaagctagaattagaaagaattcaaagaaaaaatacagaattaagaaaaaaagctcaaaaacaattagaaaatttagtaccaaataaaattacttctaaaaatattgaaaaagttatgctttatgaagaaatagaaggagaatgtccttattgtggaaatcacttagacattatgcaggtaataaatggtgtaattgaggtagaacatattcttcctaaatctaaaacatttgatgactcatatgaaaacaaaactttagcttgtagtaaatgtaatgctcaaaaaggaaataaaactcctttgcaatggctaaataaaacagaaagaataaagtttgaaaatataattaaaagtaataagaacatctcagaacaaaaaagagctaactttttatatgctgatgatatagataaatatataaaatatgctaataataagttaatagaattatcaaaagatgaggaaattatatatattgatttatacaatatattaaaaaataattcacaggtatttacaagtgttgatagtcattacccaaatatagatggatataaactaataagtagagaaataattgaaaaaatagaaaaaaaagtaataaaaacattaaaagaaatgtaaataaattaaaaatttgttgataaataataaattacttgttataatattaaagcattgaattactatgactattactattagtcatggcggaaggagtgagaatatgagtaaatatcaatcaaactacactgactcaactgttacatgtgcatgtggaaacacattcactactaaatcaacaaaagaaaaaatacatgttgaacaatgttcagaatgtcatcctttctatacaggacaacatttaaagaatacaggtagaagaggtaaggttgaacaatttaacaaaaaatatggatttacagaataagataagcaattatctttttttctttactaatatgatataatatgtatatatgatattaactaaaaattatcaaatttattagacatatttaacaagatagataagtataatagtagtgattactatgttaatagttaatgtcaagaatttatgtgaaatataaaaataaaaatttagaaaaaaatgcaacaataaaagaaaaagaaagaggtaaaaaatgaaaataggaatatgtagtgatcatagaggttataacacaaaaaaagaacttaccaatattttaaaagaaaaaggatatactataattgattatggcacatacaatgatgcttcaacagattatccaatatatgcgtttaaattatgcgaggcaataaaagaaaattatgcggattttggtattgccctttgtggaacaggaataggaatgagtattgcggcaaacaaggtaaaaggaatcaggtgtgctaaaatcgataatttagtagatgctaaatatgcaaaaagacataataatgcaaatgttttagcaatctcagcaaacaaaaaaatagatgatataatagacatgataatcttatttacaaatgaagaagttgacaaagaagagaagtacaaaagaagaaatgatatgataaagaggtatgaggatgagcattaaattttacttgtacatatttattgtaccaattacaatttggactctaatatcaataaatttagaaaaatattttaaaaagggttctataactcaaataaaaatattttacttattacttacattctcaatatcttatttagtagtaaattttttatatgatttttatatagcttcacaaatactaaaataaaagaggggatataatgaagaagatgctgttcataacactattttttttagcagtaccttcttttttcatactaaaaatatataaagaaccagaattgaaaaaagaaataaatataataaataatgaatcagaaatatcttatactgaagataaaacaaaaaaaatgtatattaaagtaaaccaaacttccaaaaacaaaataattaaaattgatttagaagaatatgtaaaaggagtaatagcaggtgaaatgcctgtatcatttaacttagaggcattaaaagcacaagcagtagcagcaagaacatatgcactaagaagaatcaatgaaaataatacatatgatgtagtagatacagtgatgaatcaagtttatttagatgatgatacattaaaaacaaattggggaactaattacaataaatatatagaaaaagtaaaaaaagcacaagaaatgacaaaaggagaatatgtagattataaaggaacttatgcagatactttattcttttcaacaagcacaggaagtacagaaaatagtgaagaaatatttggtacaaaagtagcatatctacaaagcgtttcatcatattgggatgaagaaacttctccagtatataaagaaaaaaatgtatttacaagagataaattttgtaaaaaactaaatattacaggttgcactttaataaatataaatatcctaaatgaaacaacaacaggtagaattaaaaatctaataataaataacaaaaaatttacaggaacagacgtagcatacttattaggaataaaatcaaattattttgatatctacatagaaaatgattctgtagtagtagaaacaaaaggatttggtcatggagtgggaatgagtcaatatggtgcagaaggaatggcaaacaacggatacaattacaaagaaatactagaacactattatcaaggaactacaataaaaaatttatataactgatgtataaaattgtaaaaaatgttcaaactttataatgaggtgagaatatgcaaacaagaaaaaaattaaaaccatttgttataccagttatatatagtatagttacaattactatgttaataagtttaatgtttctaatacagaacttattgaatgtaaataaaaatccactaacgtatattacatctggaacaatagcagaagatatagtcccagttgttagtgaaaagaaaacaattataagaccttatactgatcaggatgtaaaaatagtacaaaatttctatgattataaaggcgaaaaacaaaatcaagaaaactctttgattttttacgaaaacacatatttgcaaaattcaggagttgattatggaaaaggaagtacattcgatgtagtagcaatattagaaggaactgtaataaaagtaaaacaagatgatatacttggtaaaatagttgaaataagacattcaaatgatttaattggttcatatcaatgcttaggtgaaacagaactaaaagaaaatgacacggtatcacaaggccaaaaaataggaacaagtggatcttgtaatatatcaaagaatttaggtgatcatttgcattttgaaataacaagcaaaggtgaagtaataaatcctgaagcaatatatgataaacaattaaatgaaatataggcagtaatgcctttttttgtaataaaaaaatacaacaattatatattttaatagaggtggaaaaatgaattctagaataaatagaagggtaataaatgaagctctatatattttagatacaaaaagtaccataagagaaactgctaaaatatataatgtaagtaaaagtacagtacataaagatttaaatgaaagattatataatatagatataaaactttataataaaataaacgaaatattagaagaacatataaaaacaagacatataaaaggtggtgaatccactagattaaaatatttaaaaaatgcgtaggagatgaagaaatgttttcaaaagagatcggaatagatttaggaacagctaatatattaatatatataaaaggtgaaggaatagtattaaatgaaccatctgtagtagcaatagatgaggatacaaaaaaggtattagcagttgggttagaagcccatgaaatgttaggaagaacaccgggtaaagtaaaagccataaaaccaatgaaagatggtgtaatagcagattttgatttaacagaagcaatgcttaattattttataaaaaaggtaaatggcaaaaacatattaagcaagccaagaatattaatatgttgtccttcaaatataacaacagtagaaaaaaatgcaataaaagaagctgcagaaagaactggtgctaaaagagtatatatagaagaagaaccaaaagtagcagcagtaggagttggattagatatatcaaaaccaagtggatcaatgataatagatataggtggtggaacaactgacgttgctgttttatcccttggttctatagttacctcttcatcagtaaaaatagcagggaacacatttgattcagaaataacaaaatatattaaaaataaatataaactcttaataggagaaagaacagcagaagacttaaagaaaaaaataggaacagtaacaggtggaaataaaaaagaaaaattagaagttaaaggaagagatatggttaatggattaccacatactataacaataactagtgaagaaatagaagaagcactaagagaaagtataaatgaaatagtaagaactataaaacaagtattagaaataaccccaccagaattatctgcagatataataaataaaggaatagttttaactggtggtggctcaatgcttgatggccttgatatcttattaaaaaaagaactaaaagttccagtatttatagcagaaagtccattaacatgtgtagcagaaggtacaggaaaaatgttagaaaacttacatttaattgatgaataaaaagtacttaaacgtacttttttccttgataagaatcccttcttaccatttccttatctatctcattcaaaacacaaaatttttttaacaaccactttggttcaactactaattcctttaaaggatcaccagtaattctatttattacaatatcttctcttaacaactctaactcatcacaaacaatatccacatattcatctctagttaaaacatgaaaacgttctttattgtataaattttcaagcaaagtacccttaataataaataacatatgtattttaatgccctgtatatcgagtttagaaacatatttaatagtttctagcatcatatcctttgtttcaaaaggaagtccatttataacatgaaccactacatcaattcctcttttcctaagttcaaaaactgcttcatcaaattgttttaaagtatgtcctctatttattaacttcgaagtagaatcgtgtatagtttgaagtccaagttcaattaccaaattagttcttttacttaattcttctaaataatctaatatatcactatctaaagcatcacacctagtagcaatattaagaccaattacatttggtaaagacaatattttttcataattttcttttaatatactaagaggagcataagtattagtgtctgcttgaaagtatcctatatacttactatttggccattttttattgacaatatctcttaccttattaaactgttctataatatccatgcccctattatcaccaccaccattataacaatatatacatccactaccattctttttatttggacatccaaaaccagcattcaaagaaactttaaaaaccttagaattatatttttttttataataataattaagagtgtaatatctcttattatcaagcgtatatttaaacatacatctcaccattcaaattatatcattaatacataaaaaaaataaacaagtttatgtaaagaatgttcatgtacatttacataaaataactaacatgctataattatcataaggagggattttatgaaatacaatataagaggtgacaaaatattagtaacagacgcaattaaagattatatcacagaaaaaattgataaacttaataaatattttgatgaaccagatgaaataacagcaaatatattaattaaggtaaaaggttataatcaaacaatagaagttacaattccaactacaagttttacaataagaaatgaagaatctgctgaagatttatatgcagcaatcgattcagttgtagacaaaattgaaaggcaaataagaaaaaataaaacaaaaataaataaaatttcaaagaatgcattaaaaaaattaaacttaatgtatcaagaagaagaaaaagaagaagatactaaaatagtaagaagaaaaacacttaacactaaaccaatgagcgaagaagaagcgatacttcaaatggaaatgctaggacatgatttcttcatatttaaagatagtaatacttctaacatatgtattctttataaaagaaaagataataactatggagttatagaaactgaatagaaatagtttaactatttctttttttttgatacaatataaattgaggtggtttaaatgaatatattaagaagcttatttgatcatgaatataaagaactaaagaaatttagaagcattgcagataaaatagaattactaaaagatgaatattccaatttaagtgatggggatttaaaaaacaaaacaacaatatttaaagaaagattaaatgcaggagaaacactagaagatatattagtagaagcatttgctactgcaagagaagcagcaaaaagaacaattggagaatacccattttatgttcaattattaggtggtatagcaattcattatggtaatatagcagagatgaaaacaggagaaggaaaaactttaacaacagtacttccagcatacttaaattcattaacaggaaaaggtgtgcatgtaataacagttaacgaatatctaactttaagaaatgctgaatggatgggaaaagtatttgaatttttaggagtaacagttggagttaatttaagagaactaacaccttcagaaaagaaaaaagaatatgataaggatatattatatacaacaaataatgaacttggttttgattacttaagagacaatatggtagtaaaaaaagaaaatagagttcaaagaggactaaattttgctattctagatgaagttgactcaatattaatagatgaagcaagaacaccacttataatatctggtggtcatatggaatcaaaaaacttatacaatagtgctgacatatttgtaaaaacactaattaaggaacaagattatacaatagatgaaaaaacaaaatcagtaagtttatcagaagaaggtagtgataaagcatgtaaatactttaaattagataatctatacgatatatctaatactgctttagttcatcatatagatcaagctctaaaagcaaattatgctatgcaaagggatgtagattatgtcgtacaagataacgaggtaataatagtagatcaatttacaggaagattaatgaagggaagagcattttcagaaggacttcatcaagcaatagaagcaaaagaaggagttaaaatacaagatgaaacaaaaacactggcaacaataactttccaaaacttatttagaatgtacaacaaattatctggtatgacaggtacagctaaaacagaagaagaagaatttaggaacatatacaatatgtttgtaattcaaataccaacaaatagagaagtaataagagaagatttagctgacttggtattcgcaaccaaaaaagcaaaatttaatgcaatagtagacgaaatagaaaaaaggcacaaaatgggacaaccaatattagtaggtacaattgcaatagaaacaagtgaattagtaagtaaaatgttagataaaaaaggtattaaacatgaagtattaaatgcgaagaatcatgcgagagaagcagaaataatagcaaaagccggcgaaaaaaattcagtaacaattgcaacaaatatggcaggacgtggaactgatataaagttaggtgatggagttagagaactaggaggactttgtgtaataggtacagagcgccatgaatcaagacgtattgacaatcagttaagaggacgtgctggacgtca

SEQ ID NO: 1490 - DNA, 16602 bp, synthetic construct
  misc_feature 1..16602: note = Synthetic
  source 1..16602: mol_type = other DNA
tcagaacgtcgtgagacagttcggtccctatccgtcgtgggcgtaggaaaattgagaggagttgttcttagtacgagaggaccagaatgaacatacctctggtgtatctgttgtcacgccagtggcagtgcagagtagctatgtatggaaaggataaacgctgaaagcatctaagcgtgaagcctccctcaagatgagttttcccattgtttacaagtaagatcccagaaagactatctggttgataggtcagaggtggaagcatagtgatatgttgagctgactgatactaatagatcgaggatttaaccctaattgatattaatggttatatattttgattttatacattatcttagttttcagagaattatttctctaaattttatttcattagtgacgatagcaaagagggtacacctagtcccatcccgaacctagaagttaagctctttaacgctgaagatagtataatgctaaaataggtagtcgctaatgattttttttatgcaaaaatgtcaataatatttgactttatatatattattgtgttatatttaattcataaatttagtgttgatggaaacataatagttttgtaaatggtaatttagaaaattcatggttgatgaaaatgaatcaagtttataaaatgaaatacaattcttgaactaaatcgttactcgcgttaagagaaaaaggtaatattaatattataaagtagaatggtaccacgaaaagttcgtttctatatttataatattttttttgaaaggaaggaattttttatgaatttatatgaagatttaatgtatcgtggacttattaaggattttagcgatccagagttaaaggataaattaaataatgagaaactaacattttatattggaacagatcctactgctgattcaatgcatattggacattttagttcgtttttaatcgcatcaagacttgctaaatatggtcatcatcctattcttttaattggtggtgctactggtttaatcggtgatccaaagccaagtaaagagcgtccaatgatatctaaagaacaagttttaaaaaatgttgatggcttaacaaaacaagctaaagaaatatttggttttgatgttgttaataattatgattggtctaaagatattaactttttagatttctttagagaatatggaaagtacataaatgttaattatatgttagataaagatataataaaaagaagattagatgagggaattacatattgtgaattttcttatatgttgatgcaagcaatggattttgtccatttatatcaagataaaggggtaactcttcaagtagcaggctctgatcaatggggtaacataacaacaggtattgaacttgcacgtaaaaagttagatactaaattatatggttttactatgccattaattgtggattcaaatggtgttaaatttggtaaaactgaaggcaatgctttatggctagatgaaagtaaaacttcttcttatgaattataccaatatttaattaatactgatgataaaatggttattgattatttaaaaaaattaacatttttaactaaagaagaaattgaacaaatagaaatagaccatcttaaagccccagaaaagcgtctagcacaagaaaaacttgctgaagaggttattacattccttcatggtaaaacttcgtttgacaaggcaaaacatatctctaaagtcctattctcaggtaatgttaatgaacttagtgatgatgagatagaagatgcgtttaaacaatttgataaattaaaattagaaaatataccattaattgatttattagtttctaattctgtagcatcatctaaaagagaagcaagagaatttattaaaaacaacgcaattacattaaatggtgaagttattaatgatgaaaattatattattgataatgatagaaaatataacataataagaaggggaaagaaaaaatattatatatttgaaaaataaataaaaaatagatttcaaatttaattttgaagtctatttttttaattattacttaatctgtttataataagtgcaattacaataagaatataaccaactaaagatatataaatattaaaattaaatattggtgtaattcttaagattaaaattgatacggatgttcctataattgatgctacaacaattgatataatattaactaaattatcttttctattaaacagtatttcacttccatattttattatataaataatggcacatgatataaataagtttgtaagaagtgaaaatataaaattaggattctttccaaaaattggaagttcaaatagtccccatattataatgggtatgtttaacgtactaatatcattaaataaatggttattatttgttgaataaataaaattagttactttgtttattggaaaaaattcatatatataattaataaatatacctgctgctaaaatgaatataattccaaatataagaaaaaacaaatacatatatttacccctttcatatattattcttataataattataacttaaattagttaaaagttcaaataaattattgtataaatgtcaaatttcaattatactaatagtataagatataagtgaaaggacttgattttttatgcaagaaaatgaatatagtattataaatcgttatggagataattttacttcaaaaacatatataactaatccagcgataggaagagaagaagaattaaaaaaattaatattagttttattaacaccagataaatctgctatattaactggtaaacctggtattggtaaaactgctatagtagaaggacttgcatataaaatacaaaaagaagaagtccctgatgctttaaaaggttatgaaattgtaaaaatagatacacaggctttagtaggtacagttaaagatactggtgatacaagagttcaagctttaattgatgaaattaaaacaaaagaaaagtttattttatttgttgatgaaatccatactttaattaattctaatagtgataatgcccttgattttgcaaatatgtttaaaacaggtttaggtcgtggtgatattaaagtaattggggcaacaacatcaaatgaatatgaaagatatatattaaaagataaagcgtttgtaagaagatttactaaaatagaagttgaagaaccagatagagaaatgactataaaaatccttatgggtactctgcctaaaatagaaaaaaatatgaatgctaaattagcatacacaagttttattcaagaaaaaataatgacttttattgttgatattacaaaagaatttaatagagtttatgaaacagaaggtagatatcctgatatagcattaactcttcttacacaagcattttctgaggctgtttttgataataaacaaatagtaacaattgaacatatagaaaaagctataaaaaatagtactgctatatatcctgatgttataaataaaggtattgtaagtttaagagaagaatttaaagatttatttaaacaagaagaagacttaagaaaggattttttaagaaatgaataaattaaatagtattatatatcgtttaagaaacgttttatttcttctttttatggtaggacttataagattaatacccaatattaaagaattagaatttattggaacaatatttatcatatttgtatttatttattttttacttgatttatatttttatggttgtaaaagtaaagagttaaataataataaatttcaaaatatattagttatctttttatatgtttatgtttttattgtttctcaaagatatattaactcaattaatgattttacgtatgaagtagataatatgtattatttaataaattatataataatatctttagctttaatatgtataagtattaataattttatattactttcaataaaaaaatagttttttaactattttttttatacatatttatatattcatcatataattctttaaatctagtaaagtgaacaatttctctttgtcttaaaaataaaagtggagcaataacatcaggatcgtttgttaagttaattaagttttcatatgtagcacgagctttttgttctgctgccatatcttcagacaaatctgcaataggatctcctgtagtagcgaaatagcttacagtaaaaggtacaccattagcatctgttggatataacgcttttttatgttctgcataatgagtatcaagtccagcttgttttaattcttcaatagtagcatctttcattaattgataaagcattgtagaaatcatttcaacatggcctagttcttcagttccaatatctgttaaaagggcttttcctttatctgtgggcattgtatatctttggtttaaatatctaagagctgctgcaagttctccattagcaccaccatattgagtaataatggttttggccatttttaaatcttttctttttatattaacaggatattgtaattttttttcgtatttccacattacttattcacctcccaaggaaaagatgagtcccaattccatggtgctttgtttagtgtttcactatatgttgtaatagcaccatattttgtttcataattttttttagcagtttcatattcttttaaatatttatctcttaaattaagcatattagtatcatttgggtagatatctaaatataaatttaagtcaactaagttaaaatcatatatttgaagtaataacatcatataatctttttcattgttagggtttaattcgtatggtttataatttttataaggatcatataagttatcaaatatattaccacgtataaatcctttatatggatctatattattatttacattattattagagtaattataattattaaaatcataatcataatagttattcataatatttttcctccccatattaggttatgtttatcattttttattgaatgggttaataactataaataataaaaatgtgtattatttttatttattggaatagaatatttagcagatgatgtgtctgatttgacatttgtgttagattgtggtatattatttgcaacggaattgaccaacgatgtggtgaaagcattagctgatgtactacgattttggtcaattctttttatattcgttatgtcatataacgtttttttattgtcactttttgcaatattcactaaacccttaaatagattgtctccaactttaaacattgtttcataataatcccaaccttctttggcaaatggatgtctaccatcatcaggtttactatatttgtaattagatattaataataaattgtctaattcagtagatgctttcatttttgaacttttggttgtagttggtaattgatttttaggatgtgtatattcatttgctgtctttgaagtaactttaatattttcattgttcatatcaataccattttctctaaaattatccaaaatatatttttttgctattttattttgttctgataaacttttcccttcaaatatgttttggtcagtgtccacctcaacatacttattaccattactatcttgttgaatactaaactttttatctttaagattacttatattactataataagctccttcccacattaatttcttaaataaaaacttaaaaaactggaaaaaattactaaaaattaaaatcgtatgttataatgaaattaactgattgttatttgaatgtaattgggaggtaaattatggcaaaaaattatagtgttggaatcgatatgggagtcaataatgttgggtggtctatcttaaataatgacacaaaacaaattgaagattatggagttaggctttttcctgtttcaaatgatgcaaaagatagaagagaagctagaaatacaagaagaagattaaaaagaagggaaacaagacttgatgatactttaaatttattgaaaaaatatggttttaatgaagagaatacagttgatgaaaatttaattgaaaaaagagtaaaaggattaaatgaaaaacttgagaaacaagatatagttaatatactttgttatatgactgtgcatagaggttatattccgtttggagatgaaaaagttacgttaattgatttaagcggtaaatacccttgtgagttttattatgaaatgtataaagatagtggtaaatatagagctagaaatcaaaccgtaaaaattactgataatgttaaagaaataaaaaaattattagaaacacaatctaagtattatggtaatataactaagagttttattgatgattatgttaacatttttacaagaaaaagaaaatattgggaaggtcctggatcagtagatgatttaacaccctttggtagatttaaaactgaagaagatgttgaaaaatatttagaagaaaagaaaaataaccctagttatgaaaaatatatttatgaagatttaataaaaaaatgtgattatgaaataggggaaagatgttgttgtaaattaaatatttactatgaattatttaatatgtatcaagatttcgttaatgtttcgtttaaaaatattgatgaattagaaaataaagagtgtttttatgaggcaaaaaatggactatataaattaaataaaaaaggacttcttatggtaaaagattactgtatgaataattttaatttaaaatatacagatatttttaaaaagttatttaattctgataaggataatatttctggttatagaattgataagaaacataaaccagagtttagtacattaaatagttatagaaaaataatgtctgaatttacaaataggggttttaatacaaattggataaatgattataattgttataatgaaataatggaaaaaatgactttaacaccaggtggtgtggagtttataaaagaaatagaaaataataaactaattccttataaatttagtgaagaagaaaagactttatttaaagaattaaaagagtattttaataaaaatacattactatcttatggctctttatcacaaaaagtacttcaaaaagctattgatgatatgcttgatttagaaaaaaactttatgcaagtaagtagaataaaagattatggaaaagaagcaagagaaaactttattaagcaatataattcaagtggttcagataagttacaaataaatgctagttttgtagatgatattattgcatcaccccaagttaagaagtcattaagacaagcaataaaagttattaatgcaataattgaaaaagagggttgtttgccaaattctatatctattgaatccactaaagaattaaatagcgatgaaaagaaaaaagaaatagaaaaagaccaaaaccttcaagaaaatttaagaaaacaagcttctaattatttatctgttactcttggcgataaaaattgtaatgaatctaaaattttaaaggttatgttgtataatgaaacaaacggacattgtatgtattgtaataaaccacttgatataaataatatactaactgatggtgtacaaattgaacatattttaccaatatcaaaatcttttgatgattcatttaataataaagctatttcttgtaaagattgtaatgctaataagaaaaatatgacaccttatcaatatttaaatagtagtaatcgttatgaagaatttgaaaaaaaggttttagacaataaaaatataagtgatatcaaaaaaaataatttattatataaagatgatttagataaatataaaactagattttttaatagaaatttaagagatactgcttatgctacaaaagaacttattaatcaaatagaaatatttaatgattatttagaatttaaagatgaaaaaagaataaatactttgtctataccaggacaaataacgtctaaaataagaaagaattatgtaaaaaaagatggtaaagaatctcttgaaaaaaatagagatgatggtgttttccatcatgctgttgatgcttcaattgtagtatctgttggtaatacacgtattggtcaagttatgttaaaagcacaaaatgataaagaatattggattaataataaaaatagttatgatgatatacataaatatttaataaacttaagaatagatgatacaatagatcaaatagaaaaaataaacaaagataatactaaaatttctaatcaagtaagtaaaaatctccaagggaaattatttaattctaatatttataagatgataaaaaaagataacgaacaatatataattaatcaaataaataatatttatacatttgattttaaaaaagcagaaaataaaaaattatttgataaattattaaatgaagaaaataatgaatctactttattatgttatgataaggatagaaatacatttaattatattaaaaagatatataatgaatataaaaatgaaaaaggaaatccatttgttaattatctaatagataaaggagaaataacagatgttaaaaattttaattatgatataacaggtataagaatggttactaaaaaaggtaatggtcctattataaagagattaagatattatagtaggaaaaatgatctatgtatgttaaataaaaaaggaataaataagaaaaataatacttatttagcattagatagtttaaagcaacattgtgtaaaagtatatgtagataatgataagaaaaattttgtatttttaccaatatacattatttcattagatcctaaaacaaagaaaataaatgaaaatgacgaattttacaaattattttataataaatacataggtaataaaaatgttactttctttgcagacatttacaatggaaataagttagaaataacaaaaaaagatggaacagtggtaaatgggtattattctacttttgataaaaccaacaataaattaattttgaataatagtagtacttttactcaaagtgataaaaaagtatcaattattcatactgatattttaggaaatgagaaaaaaaggttgacaaaagaattataaaagaggtatatttaatatgtaacaagtagtttgtttctcaaattggaattatttgttgcatatttctcaaattatacagggtttcctattataactcattatgaggaacccaaaagataccttcgggtatcttttttgtataattatggcttttagatctatattaataaacaaagcaactaaaataaatttagatttgaataatatggttgtatattatgaacaacaaaaatactttataaatttagatgaaataaatttaattgtaattgaagatccgagatgtttagtatcattaaaattattaactaaaattggttcaagtggaataactttagtttttgttgatgaatcacatatgcctgtctgtgcgatggaaactttatttaataatgcaaggtcagcaaaaagatataggcaacagattaattgggatataagtggtattaattatttatggacaagtattatacgaacaaaaataatattacaaaaaaataatttaataagaaatagtaagttagaaaaaataaatataattgatgaatatataaatacgatacaagaaagtgataaaacgaatagagaaggattagctagtagaacatattttaaagagttttttggaaatgaatttaaaaggtttagtgaagatatgatcaacttttctttaaattatatttaccaaataatcagagcaaaaatcgcccaagaaatagtgaaaagtggttataatccttgtttaggaattaatcataaaagtgaatataattcttttaatttagcagacgattttattgaagtttatagacctattgtggattattacacttatgaaataataaagggtgataatagttcatatttaacaccatcattaaaagaaagattaattaatatagtaaataaacaaataatttataatggtcaaaaaatgaaattacattattcaataacattattcgttcaaaatatgtttaattttttagaaacaggagatgttagtaagttgatatttccagaacttggagaatgaaagtaagtaattataaacaaatgagattaatattaatttatgatttgccagtggaagatgagttagatagaaaaatttatgctaaatttcataaaaaacttcaaaaaataggttatcatatgcttcagtattcagtttatacaaaggtgattgtaaatgatgataattataaacaagtaaaaaaacaaacagaagatattataccaagtaaaggtcaaattataatatttaagttaacggaaaaacaatatcaagatatgatttatttaaggggtgaacaaaatatgtttgatgtgatagtaggaaacaatgatttggttgtttttagagaagtagaaaatgaaggaacttaagtttgaaatagataatcatataaataatatattaattcaaaaaaataataatattatttataaagataaaatgaaaattttagagttttatagtgttttacaagaaggaataaataaaaataaagatgtttttatatcgaataacaaattaaataataaagaatattttttaattaatttaatggatataacatctattatagaaaatattaaatataataaaggaagtttattatatgaatatattaacttaattgttaataataaagaagaatatttaaataaaatagagaatattgttgataacttaatgcatgatataaattctagtgttgattttgacatttcatgggaatttaataacagtttgtctaaaatattaacatctttaactgatataaatgttaatataaaaataaaagaattaaatactattgtaaataatttattagattgtgttgtaaagtacaattctaataaaatatatattatatttattgataatggtttaattaatataaatcttaataatgataacctatatatttttaatattaatagtaatgttgaaaatataaatgattataatttattatttttagataattattatgaatttaatttaaatgttttattagataatattaaattaaattggaataaagaatataatgataattatatattagatttattaaaagattttataaatatatatttaaaatatgataatatttttatatcaaataatgatataaaacagttaaaaaatatattttataaactatataatatacaaaataattcaaattctatagaaattttataattagtatgttattatatttataggttttaggatcctgtataatttgagagatatacaacttatattaacaatggaaaacactatttcttattggaggaattgtaatggataaagaaaaattgtttaaagatcttcgttggacgacatatcaaccagtacaagtattaaatattgaggtacagccgactgaagatgacaagagaaaggttgaagaatttagaagatttattgatgaaacaatagaaaacgaaaaaatgaaagacactaaattaataaaatagttttagaatcctgtataattgagaaataatgtaaatttttgttatggcactaataacatttaatactttttattgaaaatatttatttttattaaaacttattatattaactcttgcaaaagtattaatttaatgttatcatataaaagtaataatttttatggcgatattggtgaagtggttaacacgcttgtctgtggaacaagtatgcatgagttcgatcctcatatatcgccccattgtgaaatgtgctcgaacttttcgagtttgataaatgctaatccaaattggattagtttttttgttaataaaacttattttactctaaaaaaggatggaaacgatagtaaatactattaaagaagaacaagaagattatttaaaaataaatattatgtttttctaattaaggaattgacaaatcaaaacaaagtgatattataaataaccaatgaaagaggtattctctataaacagaagtacatctataataaaatatacacaaacaaaattttataatattgaatattgtgaggagccagtagtatttagactttgttaaatactatttgtttctctttttttagtaaaaggagttgaatttttatgaataacgaaaagaaagttggtaacaatatgcttacaataaattggaagcaaatatatgaatttaatttaaatgataataaacaatggattttaatactttatgatatatcacaaaatcattatgttggagtacctgtttataatgaagaaaaagaaaatagtatttatttaaaatctattaacaaatatgttgtgttagatgaaataacggattataatcgttctaatattaaaaggtgtgtttatattaaaggtaaaccgattaaaataactaataaagaatttgatgatattttattaaaatccaaaataagttttttaagctatgtcaaagataatacaaataatgatccaaatggcatatcatataataagtggtgtaaagataaattagaacttataaataaaaatactaatgatactgctaatttaaaagttggagcaatatattgggtagatttaggatataatattggtagcgaattaagaaagttaagacctgcaatattgtggcgaagtgcatcaaataaaaaaatgtggactgctataccacttacttcaaaacataaagatgataattattattttcattatgatttaatagataaaaaattaggaactgctagattagaaaatttaattaatattagttcaaatagaattagagaaccatattatattaacaataagatagcaacaattactaaaaaagataatgacgctatattaaaaataataaagaaatattatgcttttgaagaaacaaaagaaacaaatagaactattagaaaacaaaaaactatttataataagtctaaagaaaatcgtgaaaaagtgttgacttaaccgtttaaaatggtataattaaagtactttagattgttgcaggtgtatttatacacttggtagaagtatttcaaaaggaagattttatctcttccttttgctttatatatatttattcaatataaaactgactataaattagtcagttttttttacttctattgaactacgaattcgatagcattaccatcagtccaaaaatctgcattatactcaacggttatcttttgtgcatttttaggaacttcatataatacataacctacagctttctttccttttccaagtgttgctgataagtctttatatttatcacttccatacatatatgaatcaacagctttaccatcagcataggcattaaaactcatactactaacatataattcatcattatcttcattaatgttttcaacttcgaattttaatgcaatgattttattgccatctttaggtcctaaatattcgctataatcagtgacattagtatttacttcagtcatagttattttttcatatttgttttggaatgtttcatttactttaaatgaagtttttccatttatatctttataagagtttttagtatcttcaacagcatcatttactgcatttgaacaaccattaacacatccaatgatacaaccaaatataattacaactataattaaagctttagtccaacctggcattcctaattttccgccacatttaggacatctctttgcactttttgcaatttcttcttggcaatgtttacattttttagtcttcatataaaccttatctcctttcaattttaattatatcataaaaacttcacgcagacgacatattttttgaactttttatgaaataattttacaagaaaggaagtgaggtactttgactagtagatattctaaagagcaattatcactacttgtaagaaaaaatataaagaaatatcgcttaatgagaaagtacacacttcaagaacttgcagatttaactggacttactcatggctatgttagagatttagagtgtttatcaatagacaaaacaccattactagaaacaataggaaaatttgctgatgccttagaaatagatattagacaattatttgatgactctaattagtacaaaactatttcttatttttaaaaatatgttataattaaaatagatttcgtatcattctattgaatgatatttttttgttaggaggaaaattatgacatttatcaaatattttaaaagtgtttataaacaatatggaataataaattttttattagcagtagctacattactttcaataattatagcaattgattattttaatttatttacatttatatatgataaattaaaattacctataatcatttgtatattaagttttattttaataaaaatattttcacttaaactatacagtcttatattattaaaatctgttaattatgtagatttttatagtatgattgtgataattactattgctgtttataaaatttttctttctttatttaagaacattctttcaattaaccaatttaaagatatatgttcaaatatatttttgattataattggggttgtattattatttagatatctatacattactataataaactttaaaacaaataaagaagattgtcccaatgtctttgatttaaaacagttatatgatgatacaattccagaagatgtagaatttattcttattggtgacgaagcagtgagctatgatttgttagaacgaaacaaagtaataaatcaaataactaatactattattaattgtaataataattcaaagtttgtaatgtcattaaaaggaaattggggttctggaaaaacaacaattttaaataatgttaaaaataaattaaaaaataaaaatttagtatttattgatgattttgagccatgggtatataacgataataaatctctgttagttgctttctttgatactataatgaaaaaaactaattgtggctttagaataaatgaaataaataaatttacaaaaacatatctaaaaactatcactaccaatattggatactcggcggatgatttatttgaaaatacaacaaatattaatagaattaaagaaattattaataactatctggaatctaataataaaaaaatagtattagttttggataatctagaaagatgttcaggtgaaaatatactatttattttaaaaaccattcataacttatttgatttcaaaagaatcatctatattctgtcttatgatgaatctgttatgaaaaaacaatttgagtccaaattagagattgattattcttatttagaaaagataacacaattagaattttctgtaccaacattagataaaaatgtattacataatgttattaaaaaatgtttgaataattatttgaaccattcaaaactagaaatcaatgaaaaagaacaagatgaaataattaaaattattatagaaaacattaaagatttacgtgattttaagagaataataaattcaacatttaatgcaagttttaataatatgcaggaccttaatagtctagatatgttgcttatagaaacaattgcaatgaaaaatccacaattatggaatgaaattaatattaatagtacttattatatttcagaagatcgctatgtatatggagatgaatatatttatagtactgaaaaatataatatagatacaacaaaatactttgatgatttatttaaaaataataaatacaatattaataattataaaaaaatgttatgttatttattcccaaatgtaaaaaaatactttgatgagaataaacataggaaaaaagaaaaggttgaatttattcctgaacatcagatatatgtagacaaaaaagaatataggtcttctgtaactgataaaagaatttataataataagtattttaatttgtattttaataaaactgaaaatgagtttattaaaataaatgaaaaaataaacaatttcattttatttataaataataatagttttaaaccagaagaattatatcaagaatattttaaaatggaaagagtatatcctggttgggtagaaaaatatactttagaaacatttcaaatgcatatagatgagataaataaaaataaacttttacctttattattagtcatgtatttttcttattatactatagataattctccattattttttcaattgagtgcaagtggtagaactcaaacaattatagcagatttaattttaatgctatcagatgatgattttgaaaaatttattaatgaaataaaagaagattatcaaaatttatattttattagggaaatagcttattggataaagccagagaatagacgtgatgagttagttaatgattcaagatatgaaactattaataatttatatgaaaaaatgttagatgacattaaaaataataaaataaatatgtatagtactaaatattataatagatataatatgatactattatttgatgatgaaaattatatgtcttttataaggaagaaactaaataagaataatttaatgctatttattttagactgtataagtatatctactggttcatat

SEQ ID NO: 1491 - DNA, 10810 bp, synthetic construct
  misc_feature 1..10810: note = Synthetic
  source 1..10810: mol_type = other DNA
ttaaagatagatgtccaaggtgtggtggagaacttataaagagaaatggaaaatacggagaatttatgggatgctctaattttccaaagtgtaggtatataactaaaataatgtaggaggtaaagatgaaagaatcaagaaaaataaatatcgttttgattttactgtctatagtagttataataacacatattgtatttaatattttaaatgtaacttgttttgattatgaaaatattgcaaccaacttatactgtggaatagtagttgggctagtaactagtacatgtcaatattatgtagcaaaacgacgaataataaatcaaatatataattcttactttgacatatatagacatcattttaatgtgaaaaataaaccgtttttaaaacattacaatgcctgggagttataccaaaaaattgttagtatttttccgacaatatcagattcgcttgatgaatattatggaatgtttaagaaaaaagataaaatctatatgaagatgaatcctattgtaaatttagaaaaagaatttaatgcaaaaaatctaaataaatcagtattcctaccatttaataaaaaatcatttaacaaagtatttaatccgtttattgatgaaatagaaaaaatattaattaacataaatgaaaaaagatttttgcaagataagatacaaatggaaaggctgtttagacaattatgggaataataaaaaaataatatttcttaaatacaaataatgtagaggagaaaaatgaaagaaataatagaacaaatcaaagaaaataaagttaaatgcaaatattgtaaagatgttattgaatcaataagtgttgaagattgcaaaaaatgttgttgcggaaaagtagagatttctggtggtcgtgattacttaaaaagaattggtaataaggatgactatgaagaattatcgtgtattaaaagattagtaaagataaccacaaatgaatttgaaacaatagaaaatgcattaagtaagaaaactattgattatgaaaatattcattgtcctttttgtaatagttcaaatgtatctttagaaaaaggtgatggtgaattaataataggtgatgacataatagcattattatgtcatgaatgtagaaatatatataaatttaaagatgttaaatacagaatataataaaatgaaggtgtttatttcttttgtaaacagaaaattatatgatataattattgatagatgacttatttaactaaaggaggaatattgtgaaagagttggaaaataaaatagtaaaatttgctgaagatagagattggttacaatttaatactccagaaaatttagcaaaatcaatagcaatagaatctggagaattactagaatgttttcaatggaataataactatgataagaatgaattaaaatatgaaatagcagatgttatgaactattgtatactattatgtcaccaaatcggagtagatccaaaacaaataatactggataagatggatgtgactgcaaaaaaatatccaataaataaatgcaaaggcaaaagtacaaaatacaataaattataagaaataaaatggtggtaagttatgctagtatatgaatcaataaaatcaaattttgttaatgatgttgatctaaatcaaattacagataaaattctaaataagtttaaagaagtatttcatagaggtacaagtgaatctgaaataaattcatggcgtgaatcaatgttaagaatgagaggaattttagcagataaagatattcccgatacaactggtgttgcaatagagtttaatattcctcatacttcaaaaagaatagatttcttattatctggctttgataaaaataaaaacaattcaattataattattgaattaaaacaatggacacatgttgatgcagttttaggcaaggatggaattgtttctacagttactggaaaagctctgagagaagttacacatccatcatatcaagcatggagctatgcaagtttaatcaacagttataaccaagatgtatataacagaaatgtgggattgcatccatgtgcttttttacataattatgatttaactgaaggagatccaattaatagtgaacaatacagatgttatatagatgtagcaccgatgttcggttcaaaagattttgaaaaactaagaaattttattaaaaaatacataactgaaggagacaataaagaaggtctatatataattgaaaatggtaagattaaaccatccaaaatgttacaagattctttctcatcggttctaaaaggtaataaagaatttgtattaatagataatcaaaaggttatttatgaagaagctttacgaataggtgttaatagtcacttggaaggtaagaaaaatgtattaatagtagaaggtggacctggaaccggcaaatcagtacttgcaataaatttgttaaaacaatttttaaatagaggtttcaatagtttttatgtaaccaaaaatagtgctccacgtgaagtttttaaagcaaaattaaaaatagataagttgagtggtttaaataacttattcaagggttctggtagcttttatgattgtaaatcaaattcatttgatattttaatagtagatgaagcacacagattaaataaaaaatctggaatgttttcaaatttaggagaaaatcaaataaaagaaataatcaatgctagtaagttttctatattctttatagatgaaaaccaaagagtaactttaaaagacaatggatcaatcgcagaaataacaaaatatgcaaattattatgatgcaggaatatatattatggaattaaaaagtcaatttagatgtgatggctccgatggatatctcgcttggttagataatgttttagaaataagagaaacagcaaattatgatttagatgataagtatgacttcaaagtttttgataatccgaatgaattaagaaaagcaattatagaaaaaaataaaatcaataataaatccagattagtagcaggctattgttggaattggataagtaatggaaaaaataaatcagatatatatgacattgaaataccggaatatgactttggtatgagttggaatttaggaaactcaaaaacatgggcaatagatgaagcatcagtaaacgaagtgggatgtattcatacatgtcagggtttagaatttgactatgtaggggttattattggtgatgatttaagatatgaaaacaatcatatcgttacagattataagaaaagagcaaaaacagatcaatctcttaagggtataaataaaatagcaaaagaagatggttatgaagaagctgaaaaaatagcagatcccataattaaaaacacttatagaacattaatgacaaggggaatgaaagggtgttatgtttattgtacaaataaagaattaaaagagtattttaagaaggtaaaataatatgaaaaatatagaatgcttatttgaaggtatcccccccataaatcataaaaaaaataaagatataaataaagataaactaattataaataaaaaaatgtttagttcagaaagcatttttaaaataatagaacattttaattggaaaataatgcataataacaatgtaagagttaaaattgaagttcaatgttctataataggagatgatgcaacactaatagtttttgaaagtatgttatattatctaattaaaaattacaattttgatattcaatatacatttaaagttaataaaaatttagttggatatgaattatataaattaagtaatttgataaaatatgataataagaaaatagataaattagattttatacagaattacgaaaaaaactttgatataagcatgcatcattataaaaaagtttgtattaatagtaaagaaaataaaaagagtgaatatttaagcttgttatatgatgatatttgtaactttctaaaaaataattatattaatcaaaattattatgaggctcttggagaaacgattgcagaaatcgtgggtaattgtttggagcactcagatacagatactatattggatataaaaataacaagaagctataaagataataatgaatgtaagtttgtaaatgtaacagtaatctcatttacgaaagagaaatttggcgaaaagttaaaacaatttatatttaatgaagaaaaaggttttaattcaagcaatgaaatagtaaagaaagcatataatatacagtgtaaaaagtttaataataattacagcatagataactttttaatggtttcagcatttcaaaaaaatgtaacaacacggaaaaacagtgaaggaagtggaggaaaaggacttacacgtttcatagaaacacttatagatttatcaattgatgacttctgttatgtaatgaatggaaatacaataatttttcttaaaaaaccatttttaaaattgaatgaagatggcactattggatttaatacagagaataattatattgaaaatttgccaaactcacaaactgtggttaatagtaataaatgctttaatggaacgatccataatttatcatttatattagaaggaggacaaaatgaataagataaatttagaattcgataaacaactgacaagattggcaggtaatcttttcggagaagagatatataataatcaagttaaaaaaaatattaaatggaatgaaaaaaatgaaatcattttccctaatcaaatagataggattgcaatttcatttattcaaggttttgcgaaggaaatattaaaaaaaatagataaaaatgaagtggagaatgtaatagtatttaaagctagtactaaagaactagagaaaaaaatactagataatatgttgttttaataaaatgacaatagacaataaagtatcagtgatttccatggttatttccacagcaaacgttttatattccatatatattagtcaaaaagttaataaactaaatatgcgtaataattattttaacatatttaaagaagatttaactgaaacaatacctgaatattattataaatttataagtgaagaaagtaatggcacaaatgatcaagttggaaaagaatttgaaatatatatttcaaatttcagaaagaaaattagatttttatcttttattgataataaaaattacaaaataatagatgatgcattagttaaacttgaagaagaggttattttattaccaaaaataaaaaataataaagaagaacatttaaaaaaatttaataaattaataaagttgatttataaaaaaatcaacaaccatttttcttaagtatatgaaaaaagaattatttattaaatggaaaaatagatagattaaaagaaataatgaacaactcagataatattgaattcttcagtggtgcaaatgtttccactaaaacgtgttagaactaaactgtgtataaaaattattgtattaattgttatgaaaaagtataatgcagaatatttattcaatagtaaagaaatttctagatgtggtggaacaataaaaaaataagtagttctttagagcgaaacattaacacaagactatgattatgcaattgagtatatattataagcaaaaatattatcattagtaggaacatcactaaaagtagaaccaacgtgtagtttaataaaatattttaaaaatttagaaagacattaatattaataatgataaagcacattttgattgtttgacaattttagtagtacatgataaattaagtgatgtaataaaaaaataacaacttaaaaaaatatttcttgtaaaatcatatgcatttagagtaattgcatttttttaagactttacgaaaagccggacttatatctatttttaaatttaacaggaattcagaatgaaaatcattggtgatttataataggctgtaaaaccaatagacttatacgcatttatttggtaaaatgaagttggaggaagaattaatgaagaagtatattataggactagacttagggataaataatgttggttggtctgtagtaaatgcagatacaaacgaaattgaatcctatggagttagaaagttcaatgctagcaacggagcaagtgatcgccgaaattacaggaattcacgaagaagattaaaaagaaaggatactagaaaagaagatatttttaaaatattaaatgaaattcattttccaaatattctcaccatagacacaagattaattgaaactagatgcaaaggtttaaacgagaaaatatcaaaacaagacatcacaaatattttaagctatatggcagttcatcgtggttacattccatttggaaatgaagaagtaaattttgtgaatttaaatgggaaatatccatgtgagtgttattgtgataaatttttgaatagtgttaataacaaatatcgcgcagaaagagagacagtaacaaacaaagacaatgaaagagaaattagaaaaatattagaaattcagcaaaatttttatccagaaataacaagtgaagttatagaaaaaatcatcaaaattttaggaagaaaacgtaaattctgggaaggcccgggtggaattaattctttaacaagttttggtagatttaaaacagaagaagatgttataaaataccaaaaacaaaaagaaataaatccggattatgataaatatatattcgaagatttaataggtaaatgtgaagttgatccagataaaaaatgtgcttccaatgggaacttttacgctgaaaaatttaacttattaaatgattttataaatgtatcatttttaaatatagatgagattaataataaagaagacttttatctaacaaaagataaaacttataaattaaaagaatccggattaaataaagtatttgaatactgtattaataaagaaaatatcactattaaaggtttattaaaagacctttttgcaacaaatgtaaataatatgacaggatttcgtcaaaaagatcatgatccaaaaaaaccagatatgtcaacaatgaacatgtttagagcgtttagaaaaatatttgctaagaacaatgcaaatatgaaaatattcgatataaaaaatattgaaaaatataacgaaattatcaattatattatgttagttcctggcaatgttgaacttataaatatggtaagcagcatggtaatgtcattaacaaaaaatgatgaaagggcccttaaagaaatatttaaatctaaagtaaaattaaaatatcattctctatgtgaagatattttaaaaagagcatgcaatgatatgttaagtttacaaaaaaattacatgcaagtttacaaaataaaagattatggtaaaaaatccagagaactatttattgccaaatatgatgaacaaaataaaggtaaattacaattaaattcgtgttttattgatgatattatagcatcacctcaagttaaaaaaacactaagacaagcagaaaaaataatcaatgaaatcataaaagataaaaaaactttaccatatgcaattgccatagaatcaataaaggaagaattaagtggaaacgaaaagaagaaaatgtatactgatataaacaaaaagaataaagaactacataataaagctgaagaaactttgaaatcacttggttttgacacaaatcaaataaccaaaaagaaaataacaaaaattatgttatatgaagaatttgatggagtatgcccttattgtaataaggctataaatattaataatttaataaatggagcagatgaaatagaacatattcttccaagaagtgattcatttaacgatagtttagataacagaacaataagttgtgcagattgtaaccgtaaaaaaggaaataaaacaccacttcaatatttaactgggagcgaaaaagaaagttttgttaatagaatcaaaagtaataaaaatataagtgaatttaagaaaaataattttttgtttgatggcgatatcagtaaatataaaacaagattttttaatagaaatcttagagatacagcatatgctacgaaagagctagttaaacaaattaatatatttaatgactatctcgagtttaaaaataatatagataaaataatgacattgtcaacaccaggacaattaactcatgacatcagggatagatacaatttagaaaaagatcgagatgctggagaaaagccatatcatcatgccgtagatgcttcaattgttgcacttttaccaactacatctattggtaagaaaattttagagtttcaaaatgatgccaatttctttataaagccaaatagtaaaagtgtaatgttggatattggaaaagaactaaagtattataataccaaagaagaaaaaatagaatatgatgattacattgtggatttaaaaaggattgatgatattaatccaaagtttatgttttcatcagagataaataaagaaccgaataaacaattatttaatgcaaatatgtataaagttataaaaaaagaagataaatattataaaatacaacaaataaatgatatctatgattcaaaaattgatttagatctttttgaaaaattatttgatgattctaaaaatgaaactttattatgtcaaagtcaacataaagaattttataacaaattaaaagaaatatatcaaaaatacaaagacagtggaataagtccgttcgaagcatatcaaagagaagttaataacttgtcgaaggtcgataaattcaattacttaattcatggtataaaaatgagtgaaaatggaccagtagtaaaaaaattaagatattatacaccaattagtgaaccatatttagtggataaaaaaacaattaataaaaaagataatacatatttagcctatgacggattatctcaagcgggaatagaaatttattataacattgataaaaattgtttagctttcattcctataccagcaattgctgtaaatttaaaaactagagtaataaatcacaatcatccaatgctagaaagatatcgtaaaaaatacttaaaagatagcaatgcgaaaagaattgtaactttgtttaacggaaataccattgaaatttataaagccaaaggtggtgtaataaaaggagaagttagttcatttgacaaagatgctaacagaattagattaaaagatagatcttcttttgtaacaagcgataggggattttctataattgattacaatccgataggaaaagctcaaaaacgattgacattcatgattaaatagggtatattataagtgcaatgaccaaagttggatggacattgccaaaaattttcagttttcttattataactcttaatgaggaaaccgggactaccctcgaggtagtctctttttttataatatggcgtttcgtagcatattaattagcgaagcaactaaaataaacttagatttaaacaatattgtcatacaatataatggagataattatcatataaatatagatgagataagcaatttggttttagatgatgctagatgtttggtttcattaagacttttaagtgaactttgtgaaaagggaataaatgtaatcttaacagatagttcacataaaccaattggcactttaactaccctttataataatgttagagctccccaaaaaaataaagaacaaataaattgggacaatagtgtaaagggatatctgtggactgaaatagtaaaaaataaaattcaaaatcaaagaaatgttttagttcatttaaacaaaaaagataaaatacaaattatggatgaatatattcaatccatagaatatggggataaaactaatagagaaggtttagccagtcgtacatattttaaagaactctttgggattagttttaaaagatttaatgaagatattataaatttttgcttaaactatgcttatcaaatattaagaagtaaaatatcacaagaaatagtagccttaggatatcaaccatcttttggaatatgccataaaaatgaatataatacatttaacttagcagacgatttcatagaagtttttagacctataattgattattatgtatacaagattttaaatgaaactgaagaagaatatttaactccatctttaaaaggtaaattaataaacattgttaatgaaagagtagaatttaagaataacacttataaaattcataatgttatttcattctatttacaagatttaactaattttttagaaactggagacttaagcaaagttaattttccaaaaataatatggaatatgtaaattattataaacaaatgagattaatattaatttatgatttaccaatgattgaagacgaggataaaagaatttatcaaagatttcataatcgattaatttctataggattctacatgttacaatattctgtatatgccaaaataattcaaaatgatcaagtttacagacaattaacatcaaaagtaagtaaaatgttaccacaaaaaggcaatatcgctctgttaaaagttacagaaaaacaatatgaagatatgatatatttgagaggcgaacaaaataaatttgatgtcttagtaggggggaaagaacttatagtttttggaggtgatatatgattaacttaaaacttgcaggacaaaaagaagaaaatatagacatagaaaaatataataaaataaaaattattaattataataaatatattgaattttataaatatttctatgaaagatcaaatttatttatagaaaacaaggaaataacaaaaaaagattgtgtatttatagatattacaagtatcggagccattttgaaagaatt

SEQ ID NO: 1492 - DNA, 4617 bp, synthetic construct
  source 1..4617: mol_type = other DNA
  misc_feature 1..4617: note = Synthetic
tttaacgaataacaaaacatataaattaaaagaaagtggcttaaatagggtgtttaaatattgccttgataaagaaaatgtaactattaaaggcttgttaaaagatttatttgccactactgtaaacaacatgtctggatatcgtcaaaaagatcatgattccaataaaccggacatgtcaactatgaatacctatagatcaataaaaaaatatttgctaaaaataatgcaaatatggaaatttttaaattagagaacattgataaatataatgaaattattaactactttatgctagtgcctggaaatgtggaacttataaatatgattagtagcatggttatgccattatatgaaaatgataaagatgcacttaaagaaacttttaaatcaaagaggaaaaaattaagatatcatgctttgtgtgaaaaagtcttaaaaagggcttgtaatgacatgttaagtttacaaaaaaactacatgcaagtttacaaactaaaagactatggcaaaaaatcgagagaaattttcatcgaaagatatgaaaaacaaaataaaggaaaattaattttaaattccagttttatagatgacattgtagcatcacctcaagttaaaaagaccttaagacaagcagaaaaagttattaatgagatagtaaaagatatgaaatctttaccttatgcaattgccatagagtcagccaaagaagaactgagtggaaatgacaaaagaaatatgtatatttcaatgaacaaaaagaataaagaacttcatgataaagcagagaaaacattaaaatcacttggttatgacataaatcaaataacaaaaaagaaaataacgaaaataatgttatatgaagaattcaacggcttatgtccatattgtaataagtccattaatatcaactatttaataaatggttctgatgaaatagagcacattcttccaagaagtgattcatttaatgatagtttagataatagaacaataagttgtgcagactgtaatagtaaaaaggaaaaaaaaacgccactccaatatcttaatggaagtgataaagagagttttataaatagaattaaaagtaataagaatataagtgaactaaaaaaagaaaattttctattttatggtgatctcagtaaatataaaactagattctttaatagaaatttacgtgatacagcttacgcaactaaagaattagttagacaaattaatatttttaataattacctcgaatttaagaataatggcaaaaaaatattaacaatgtctacgccagggcaactaacgcatgatatcagagaaagatataacttagaaaaggacagagatgcaggcgaaaggccattccaccatgccgtagatgcttctatattggctttgttaccaacgacatcaattggtaaaaaaattatgaaatttcaaaacgatgctaacttttttattcaagataacagtaaaaaaataatgcaagatattggaatagaattaaaatactataatacaaaagatgataagattgaatatgatgattacatcaaagacttaaaagaaataagtgacacaaatccaaaatttatgtattcacctgaagtaaataaagaccccaataaaaaattatttaatgccaatttatataaagtgataaaaaaagaagataaatactacaaaattgaacaaattaatgatatatatgattataaagtagatttaaatctattagaaaaattattcgatgattctaaaaatgaaacactgttatgtcaatctcaacacaaagaattttataacaagcttaaaaagatatatgaaatatataaagacagtggcataagtccatttgaagcttatcaaagagaaattaatagtctatcaaaagaagatgagtttgattatataacacatggcattagaatgagcgaaaatggccctgttgtaaaaaaactaagatactatacaccaattaatgaaccatatttggttaacaaaaaaacaattaacaaaaaagatactacttatctagcttatgatagtctagcacaagctggaatagaagtatattacaacattgataaaaactgctttgtttttgtgccaattccatgtacatgttacaattttaagactggtaaagtaaataaaaaaaataatgaatatataaagtattaccaaaaaaatatagggacgtataacgttcaatataaaacaacattgtataatggtaataccatagaaataaataaaaaagatggttcgataattaaaggagaagttagctactatcataaaacattagataaaattgtgttgaaatcagagcaagcttttacaaaaagtgacctaggtttttcaataattgattatagcccaataggaaaatgtcaaaaaagattgacattcatgattaaatagggtatattataagtgcaatgaccaaagttggtgggcattgccaaaaatcattcagttttcttattataactcttaatgaggaaaccggggctacccttgaggtagtctctttttatttagtgaatatggcgtttcgcagtatattaataagcgaagcaacaaaaataaatttagatttaaataatattgtcatacaatatagtggtgatagttatcgtataaacattgatgaaataagtacattaattttagatgatgctagatgtcttgtctcattaaaacttttaagtgaattatgtgaaaaaggagttaacgtagttttaacagatagttctcacagaccagttggaactttaacaacactttacaataacgtaagagcaccaaagaagaataaagaacaaatattatggggaaatagcgtaaaaggttatttatggactgaaattgtaaaaagtaaaattcaaaatcaaagagatgttttattacacttagataaagtagaaaaattacaaatacttgatgattactttaataccatagagttcggtgatgcgactaacagagaaggtttagctagtcgtacttactttaaagaactttttggaattagctttaaaagattcaatgaagacattataaatttttgcttaaactatggataccaaataataagaagcaaaatatcgcaagaaattgtggctttaggatatcaaccatcatttggaatatgtcacaaaaatgaatataatactttcaatttggcagatgattttattgaagtgtttaggccaatgatagattattatgtcttcaaaatattaagtacagctgaagaagaatatctaacaccatctttaaaaggtaaattagtaaacatagttaatgagagagtagaatacaaaaataatacttacaaaatccacaatgttataacattttacttacaagatttaactaattttttagaaactggagatttaagtaaaattaattttcctaaaatattatggaatacgtaaactattataaacagatgagattattacttatatacgatttaccaatgcttgaagatgaagataaaagaacttatcaaaggtttcataacaaattaatatctattggattttatatgttgcaatattccgtatatgccaaagtaattcaaaatgatcaagcatacaggcaattaacatcaaaaataaataaaatattgccacaaaaaggaaatattgctctattgaaagtaacggaaaaacaatatgaagaaatgatatatttaaaaggtgaacaaaataaatttgatgctttagtaggcggaaaagaacttatagtttttggaggtgatatatgacaaaccttaaacttgcaggaaaagtagaagaaaacataacaatagaaaaaaataataaagtgttaataaccaactatgataaatatatcgaattctacaaatacttttatgaaatgtctaatatttttatagagaacaaagaaattttaaaaaaagattgtgtatttatagatattacaactattgctgggattattaaggaacttgaatttaagaaaaatacattattatatgattttatattaataaagtataatgaaatagatattaataaaaaagatgaattttacagtgcttttcttaaacaaatagaatatttaaaaagtaacatgaatttagaattcgaattaattccagaagagattatagataaagtgataatacaaaatataaatacaaaaataaactatgcaagactaataaaggactttgagaatattttacattttgtagttagctataatattaataaaacttatatcattattcattttttcaaatgagtagaaatttagataattgctatacatttgatgttaattcatacttaaatgtaaaagattataatatattgatttctgatgaaattagaaatattaattatgaactgttgattgaatatttaaaagagatatggccggttgattattttgaacaagaaattgaaaatttgttagaagagtactttagttatggaattcacaaaaaaatttttaaaaacaaaaaagaaaaaatgtatttgttatcaagtattataaataaagaatataaatttcaccaagaaataacatgtgataaagttgtatttgacagtattattaaatcttttatagaca

SEQ ID NO: 1493 - DNA, 23675 bp, synthetic construct
  misc_feature 1..23675: note = Synthetic
  source 1..23675: mol_type = other DNA
ttaatatgcaagttactgcaagtttgggtgtgaccttttttgatgcaggtgatgagatagatgcggaccaacttcttcgtcaagcagaccaagctatgtatcaagcaaagatacttggaaagaatcgttaccatatctttgatgcactcaaagatgagaaaataagaacgcaccatgagagtttagatgagatgcaaaaagcgcttgataatgaagagtttgtgctttactatcaaccaaaagtaaatatgcaaagtggagaggttgttggaactgaggctttgataagatggaatcaccctaagcatggaatactctcacctgctacatttttgccaatagtagatggacatattttatccgtcaggattggagagtgggttttagagagtgcaatggagcagatgagtgagtggaaaagcaagggggtgaatgtaccaactagtgtaaatgtagatgccatgcaacttcaacagagtgactttgttgagcagttagaaaatctcttgaaaaagtatccaactgtaaaaccaaatgagttagtgcttgaagtcctagagactagtgctttagaagatatcgttcatatatcacaggttatgcaagattgtctagatatcggcatcactttttcacttgatgattttggaactggctactcctctcttacatacctaaagagactcccagcaagagagttaaagatagataaaagttttgtctgtggaatgcttgaagactctgatgatttagctatattggatggaatacttagcctctctaatgcttttagacgtgatgttattgctgagggagttgagagtgttgagcatggagagatgttacttaagcttggatgtaaaatagctcagggctacatcatagctcatccgatgccaccgcaagagatagaggagtggataaaccactatgactcaaatgaaaagtggaaaaatactagctccatcagtcgtgaagatttgcctctgctttatgctttagtagaacatagagcgtggttaagcagtgttttagcttatattaagggactaagctcaacaattccaaggctagattatcatgagtgccgttttggtgaatgggtttatgatattggtatgaagcactacagagatagctcttcttttaaagaagttgaaaaatatcataaagatttgcacaagagaacagatactttaatcaaacaatataataaaggtacgttaaaagatttagaagcagctatagctgagataaagagcttgagccacaatttaacacatagctttaaaagctttgaagcaacaagaggaaatagtgcactcctagacttataaacaaagcgaaatcttatatgatttgacatataatcacttaataatcctagctaggagagtgagatgtcatttaaaattaagatagttatttgtggtcaaagtgggcttgttggctcaaaactctctgaagtgtttgaatccaaacacaacgaggtcattggtattaaagtacgagatgatacaaaaatagaagatatagcaaaacagatagaagcttgcgatgttttgataaacttaagtggtactacaattctcgctcgttggagtgatgagtataaaaaaggactttatagcagtaggataaatactactagaaaacttgtagatgcgatgggcttatgcagggaaaaaccaaaactttttatgtctgcatctgctgttggcatatatgatagtgaacttaaacatgatgaagactccaaagatttcagcgatgattttctagctaatatctgtaaagattgggaagcagaggcaagaagggcatctgagattggtgttagaaatgttcaaactagatttggagttatctacgcaaaagagggcggagcaatgactaaaatgttactgccttttaagttgggtatcggcggaaaaatagggagcggtaagcagatagtctcatggattcatatagatgacttggtccgtgcatatgagtttatcatcaaaactccagagttaaagggtgctataaactttacaaccgcacactcactctcaaacagtgagcagactaaaataatgggcgatgttttaaacagaccaacttttttcagagttcctgaatttattttaaggctaacttttgcagatggtgccactgtgatgcttgactcaaaagatgtttatcctaaaaaactcttagagagtgggtttgagtttaagtacccttactttgaagatgcatttagagagataataagttaagttatggcaaaaaagtccaatgtttttctagatataactacaaacttagatgaagaactcttcgaagatatcatcaaaaaagagtcttttaagcttcaacgaatcatctcacaaggtcacactaccccagaaggtgagtggtatgatcaagatagagatgagtgggttatgcttctttgtggtgaggctattttggcatttgaaggtgatgaggatgtacggcttggggctggggattatataaatataagagctcataagagacatagagtctcatggacaaagccagatgccaagactatttggctggctctatatagtcaacctttagggtaagatataaggaactccgaattttaggaatacaatggcattctccacgatgtctctaggctataaggcttcaaagtaacaccagccccgaacaatttcgcggtttcgtagtttttttattgcttcgtactgcttaacatcggagtaaaggcttttgtgcttagctctaccgtgtcaccgactttgaggttttttgcctcatcttgggtgataactacttctacaagttgctgtccgatggcaactatggctacaaaaatcacatctactttttttatatctaaaagctctccactaaatgagaacttctgacttcctgaagtctttaaaagtatatcttttggtttgccctcatttatgataagaccttgctctagaactacaactcttgaagctagtctatagatctcgctagggtcatgactaaccatgatgatggtagttttaaactccttgtgcaaggctaatatctcactttgaagttttgttcgcatcttagaatcaagtgctgagagtggttcatccatcagaagaagttttggttcacccatcatcgcacggcaaagggcaactctttgcttttgcccaccacttagcgtgtttggatgtctattttttaactcacttagttctgtaatacccaagagatgagaggctaaagcctcgtctttttttacataaagaagattttgtaaaatgctcatgttgttaaagagtgcatagtcttgaaaaacaaacccgatagctcttttttgcggggcaagtgtagttttagcatctagccaaatctcatcatcaacgctgataactccttttgcatcctcaaaacctgcaaggattctaagaagtgtagtctttccacttccactaactccactaagagccaaaaactcgccctcttttatctcaagatctacatcgagcatcatctctttgtttgagccaaagagctctttttttatatctatctttatcatctaaattgtccgatggctctagttttttggttaaagatatagacagcaagaagcactgagaagctgatgaggagcataatggcactgtagatatgagcgtttgtatagtccataatctcaaccatctcatagatggcaacagaggcaactttcgtctcgcctgggatacttcctcctaacatcaaaacgactccaaactctccaactgtgtgagcaaaagagactatgatagcagtcattacagcaggtttcatgtttggaagtgccactctaagaactgtctgggttttgctctttcctgctatatatgaagcctcgagcatatttttgttgatggaggaaaatccattttgaagaggttgaaccataaacggaagtgagtaaaaacagcttgcaattacaagaccgctaaagttaaagactagctttataccaaaatactcatcaaaaaaagcaccaacaggcgagttatgagagagaatgataaggatgtaaaaacccaaaactgaaggaggcaaaactaaaggaagtgcagtgatagcttcaaaaataggttttgattttgatcttgtttgagagagccaccaagcaaaaggtaagcaaagtataaagagtataagagtcgtaagtccagccagtttaaatgataagacaaagggagttagctcaagagcgtttagtgtttctagcatatgataatttcacttatagagagttcactagcttttataaaaatctttacaagatccccagcttcgagattcatccgagatgatgaatcttttgtgataatgctctcaaactttgcatcacctacgcttagttttatattgcttagtagctcgccattttcaacttctacaatctttgcatcaagttgatttgagtagcttatagctccgctaaattcctttgcaagggctatatgggttggttttacactgagcaaaacttggctattgacacttatggattcatctaaatctaagctcatcatagtgagcttgtaagaggcaaactcaaagtttacaatgtttaagttctcttttgtttgaatctttgtaactgtggactcaaacctgttcatggcacgaggtaaccatattttctaaagatatcttttgcactcttgcttaagataaactcataaaaggcttttgtctctctgtcattttctatcataactataccttgctctattggagtgtagagctttgcatctacctctacccagtttatattttgtttgtattttagcatggtttttgagtaaagagatgactttgcaataagtcctatgtctgccgctgttatagtaaatgagacagtttgcgatatggactctgcaaagataagtttattttttatatccttgtagacgccagcattctcaaatgcctccatggcagcagtcccgtagggggcagtttttggatttgctatggcaattttatctattttatcgctctttaacaactcaataccctttgacatatctttttgctctttgctcaaaatcgctaaagaacctaaagcgtagactacaggagcacctttagcaatcttgtcatcataaagtgattgcgggaacttcatatttgcagccataaaaagatggtaaggagcaccatgttttatctgtgcagtcagttttccactgcttcccaaagtaacttttacttttgtatctttgtgagttttgttaaattcagcgattagttcatctatggcataactaacatttgcagctactgctatatttatggtgctgccactaacaaaggcagttgagagtataaaaaacataagtagttttttcataagattccttttgggctttatgtatttaaagatataacgaaatattatcattttaaaaaaaagaagtcaataatgaaaaaaactttataaagttaatgtataatccttaaattatggagaatttatgagatgtctatttttaatattattttttgctagctttttatcttcgagcgaaatattaagagttactcaagagcaagaaccctatatattgggtacccaacttgagttttatgtagatgaaaaggaagatgctacactcaaagatatacagaccaaagagtttgaaaaatactctgaatgtataccaaactttgggtttctcgctaaagtacactggtttaggcttaagtttaattataatgaagctatgaaaagaaaagagtggtggctctctatagactatcctttgcttgattttgtggatgtatatttgcttgatgcaaataatcaacttatttcacataaaaagagtggagatttgtacccgctttatgaaagagatataaagcaccacaaccttgttttttctcttacaaacaattctacagagactcatacgctatatgtaaaggtaaaaacctcaagttctatgctcgttcccatggagattataagtagcaaggctcttcttgaacacacccatctgcatcaaagtctctctggtatctactatggaatcttgcttgttttgatattttataatcttatagcgtatatatatacaaaagagaagatttatgttttatatatagcttttgttgcatcttatgctctttggcaactctcttttgatggcttagggtggctctatgtttggcaagaaaatgcttggatgagagaaaaaggagcggtgtttttcatctctacgagtatatttttccaactaatctttagtcaaagtctcttaaattcaaaaaataatatcccaaaatatgacaaatatgttcttggtccatttatctatctctcaatccttggcatagttgtctcagcactcatgccttacaaatatactatattagtgggtgcatctctttctattataattcctttagttcttttagttgctggttggatggttatgaaaaaagattactactctataagactctttgttctaggttgggggatatttttgcttggaacactcttgtttacacttagtaaatttaatcttatatctggctattttgctatgaagtatgtacaacaagcagcatcaggtgttgagatgattttgctctcagcagctcttgctgaaaggcttaaacggctccacgatgagtacactaacaagctaaaagaccataacaaaaatctaaaattagaagtagagatagctctaaaaaaggcgaggcaaaaagataaaatactcattgagcaatcaaggctagcatcaatgggtgagatgatagagcaaatcgcccatcagtggagacaacctctaaatgacatagggctgttaaaccaagatatgtactttaaaaaacaactaagcaaactaagtgatgacgactttaaccgcatccacgaaggcatagacaacaacatcagatatatgtctgataccattgatgactttagaaattactataagagtgacaagaaaaaagagagttatctacttgatgaggtgatagactctatgctaagcatcataggaactacgcttgagtactctaacataaaagtaagccttgacattgacaaagatataagacttttaaatgttaaaaatgaacttcaacaagttatgcttatcatcttaaacaatgcaaaagatgcactcttagcaaataaaatagataaaaaaaagatagagataagagcctataaagatactaaagatgcgtatattttagtaagtgataatggcggagggataccaaaagagataaagaacaaaatctttgatccatactttagcacaaagcacaaaaaccaaggaactggcataggactctacatgtcaaaaatgataatagaaaaaaatatgcaaggaagcctgagtgttgaaaatatagataaaggagctagatttaccatcaagctcccattagaagactaaaatatagtaaatctaaagtgagtgaagtttaaaacctcttccatctcgcttacaactttttgcataatgagaccctctcttcgtcctgagaaaagtcttgccatcatataaccattgctcagacctatcataactcgtccatcactcttttcataaacggagatgctaagaggcatatttgtagacataactttgccctcgtctgcactcaacatctctgacgcatacttagcgttacaaaacttgatgatcttaaccttgcccgtgtctgctccaccgtgagtaataatctcttcttgttggtcgatgatgtctgttacatgccaaccctcttttgcatttagtctatcttctaagatttttagagttttgtcaaattcataaggcgatgttatctcttttaaaagaatagatggagctgctactttaaaagcgatgccaactacaaagatgctaaagactaaacctaaagcgatgcctacaaaaagtgataatttattcatttattattcctctgatatacatattttctgagccttgaaggcttggatggtttttagggctacgtagccaactactagggttaaaaaagcgatgagtgatagagatgctatatatgtgaaagttgagtgatatatattgtgcattaaaagtgtggctattgtgatggcagctagtgggaaagtgtatgcccaccaagaaatgaaaaacatctttacatcatacatacgcaacataaacaaaagcagtaaaagcgtaaagagcgcgatagagtatagaaaaattgagaacatatctatagaaccatttgtgattttaagatagctgacaaatccaaccgcaggcggagctataaagataaaaaaagttggtataagctttttagctagtggattgtgaaagatgattctgttgatcataatagtaaaaagcactatccaaaaaaacatcccaagcgagaagaaaaagagtgagacgaagattggcgctgcatcgactccaacaacaggaactaaaacatttccaactatggggataaaccacgcaggattgctatgaactacttctaggtcgttatgaatccagtacttcataacaacaagcgtaaaaaagagttgcagaggtgtggctataaaccaaagcactatagatagagtcggtgcaaagtcatagtaagctatgcttagaagtaaaagactaacagagatgctagccataaaagagctttttataggatggtttatctcccctttaacagcctctgggtaactcgctatttttaacatataagaggtaaatatgactaaaaacaaaagtgtgtcaataaaaagtatgaatgcataaaaccagtatgaaaaatctaaaatatgataagctttagcaaaaactatagcaaatccagataatcccatgataatagcaaacaactgaacaggaaagtattcgagtgatcttgcatctacacagacagaagtttgcatcagattcctttggttgtaaattttgtaaaattataatcaatatttagttaagttataataaatataagaaattaatacaaaatttatagtaaaatgacactattatttccccacaggatacaaaaatgataaaagtctcagctatacagatgcagatgagccaagatatagatgccaacataaaaaatgctgaggttttggtaagacaagcaaataaaaatggtgcaaaaatcatacttttaccagagttgtttgcatctttgtacttttgtaaagatatggatgataagtacttctctttagcctcagagcttaaagacagtagccttatagagagatttgcaactcttgcaaaagagctaggtgttgttttgcttgttagttattttgaaaaaagtgctaaagagtattttaactctttagttgtggtagatgctgatggcaaaattatggacaactatagaaaaactcatataccctgtggacctggatatgaagagaagttttacttcaaaccgggaaatagtggctttaaagtctataacacaaagtacgctaagattggagttggtatctgttgggatcagtggttttgtgagacagcaagagctctaactctgatgggtgctgagattattttctatcctactgctattgggagtgaaccagaaattcatgttgactcaaaagaccactggcaaagagttcagatgggtcacgccgctacaaacacagttccagtagtagttgcaaaccgtataggcgaagaagtaggggagagttgtactctaacattttacggttcatctttcatcacagactacacgggcaaaaaaattgctgaggcctcaagagataaagaagagattatttatgcagagtttgatttagaggagatagcaaaacaaagagagtattggggacttctgcgagatagacaaccaacatcttatggggttttagtagaaatataaataagataatgtgatttttaaacaaataaattattgtaagatgtttaaatctaataaaatataaggatcttttatgaatattttatcattagacttaggcgttacctcttgcggatattctgtaatgcaagagcttgaaaaaaatagctactctcttttagattatggcgtagtaatgcgtgacaatcctcatgatagtggtacccaacaagaaagacgagagaaaaaacaatctcgaaatcttcttgataagaaaaaaaagaggattaaagagataaagcagctctttgcctcttatcaccttaagtatcaagaaaaaaagagatatgatatttggaaattaagagcggtagatgcatttaagagaaaacttgacaatgatgagctctatgcaatttttagatttatggcaaagcatagagggtataaatcactaaaaatagaagatttgatagccgaacttgaagcaaaagagaagatgggtgattgcgggagtgatgaaatccagatgccaaaagatttggagaagttttctgaaacactggcatacttagatgctctaaagtgcaaatacaaagagaaaacatctgcacaaattatttgggagctagaatctcaaaaagagaatcctacttttagaaatcatggtaactaccgctatatgatacgtagagaagacataaaaaaagagatagaaaaaatcttaggagctcagcaaaagtttgatttttttaaaagtgatgagttggccgctaaatttaccaatgaagtgataaacatcatcatcccgcaagaagctgttacgctaaatccagaaaatatcaataaatgtctaatctataaagatgagatatgtgcacctcttttttcatactcatttgatatatttgaactatataagttacttggagatctgaagattgacggtgctgatgcaactttagagcaaaaagagcagttgcgtgaagcacttttagaagatataaatagtttgaagtgcaaaagctcttatagtgtaaaagattttaaaaagatactaggaattgataatgaatatgtaaaaatcaataattttcaagagtataaaatgcttaaaggaaaaaaagaggcaaatactcttgttaaatttaattttcttccttcttttaaaaaattgaatcgtaaaattttaagtgccatcttagcacaagagtcatctgcaaaaatctttgatgaaatcgcaacagagatacatctaaatataaatcctgaaaaacttttaataaacattgaaatactttttaaaaaatacaattttgagtttaccaaagatgagatttgtgattttactcttaaacttcataaacataaatcaaaaggaacttcaaattattcactaaaagcattaaaagatttaactgctttaatgcaagagggtaaaaatgagagtgatgcaaaagggattttaaaagtcagtaaaagcgaaaactattccgattttttaaaaggcattagatatctaaaatctcaaaataaagatggaaaactacagtacgagatagatgagaatcgtatatctaaccatgctgtaaaatctctagtctcatgggcacttcgagttataactgatttgcatgtcaaacatggaccttttgatatcataaaactagaatctactagagaactctcacagcctgatgatgtaaaaaatgacattagaagagcaaaccaaaaaaatgaaaaagagtggcaagagctcattgaaaaatacaaaaaacattttgaagcaaagggattaaatcttcaaaataataaagagtatcttctaaaacttaagctttgggagcaacaaaaaggactaggaatctactcacataaaccgcttagtattgatgaagtcttgagtgataaaacagagatagaacacattgttcctcgtgcttgtggcggaagcaatgcagagtacaacaaggctcttgatttaaaaaatgaaaatgctaaaaaaggtaataagctacctcttgattatttaagtggagaaaagagaaaaatttatattgactttgtagaagagttaaaaaaaacctataagataaatatgaagaaaaaaataaatctcttagccgagagcttagataaaacctttaaagaggtaaaagatgatgtatcgctccatgcaacaagctatactgaaaaacttttgggtgagattttaaaacgctactacccttttacagacagactcaaagagaatcaaagagtgatgtctatctctgggcgtgctacaagttacctaagacgcatactaagtgtcgataacaagtctcgtgatacaaactttcatcatgccgaggatgctattctcctaggtttaatgagtaaatcttacttacaaaatatctctacaaattttgagaaaaattatgagcttaccgaacaaaatgcaaaagagaactttaaaaagattgttccactcatagaaggaacatcccctaatcatataattgcccatataagagagagttacatgcaagatatacaagagagtcctttttataaagcacttgatggaactcttaaaactccagccttttgggtctctaaaaaaccgataggaacaaaggcacataatgagacgattcaatctaagaaaaatttggcttactatgtgccgattggttctctgctagataaagtcaaaccgagtcacaaaatgagttccgatgaattttataaaaaatttaataaagagatttataaaaaaatccaagttgctcaagataatccaaaagattttacagcaaaagtatttgcaaaaaaaagagatgccatcgtaaatatcttgaaccaatcggcttttgcaatcacaaaagatgataaagccgagcttgatataaaagtacgagatactatgaatgagcctctatacgatgtaaacggtaatgagatacgaagagtaaaaagagtaggagaggatgcttctatagaagtaagaggaggcttggcttatacagctccttcacttgtctgtcttagatgtagttttatagatgctaaaaaactaaaacttcaaaggattgacataagaagttatgtaaaaaacaaagtatccaagcacaaccagatagatatatcaaaaccacttaaaaaacaactttggcaagaagtagttaaaacaaaagtgaaaaatcaagcatcagttttaaactattttaacagaaaaaaatcttctaagattctctacgagtatgcaaagggtgtcaagtcaaatgatgaggaaaatgtagaagcaaaagcagcaagaatctactggagcgaattatttgaaaactttgtaagagtacaaaaaggagcagaagatgtgcaaaatgcttcgcttaactactgctatgcaattgtaagaagtgctgttgtccgttcactcacaaatgcggggcttatgccatcttttggaatccaccatcaaaactatttcaacgcttttaatcttgcagatgatatgatagaaccatatagagcttttgtggatctgcatgtaaaactaactcttttaaaatatgatgatgaggccttaactagccaaataaaacaagaatatgtcaatattttaaatttagaattcgtagctataaacggaggtctaagcaatataagaactgcaatagatatgacagtccaatcgttacaaaaatgtgtgcttcaaaaaaagatactctacttaatgctcccaagcattgactttgaaaagtatgaagatgagtgcttatagatttatgtggctaatggtaatgtttgatatgccgaccgatacaaaaaaagcaagaaagaagtaccgttatttacgtggtgagcttctaaaagaagggtatatgatgatgcagttttctatctacattcgctcatttcactcttacgaatcaactttaaatggaaaaaaaaggctcaaagattttatagcttcaaacatagcaaaaggaagcataaggatgattatgtttacagataagcagtttggaaatatggatataatcgtaggtacaaaagaagaaaatgaaaagaatgcaccaaaacagctattgctattttgatgattccaaaatctccaacgacaataaagtcgaaggattattttaagtcccgctacacaaacccctttgtgctaaaacataaatattgtactcaaaaagaagatgaaaagtcaaattttaccactcataatcttctcatacgccccactatacaaggctgtatgagaccctattttagcacaaaggggtttgcaggggtcttaaaatgtcttaagagcttcatgtttacttcttcaagcttatcttctaagagagttgttgggagattgtctagttgtattctagttatgtctaaggtgcaaagttcattgatgcaaaccttactctgtttttttagtttgtctcttttgagtataaaaactcttaagtcttcaccaaaaatgtttgtagagatgggtataactgttacacctttaaagtcaactttttaaattattaaagcctaagcgactcatttcttcttcattttctatagctatcttctttaagtgtataattacatgatttctaaaaagtttaaggataagaatgaaaaatagtgttcctctttatataatatttcatcttttagctttcatatcactaagtgctaatgataaggagctcctttctcaagagaagcaaaatcttttgcttcaagaacaaaatagatatgaatcagagtatgaaaaactaagatacaactggatagcacctcttaatttaggagcttcttatggatatgataaagtatatacaggagattatggcacaacctcaaatatctcagtctccatctctcaagatatctttcgctctggaggtataacataccagatagagtatgcagatgccaaaaaaagagtagatgagattgcacttgcaaaagagatagcagctataaatgaagagctttttagtgcacttttaaactacaaaaaaacgctctaccaaaaaaagcagagtgagttgatacttaaaaacaaagagatagaaatttttataaaaagacaactctatgatgtaggtaaggctgatattacagagttaaacaatgcactgatggcacaaagcgatgaattgaaaaatttagttacacacaagtatatgctcgcacagctaagagaagaagtctcaaagttaagtgacgttgatccagctgtatttttacttcccaaatttactcttatagagaaagagacctatcttcaaaacaatttgaatctaaacttccttcgcttgcaaacaaaaagttatgagtctctttatagtgtgacaaagagtagctatatgcccagcgttacactaagtgccaatgttggatatcaagagtatgattcaaaaaagtatgaaaacaagtatgatggaaattactatggtgcaagagtcatgcttaatgtgccctttacatacaatgcgacggcaacaacgcaagaagcaaaagctagttacttaaaacaagctgcccaagttgcagatatgtatagaaataccaaagcttcttatacccaatcgatagaacttatagagagttatcgtagctataatgagataactttaaaaaatctctctttgtatgatgagcttattgaagctatagaagcaggagtaaacacaggagaaaaaacggggtatgatttacaaactataaaaaatacaaaagcgatcgaggaactaaatataaaactaagtgagataaacatacaaattgagctggcaaagctccattttgcacttaagaggaatgatgatggacaataacaaaacgatagaagagactctaaatataggtaaaaacaaaaagagcagctataaaaaatatatatggatttctctttttgtgcttcttatcgctggagctattttttggtatcttacatatggggcaaaagataaagagttaaactatcatacaactactttagagagaaaaaccattactacaacggtcttagcaactggaaatatggagccgacaaatacagttgatgtaggtatagaagtctcagggaccataagcgaggtcttagtagattataacgagagagtcaaaaaagggcagctgatggcacgacttgacacggtaaaactatcctcaaaagtaacaagttaccaagcaggacttgcaaaacttgaagcaaatatcgcagaagccactgcctcgttaaacaaggcaaaaaaggagtggattcgagtaaaaaaaatggttgaggcaactaatggaaactatccatcaaagcaggaagttgactctgcttttactacttatgaactagcaaaggcttctttgcaagctgcaaaagctgggcgtgatcaggctagtgctgagctaaaggctgcacaagatgatcttaaaaaagcagctgttgtctctcctataaacggggtggtattagatagaaaagttgaaccagggcagagtgtagtctcggctatgacgatacctgtactctttactatggcagaagatttgactaaaatgaaagtagttgtaagtgttgatgaagcagatattgcagatgtaaaagagcagcagagagtaaactttagcgttgatgcttatccagagatggtttttgagggaacgctaacacaattgcgtcttaattcccaaatagtaaacggtgtagtaacttatgatgctgttgtaaatgtggacaattctgagctttttttaagaccgggaatgacggttacagcccagattgtcacagatgttttagaagatgttttagttttaccaaatgcagcactccgatttactccacctataaaagagaaaaatagttctaggcatgttaaagcggatgctttaaaacaccatgtttggactttaagagagaataaacctgttagagttgaggttgaggtaggtaagagtgatggtagtttaactgttataaaaaaatcaaagcttagtgaaaaggatcttgttctaatcggaataaaagagtcatgaaagaatttatcatagagttacgaggggctacaaaaacatatggcgaaaatgaagcaaaaacatatgcgatgcgcggtgtagatttaaaagtcaagcgtggagaatttttagccatcatgggacctagtggatctggcaaatcaactgctatgaatatgataggatgtcttgatactctaagtggcggagagtacatttttgaggggatcaatgttgaggcactctcccgagatcagcgtgcactactgaggagaaactatattggctttatatttcaaggttttaacctgcttgggaaaacaactgccatagaaaatgtagaacttccacttctttatcgtggttacaatgcacaagagagacatgagatggcaatggacgccctaaagagtgttggacttgagcaagtcgcacatcacactcccggggaactctcaggtgggcaacaacagcgtgttgccatcgctcgtgctattgctacaaagccgcttattttactagcagacgagccaaccggaaaccttgacagtgcaaaaagtatagagattatggagcttttacaatcttttaatcgtaaaaagaaaattactatactgatggtaacgcatgaggtagagatggcagaatatgcctcaagaagggttcattttagagatggcgctatagagtacatcgaagattcggaagcagatttatgatttggaatgcttttttacttgctcttcgtgaaattcgcagaagtgttatgcgttcggtgttaacaacgcttggaattgttattgggatagcttctgttattgcgatgataatgctaggagatgctacaacagcctatgtcacacagagcatctctaaacttggtacaaacatgcttatggttataccagggcagcaaagacagggtcctccaagcactgactctacggctcgaaggtttacccatagcgatattgatgcacttaaaggggggattatcaatatccgcggcgtcgctcctgttagctcaagccaaatgcaagcagtatatgctaataaaaactatgcaaccactgttgagggaagtgataatgattactttatagttaaagattgggtttttgcctcagggagagattttttaccatcagaacttcaaggtggaaaaactgtttgtgttatcggtgagacagttagaaaagaactctttggcacacttgatcctgtaggagagcttataagacttgagaacttctcatgtgagattgttggactgcttgaatcaaaaggtgcggcaatgtttggaatggatcaagatgccattattgtaacacctataaaaatgtttcaaagacgtataagtggaaatcaggagataggaagaattatgatttcagcaaacagcgcttcatcaatagagggtgtaaaagcatctcttatctcacttttacaggagcgacgtaagattcaggttgggcaagagaatgattttaatgtccacgatatgcgagagatggttcaaactctctcttctacgacacagatactcactattttacttggagcagtagcagccatcagtcttttagttggtggtatcggcatcatgaacattatgctagtctctgttacagagagaacacgtgagataggtatacgtctcgctgttggagcgttagagagggaggtgctattgcagtttttaatagagtcaatagttcttgcttctattggagggattttgggcattattgtcggggtaggtgcaggaattggggttgcactcttttttgaattgccacttatttttaatatacctataattttagtagcctttttcttctcaacaattgtaggagttgtttttggatattttccagcgagaaaagcggcaagactcaaccctatagatgctctaaggcatgagtagaatcttataaagagtcctttttggaccctctatatccgtcttccttgaataacacgaagtagaataactacgagtgcaatgactaagagaatatgaataaatcctcccaaagtgtatgagctgacaaatcctaaaagccaaagaatgatcaggattattgcaatagtctcaagcatttttttctcctgttgttaataaatttttttggagtatagcccattaaaaactaattctttactttttgcgtaaaagatagatgccaacgacaaaactcacagcaccaataatataataagtcattaccctatctgtatttgcaccagtaacaacttgtgtcacttgtgatccgatagaaccagataactgatacccccacactgcaaaaccaacccctacaaccgctaaaatgagaccgataactcttacggagattcctaaaccttttcccatgataaactcctaaattttaaagagctgaaatgttttatcattgcagataacactattgtacaataatattttatttttaggcagttaaatcaaattatttaattttcttatttgcattgttgtgaaaaataatagggaacaaaattgataaaatggtaagatacatatggcttaaaatatatataaataaaaactaaggagctaaaatgtttgataagaaaaaagtaaaagaattggtgcttagttcattggtggctgatgcttactctttaggatcgcattgggtctatgatgaaaaagagcttgaaaatcttgatatagattgggatgagttaaacgatgcaaaagctccttggcacaaaggtaaaatggctggagattttacccactatggggatcaaactttatggttatatgagtttttaaaagataaagataagtttgatgcagatgcatatgtagagttttgggcagataaaatgagtagttatgatggatatatcgatggctcttcaaaagatactctgataaatatcaaaaacaatatctctgctagtggtgcgtcttcaactgatttatccattgttggaaggattgctccacttttgttagtctcaaattcaaagaaagagtttttgcaaaatgtagagagttttgtaaaatgtactcataattcagataaggctataacaacagctaagttttttgccactttactgcttgaagtgttagatggcaaagatataaaagagtctatcatggctcttaaagataaatttgatgcaaaaacagaagcgtatgtggatagaggtgttgcttcaaagagtgatgatacactgcaagccatcagagattttggaccaagttgtgatatagatggtggatttgtcggagttgtgcatctgttatacagacacgagaatcttaaagagatgctaattgctaacgcaaaagcaggtggagactcaagtgctagagctatgcttgcaactatcatttttatggcacaaaaaggtaagaacatttccgatattccggcctcttggttaaagattaaagcttatgttaaatctctttttgccccagttctaatgtgagttgagtatagagtaagcccagtaaaagctaaaccgcctactaagtttccaaatacggttgggatttcattccagatgaggtagtccatgattgtaaaatctccacctaaaatcatagaaaatggaaataaaaacatatttactatagagtgttcaaagcccataaaaaagaagagcatgatgggcatccacatagcgatagcttttccgctaacagttgtggatatcatggctccaactactcccatcgagaccatccagttacaaagcatgccacgcataaagatagtaaaccagccagagatgccatgctctttgtagcctaaagttcttgcttcgccaatagttgatatcttctcaccaactaagcctggctctatttggtagccatatgtaagaacaaaagagagcataaaagcaactacaagtgcacccgcaaagttacctaaaaaaacgagcccccagtttcttaagacttgctttatagtaactccttctcgtttgtctaaaagagcaaggggaactagaacgaaaactccagttaaaagatcaaaacccataagatagagcatgataaagccaacaggaaagagcatagctccaacaagagctgagcctgttgtaatggtgactgcaatagcaaatgcggcagcgagaccaagtatggctcctgccataaaggctctgatgatggtgtctttagttgacatatagactttggattctccagagtcgaccattttcgttacaaactcatgaggttgcagataagacataaaaatccctagataaaaattttgttattatatgtaaaaactgctgatttaaagaagagtgcccaacataaacttgatatttaagagtttaatagctatcattataatactttattataaatagaatgctttgaagagttactaaattggatcctgaatcaaagtaggagaatcgttttttgctatgcaaaaatatttctttagagttcaggataatgcgtgtctcattttaggatggtttttgtgccgccattgtgtgcttgacacgaaatctagcttatacattaatcagagggttcaataaattaaaaatatgagtttaaataaagagaaaacatgaaaaaagtatttattgccatagtattaattttacctctgcatcttttagcaatagagcaaaaagagatctatactcaagctacagctgcttacaaagccaaagattttaaaacttcatatactcttttttcaaagttatacataacaaatctctctgatgctaacttgaactttatgtttggtatctctgcgtatgagattggaaactacaatatggcacttgcagcttttgaaagagtagagatgctagagcctgccaatcttagaaataagcttgaaaaggcaagaaccttttatatgctaaagatgtatgaaaatgcggagcttacatttaaagaagttctaaaaaatcctcttatcccccaaaatgttcgcaaaaatgtagagctatatctctctagagtgataaaagagcaaaaaaaatcatttacctatgtctcgctcaatttaaacactttatacgactcaaatgtaaattctgcgcctatagatgatacttacaatataggtataacagagtatgcaacggctaaagagaagtctgatggagcagttgaaacttttgctagtatcgttaacatctacgatataggggaagcgaatggttttgcactcaaaaacagtgcatccatctatcttaagagacattttgaagaggatgagtacgatataaactacttctcttacatgccaagtcttctttacaaatacacaaagtacacacttgaaatggtaggtggagtagatgcaatgactcttggagataggagttatctgcaaacgctctccctgatgccaaggtttgagtatgaacacacaaaaactctaagaagcatgacgcactttagatatcaagtaaaagattttaaacaaaacgaccaaaaagatctaaatgcaaaccactatgagttatcttatggattacaaaatattttgtcgccacgctcttatgttcaggtaaatattaccggagtactagagagaaaaaagcgtggatcaagagtggatgtagactatgatgagtataaatttgatgtagcttatgccaatcagcttacttctatttacggtgcagaattatatgctcagataagaaaacgagagtataatgactatagcacactctttaactcaagaagagatgaccttgccaaaagtataagtgtggggctaagtgttaaaatgcttgagaatttactcttaagactcaatgctcgatatgatagagttgattccgaccaagatgtatttagctatgaaaaacagacactcttagttggtgttataaagactttttaggataaacatcatgaaactattaaaaaatgtattgattgctttgatgatcgttagttcacttatgtttgcaaaaagtgtaggaactattacagcacttaaaggaagtgcattaatcgaccgtgctggagcagagataaaagcaaaacttggagcgaaacttaaagagaaggatattttaaagaccatcaaagagagtcaagttcagattatttttgatgatgaaactattgttactgttggtaacaatagtagtttctctattaacgagtatctttatgaagagagcaaaactccttctgcacagtttggactctttagtggtgccatgcgaactatcacaggaaagataggaaaaatgtctcctgagaactttaaagttaaaacaaaaactgcaacgataggtatccgtggaacaaactttacagttatagcaaatcaagatgggagtagtaatatctactgtacccttggagctattagtgtaagtttaccagaaaaagagtctacgattacacaaggtttttatgtcacagtctcacagggtggtgtcatgagtaaacctatgaagtttactcctgcagagattgatgatgcactagagcaaaattttagtagctcaaatgaaacggaagaaaaaacttcaaactctcctcaagagacacaagagacagccttaaactcttctcaaggagaatcctttgttataacagaagttagaacaacaggtgttgaagatattgacacaactctaacagatatatcatctcaaacaactacaagcgcacaaacgactactgtagatgatattgaagagagtgtagaagaagagtttcctgagcctgaaccaacacctgaacctgagccagatccagaacc

SEQ ID NO: 1494 - DNA, 23348 bp, synthetic construct
  misc_feature 1..23348: note = Synthetic
  source 1..23348: mol_type = other DNA
ggtgttcgtgacaagagatggcgcagagacggaccttgacatcggaaactatgagagatttttagatacttcttacctcaaatcaagtaacttcactacgggtcaggtctactccagcgtaatcgagagagagcgcgcaggcggttatcttggacagaccatccaagttatccctcatattgtgggcgagatcgtaaagcgtataaaagaggctggtgagggtcacgagatacttatcgtggagcttggcggaacggtaggagacatcgagggccttccgtttatggaggcgatccgtcagatgaagcatgatgaagaggtagaggggacgttttttgttcacgtaacacttatcccttacatcaaagctgcaggtgagcttaaatcaaaaccgacacagcactctgttcaggagcttcgccgtatcggtatcactccgcagatggtaatagccagaagcgagaacgcactgcctaagacattcaagaaaaaactggcgatgagctgtgacgtctcggctgacagcgttatagaagcgcttgatgcggcttcaatttatgatgttccgatctcgtttctaagacaaaatatcttaaaacctatatcgaaagagctctcgctgggcgagctaaatccagacatggagagatgggactctctggtcaaaaagatagttcaaccgaagaaccgcatagtgttaggctttgtcggcaaatatcttgagcttaaagagtcttacaaatcattaacagagtctcttattcatgcaggtgcgcatcttgatacccgtgtagatattcactgggtggatagtgaagagatcgagacaagaggcacggaagcgcttctaagtgattgtgactccatcttggttgcaggcggatttggaaatcgtggtgttgagggcaagatcaaagccatagagtacgcacgtgtgaacaagatcccataccttggtatctgtctaggtatgcagctgacacttgtagagtatgcgagaaacgtgctcggcttagaggatgcaaactcggttgagtttgatgagaacactcctcatcctatgatctatcttattgacaactttatggatcaaagcggcaatacgcagcttagaacacacaaatctccaatgggcggaacaatgcgtcttggagagtatccgtgcgatactaaagagggttctatcatacgcaaagcttacggcggagcaaagaccatctatgagagacaccgccacagatatgaggcaaaccctacttacagagcgcagcttgaagatgccggcatgatcgtaacaggtgagtcaaacggacttatagaagcagtagagataaaagatcatccatggtttttaggagttcagtttcaccctgagtttacatcaagacttcaaactccaaacccttctattttggcatttgttgaggcaactctaaatctttctcaacagaagtaacccgccaaaatatgcatcttcttgatgatctgcctacgctagacaagtcggctctttttgagctgctctcacagagatttaataacgaagagaaaaaactctcgcagatcccaaacccacaaatgcttcacgatgcgccaaaagctgccaaaaagatagcagatgccataagagagggcaaaaagatagcccttgtgggtgactatgacgttgacggcgtaagtgcaacggctataatgatcgactttttcaggcagatcccctacccgctccatgcaattatcccaaaccgttttagtgacgggtacggagtaagtccgaacgtcttaaaaagagtagatgcagatatcgtcataacagtcgacaacggcataacagccatagaagctgcccagatctgcaaagagcgcggcatggaacttatcatcaccgaccaccatactccgcttgagacacttcccgatgcttatgcaatagtaaacccgaagctctcaagctgcagctacccatttgaagagatctgcggagcacaagtcgcctggcttctgctaggtctgctgaaaaaagagctctctgtatccatagatatgaaagcgtttctggatattttatgcattgccgtaattgcagacattatgcctcttacggatataaacagagccatagtaaaagaggggctcaaaattttaatgagctcgcagagaccctcttccattataataagagattttctaaataagagctccatcacttccgaagatataggttttgccatagcacctcgcataaactccgcgggaagactagaagatgcaagtattgccttagagtttttgactgcgcagacaacgaatgaagcctacactcaatttgaaaagctaaacacattaaatgaaacaagaagagagacagaagcaagaactacggatgaagcaatcgctcttgtaaataaagatgatgacattatagtggttgcaaaagaggggtggcacgaaggtgttgtagggatcgtagcatccagacttgtagatcacttctctaaaccagcaattgttctgagcataaaaaacggtgttgcaaaaggaagtgccagaagtataggaaacataaatatatatgaacttatcaaagagaacagcggatttttaacaaagtttggcgggcataagatggcagcagggcttggacttgaagagaaaaatattgatctcttcaaagctgccatcaaccaaagtgctttaacactcaatccatcagacttcttatcattagatgaggttgtcggcattcttccaagcagtgagatagactttgaactcttggatcttctggatagttttgaaccgtacggagaagcaaactctcgtccgctctttttaataaaagatgcacaaatagtagagataaagtatttcggtaaagataaatcacacaccaaagtagtgctaaagcagtttgcccatgaaagaaaatctattgagctaatactatttaagaaaactcttgagatgcctagtgaaaaaaagttaacgtgcagttacagaattacaaagaatgagtttaactcacgagtatcagctcaacttattataaataaaatatataattattaagtaaaattcaccccctaaaataacacataaacgccttaaatagcactaaagtattaaaaagtagtatattttaaaactcccttaaggcgcaaagatgtaaaattgataactttatcacaaaaaaaggaaaatcatgagaaagaatgagatcttagaagagattttaaatgaagtagataagcatccggagattatgtctcgtcgtgaagctttaaaatacctaacaatgtctccattggcggcatctgttattgcaagtgctactgtcggcactactgctgcatctgcatctgcggacgtaaagggtaaaatagttattattggtggcggtttggcaggtatgagtacagctgcacgtcttaataatactatctcggatgcagatataactgttattgagccggatccaatatctgtttcttatcagcctggtcagacactagtagctagtggtgtttgggaaattgatgatattatctacaaaagagacgactttgttccaagcggcgttaagctaatcaaaggcagcgtaacttctatagatcctgaaaacaacaaagttgtagttgacggaagccaagatgtaacttacgatcaacttatagttgcagcgggagcaaaccttaactatgcagctatcaaaggcttagagggtgagatcacatcttctgggaaagacaatgcggctacaaaaaaagtagttactcaaaacggtgtacactctctatacttccaagatggtgcagttgcaacatgggcaggtattcaagagcttataaacaaagcaaaagcgcataaaggacctgaaaaactacaggcacttttctctaacccaagagggccgtttaagtgtggtggtgctccgcttaaaatcatgtatttaacacatgcgcgtcttgtagaagcgggtgtacgtgataaagttgaactgacattcaatacaaacaacggggctctatttggtattcctgattacaacgctccaattgttaagcagtttgaagagagaggtttcaaagcaaactacaagcataaccttgccgagatagatcctgttgctaaaacagctacattcaacaaatggtggatggagaaaaaagagtttgaagatgaaatgggtgatccaatcttcaaagaggttgaagttagcgagcctgttacatttaagtatgactttatccatgttgctccaccacaaaagacacctgatgttgtaggtaagtcaaaaattggttcagctggcagctgggttactgtaaataaagagactcttcaatcatctttcttccctaacgtatgggctgtaggtgactgtgcaggcgttccaatgggtaaaaccggtggttctgctcgtaagcagtataaagttgttgttgataacgtagtatctgtaatgggcggtaaagagccgactgctaaatatgacggttatacagtttgtccacttattacaggacttggaactgttatgatggcagaatttaactggactaaaaaacctacaccttcattccctcttgatcctactaaagagagatggattatgtggttgttaaaagtttatatgcttaagccaatgacgatccacggtatgctttcaggtagagcgtaaaagaaaactacttaatcctccttatggaggatttacaccgcacatagtataataatccccactattaattttacacaacataggagagaagatgaaaaaagctactattatagcctccattgccatgctcttttcaatatcactaaatgcctttacattgggaaatttgggtgagtttaaatttgagaagatgaaccagaacgtttacgttatgcatggaccggagacagaaccaagcaaagagaatgaagggtttatgaacaaccctgccgttattgagagcgcgaacggactgatcgtaattgatccgggcggaaactacaacgtaggtaaaaaaattcttgcagagatagaaaaacttagctctaaaccgataatcgctattttcaatacgcataagcacggtgaccactggtttgcgaataaaaacattaaagagaagtaccctgaagttcctatctatgcacttacatatatgatcgagcaagttaaagacaatgcggctgagacttggtacggcatcttagatagattgacaggaaatcttgaaggtacaaaaccatttacatttccaagtgacggcattgagaacaagcagaccgttgttgtggatggagagacttttgtaatgcgtcactactcaaaagggcatacagatactgatatacttatagagcatacgaactcaaacacgctttttataggtgacaaccttattacgaaccgttttggagcatttgacgagtcatcaagcatcattgaaaacataaaagttcttgagaagatcaaaaatcaagaggatggatttaaacaatacgcactttatgttccaggtcacggacaatcaagcagtgaaataagcgaaactgtagatccatttttaaaatatctaaaaattgttctcgaaggcgctcaaaaagcatatgatgaaggtatggcaagttatgaaataaagcctgaagtagatgagaatctaaaagattaccactcttgggatgcttatgagggtcaaatgggtaaacacctaataaaagcctactccgaagtagagatgctagatttctaaaaaatagagccgctctttggcggttcttactctttttttacaaaaaatttcagttcaaaaactaccttttttatctataatattttatgcctaaaatatacaaatgccaaagagcaaaatcagatattaccatcttaaaaacacttgatgattcacttattgcctatagcactaagtttcacggaattaaaatatttgacttttatgagtgtgaaataaaaaaaagtattgctaacgcttatcttaattcaaccgtgagtgcctgcgcttttagtccaaacaacgagttttttgcttttgtgaacaatcgaactatctatattttagagatacaatctaaagagataatacacactattgagactcatgacgaagatgtagagattataagttttgacccatcttcaagctatattattgccggaagcaagaacggcagagttctacagtacaaaacaaaccagacctcacttctctctaggctttgctcttttccgcacaacagaaagaacataacaatagatagaaaaaactacgtaagctcgtttgcatttcacaacaactcttttgcatgcagcggttatggaggtgccatctatataatcgacctctatacacagacgaacagaagcgttatcacatacaataaaacccgcatcaacgctctttgcttcttggatgaagatacgcttgtatgcgcaaaagataacggaaaagtagacattgtctcactcttagatgaagagagccacaaaagcatagatacgcccatctcatcaattgagacaataatcataatgccaaatccaaactatattttagtaagcggcaactcaaatataattacgataattgatataaaaaactccaagatcgcgcatagcaaatatattgaagtggaatctaaaataaagtttgtagatattgtaaacagtgattcgcttgttgttgcacttcaaaacaacgagatattgcatattgaacttccgggtatcacaagattaaaatctctaattgcgcataattcactaaaagaggcttttgaactaatagcaaaagagccaatgcttcaaggatcaaatgagcacagagtgcttgaagagaagtttgaaaagagttatgagatcgctctaaaggcacttatcaaccaaaacagagctcacgctatgcagatcctaaaaccatacaaagatataagatcaaaagagactcttataaaagagctctttagcgcttttgaaaactaccttagatttcaagcgctatttttagaaaaaaagtatgctctggcatatagtatgtgctcaaaatatgaacctcttaagagaactgtacagtataaaaagatggagcagatcttcagactcgccttctcaaacgcacaaagacatatagtacaaaacaatatagccggtgccagagcacttcttacagagtacaacaccgtgatctcaaaaaagcctcttataaagcttcttatcactcaaaacaaagagtttgtagacctgctaagagccatacaaaagagagattttcaaaccatcaacaagcttgtagacaaaaatgagctatttaagcagatacctaactacatagccatgaataaccagatagaagagaccctcttagagatagaagagaatataaaagcagctcagactggaaaagcagagactcttttgcttacgcttgagaagattcctcatgtaagaaaaagacgagaagagctgcagctaaagtgcaaatatgccgtcttgcttcaaaatgcgtatgaagagaacgactttaagagctgctacgaacttttagatatctataaatttctgcgaagcacagagcttggaatgcttcttgagaaacactggtcaaaacttatgcaaaaatgcgaagagtacgcactagatggaaatataaaagatattaaaaaagagttaggtcagcttcttggtttacctagtagaagcaacaagatcggggatctgctaagagtaagttttcacacaaggataggcatactgatgcagaaaaacaattttaaaggtgcagaagctatcatctatacctatatagatatattcggtgtagacagcgagatcagccatcttatgaaaaagtttgaaaaaatatcgtcttgtaaacttgccataacgcagactaatgaagagagacccacaagagacagttggagatacaacgatattataatgaaggggctgtaagttttaaaagcgtctctagggtatcgttaaaatcactcttttgcatcgaattttggatcaggaacttctccatctcactttttttggctatcgcttcatccaagtccggatctccgccttttgtatatgcacctatgcggatcagcatctcgttctcttttaggatggtgtagagtcttctaaatttcaaaacagcctttaaatgctcatccgagatgatgtcattcataacccttgaagcagagtttagtatgtgaacaggcggatagatgccaaaatcggtaagttcgcgtgagagcactatatgcccgtccaaaatagaacgggactggtctgcgatcgggtcgctcatatcatcaccttcgatcaagaccgtaaaaaatgccgtaattgatcctttgccctcctcttttcccgcgcgttccataagctgcgggagaagtgtgagtgatgagggcgggtagcctttggaggtaggaggctctccaagagccaaacctatctccctttgagccattgcaaatctggttacggagtccataatgaaaaggacgtcaagtccctgatctttaaaaaattcagccacgctcatagccgcaaaagcgccatactttctcataagcggagagtcatccgacgtagctaccactatgaccgtgttttcgaggtttccgccaaggtttttctctataaactcaggaacctccctgcccctctcgcctataagtgcgacaacttttatgggtgcatccgagcctcttacaatcattcccataagtgttgattttccgacaccgcttcccgcaaagatacccagcttctgacctttcccgcaggttaaaagagcgtctatgctctttaccccgacactaaagacctcatctatcatgccgcgcttcatagcggctatcggcggcttgattatcggcataagttttgagccgttaacattgcctttgccgtcaataggcctcataaaaggatcgacaacacgtcccagcagagattgtcccaccggaatgcttaaaccagtttggtccaaaaagactctatctcccgaacaaaacccctccacaaaactaaaaggcgtaataaaaaatgtggcaccgtctatctccgtgaccatcccgatagtctcttgattggtctcgtttgagatgatctttactatatcgcttatgcttacttttagcccgcgagcggtaataacggttgcgtttattttgactacttcaccgaatgagaccgagtactttttatttgagattttatcttttagtgaagaaaaaggcactgaaaatctccttgcatttgagctcgtctaataacgtgaacctgtaggagagtttatcaaagagaaaaactcgcttcttgttttctcatcttttttaaacagtccgcgcagagccgatgatgtcgtcgtcgagtttatcttctctacacctctcatctccatacacatatgtcttgcctgaataacaacggctacgccttttggctggatagtatccataatagcatcggctatctgctcggtgagctgctcttgtatctgcatacgacgggcaaaaacattcactacacgcgggatctttgagagcccgaccacctttccatctggaatatatgccacatgcacacgcccgattattggcagtagatgatgttcgcaagtggagtagaactctatatcttttaaaagtaccatctcatcgtttgaacttgtaaacagcgcagatttgagtatctctcttgggtcctctttataaccgccaaatataaactcgtatgcctttttgactcgttgaggagtctttaaaagcccctctctgctcgggtcttccccgacatgaaacatcatggtctttacggcatcttcaaattttgtatcttgtttatcggacaatttcactgcctttgtaaggtttttataacgatagagtatcaagaaatagctgagaaaatgatgtggttattttttaaatatttttaaatttagctaaaatacattattaacgaaaaaggttgtaaaaaatgaaaattttatctttagacctaggtgtgacttcttgtgggtattccgtaatgcaagaacttgaaagcaacagttattctcttttagattacggcgtagttatgcgtgacaatccttatgatggtggcacacaacaagaaaggcgagagaaaaaacagtctcgaaatctgcttgataagaaaaaaaagagaattaaagatataaaacaactttttacttattacaatcttatttatcaagaaaaaaacaaatatgacatttggaagttaagagcgatagatacgtttgagagaaaacttgacaatgatgaactctttgcaatatttagatttatggcaaaacacagaggttataaatcactaaaaatagaagatttaatagcagaaattgaagcaaaagagaaaataggtgattgccaaagcgatgaaatccaagagcctaaagatttggagaaattttctgaaacattggcgtatttagatgctctaaaatgtaaaaacaaagagaaaacagccgtacagattatctgggagttggaatctcaaaaagagagtccaacttttagaaaccacggtaactaccgttatatgataagaagagaagacatagaaaaagagataaaaataattatagaggcacaacaaaaattcaatttttttgacgaaaaacaaaaagctgacgagtttacgaaaaaacttcaaaatatcattcttcctcaagaagcagttactttaaatccagataacataaataactgtcttatttataaagataaaaaatgtgcaccaactttttcatactcgtttgatatttttaatctttataaactcatagctgatttaaaaattgatggcattaatgcttatgacgaacaaaaagaggagttgttatcgacaattttgaatgatataaaaaaatttacatctaaaacttcttatagcgttaaagattttaaaaagatactagggatcgacaatgagcatgtcaaaataaataattttcaagattataaaaccataaaagggaaaaaagaacaaaacagccttataaaattcaattttttaccaagctttaaaaaactcaatcatgagattttaaacactattttaaaagaagaaaattttgttgaaattttggatgagattgctacggagttgcatttaaacataaaccctcaaatgttaattgaagagattgagaaagttttaaaaaagcataatcttgattttaccaaagatgaaattcgtgattttactcttgaacttcataagcataaatcaaaaggaacctcaaattattcactaaaagcattgaaagatttaactgcattaatgaaagacggaaaaaatgaaagcagtgcaaaagagattttgggagttagtaaaagtgaaagttattcccattttcttaaaggtataaagtacttaaaacctcaaaacaaagaggggcaacttcaatatgagatagatgagaaccgcatctcaaaccatatagtaaaatctttagtatcatgggcacttcgagttataaccgacttgcacgacaagtatggaccttttgatattatcaaattagaatcgacaagagaactctctcagccagatgatgtaaaaagagatataaaatcagcaaatgacaaaaatgaaaaagagtggcaaaacctaataactaaatacacaaaacactttgaagcaaaaggactaaatccgaaaaacaacaaagaatatctaataaaactcaaactttgggaacagcaaaatgaacttggaatctactcccataaagtacttggtattgatgaaattttaagtgataaaacagagatagaacacattgttccgcgagcatgtggcggaagcaatgccgagtacaacaaagcaatcgacttaaaagatgaaaacgccaaaaaagggaataaacttccgctagattacctcagcggagaaaaaagagagatctacatcaactttgttgaagagttgaaaaaaagctacaagataaatatgaagaaaaaaataaatctcttggcagagagtttagacaaaacttttaaagaggtaaaagatgatgtttcactccatgcaacaagctacacagaaaagcttttaggcgagattttaaaacgctactacccttttacagacaaactaaaagaaaatcaaagagtgatgtctatctcagggcgtgcaacaagttatctacgacgtatactaagcatagataacaagtctcgcgatacaaacttccaccacgcagaagatgccatacttttaggagttatgagcaaaacttacttacaaaatatttccacaaattttgaaaaaaactatgaacttactgaacaaaatgcaaaagagaactttaaaaagattatccctctaatcgaaggtgcatcaccaaaccaaatatttgctcacatacgagagagctatatggaaaacatagaagagagtccgttttataaagcacttgacggaactctcaaaacccctaccttttgggtctctaaaaaaccgataggaacgaaagcacataatgagacgattcagtctaaaaaaaatctagcctactatgtacctgtcacttctctactagataaagttaaaccgagtcataaaatgagttctgacgagttttatcaaaaattcaacaaagaaatttatgaaaagatacaagtcgtacaagacaatcccaatgactatacggcaatagcatttgctaaaaaaagagacactgtagtaaatattttaaacctatcggctttttcaagcacaaaagatgaaaaaaccgagcttgataaaaaactgcgagatgttatgagtgagcctctatatgacgtaaacagcaatgagatacgaagagtaaaaagggtgggagaagatgcatcaatagaagtgaggggaggtttggcgtacactgcgccatctcttgtctctctgagatgcggttttacaggagagaaaaagttaaaacttcaaagagtcgatatacgaacttacgtcaaaaataaaattacacaacatcatcaaatggatatatttaataatgatttagttgaaatatttgttgaaaagtcaaaaatattagaatcaaaagctatcggcttactaaagggctttactgaaagtaaaggaggtagatcaaatttaaggcatcctaaatatccacttttaaaagaaaaacagccttttgtatttcaaaatgaattttccataggctctacgtgtggaatcaaaaaatacaaaacagatgccacaggaaaagttttgggattttactatttaggcaaagttttaaataacgaaaaagaactttttgccaaagtactgagctataaggctttgtgatgagctggcgttctatcttcatcacaaaaccttgtaagatacatatagaacacgacaacctcattattagtaatgatgatggagaaaacttagtaactcttgacagcatcgcttctatcgtaatagagacaacaagagcgactatcaccacctatgccatctccaaactcgccgaagcaggtgtggctgttttgtatgtcgataaaaagtacaacctaaacgccatcaccctcccctttcatacacactctactttttcaaaaatcgtacactcgcaaatagatatatctaaaccactcaaaaagcaactttggcaagaaattgttaagtcaaaagtaaaaaaccaagcagcagttttgaactattttaatagagaaagatcttctaaaattctttacgaatatgcaaaaagtgtcaaatctaacgatgaggaaaatgtagaagcaaaagcagcaagaatctactggagtgagctttttgaaaactttgcaagagttcaaaaaggagcagatgatgtacgaaacgcttcacttaactactgctatgcgattgtaaggagtgcggttgcccgctcacttacaaatgcagggcttatgccatcttttggaatccatcatcaaaactacttcaacgcttttaatcttgcagatgatatgatagagccgtatcgaccttttgtcgatctgcatgtgaaactaatacttttaaaatatgacgatgaggtacttacaagccaaatcaaacaagagttcgtcaatattttaaacttagagtatgcagaaatagacagtggactaagtaatctaagaaccgcagtagataccacaatccaatcattgcaaaaatgtgtacttcaaaaagagatctctcatttaatgctcccgagcattaactttgaaaagtatgaagatgagtgcttatagatttatgtggcttatgataatgtttgatatgccgaccgatacaaaaaaagcaagaaaaaagtatagatacctgcgaggaaagcttttaaaagagggctatataatgatgcagttttctatctatatccgctcatttcattctcaagaatcagctttaagcgggaaaaaaagaataaaagattttatagcttcaaacatagcaaaaggaagtatacggatgataatgtttacagataaacagtttggaagcatggatataatagtaggtatacaagaagaaaatgaaaaaaatgcaccaaaacaactattgttgttttgaaacattcaaaatctatcatcgatttaaatcgaatcaattattttaagtcccgctacacaaacccctttgtgctaaaacgtagatattgtacttaaaaacaagacaaaaagtcaaattttcatatacaaaaccttctcttttgccatgctatacagggctgcataaaaccctattttagcacaaaggggtttgcaggggtcttaaaactacgggtggatattggaaacaaaactccgcattttagcacaaaggggtttgcaggggtcttaaaacgggtcctcgcacgcgtaacttgaacaattcattttagcacaaaggggtttgcaggggtcttaaaactcgccataagcagacgaagaaacaccctcaattttagcacaaaggggtttgcaggggtcttaaaacaagctcgacgaatttggcgatgataagaccattttagcacaaaggggtttgcaggggtcttaaaacttgtggatgtatctcatttcttttggtactattttagcacaaaggggtttgcaggggtcttaaaaccatttatcttagcattgcgttctttgttcgattttagcacaaaggggtttgcaggggtcttaaaactaattccatttagcaccgcatcaaataagaattttagcacaaaggggtttgcaggggtcttaaaacgacatggggtggatggtctgcaccgatcccattttagcacaaaggggtttgcaggggtcttaaaacttctcttatcgcattctgctgttctcttaaattttagcacaaaggggtttgcaggggtcttaaaacccgattggagcagcatcaagctttaagctcattttagcacaaaggggtttgcaggggtcttaaaacagtaatctatatgtcaatgccatttttacaattttagcacaaaggggtttgcaggggtcttaaaactaacaagacgcttgctctttaatcttatcaattttagcacaaaggggtttgcaggggtcttaaaactggtgggcagagtacaataacactccatcgattttagcacaaaggggtttgcaggggtcttaaaacatatttcaaaacaacacaaaactaagcgaaattttagcacaaaggggtttgcaggggtcttaaaactagcaacagcagtttttaatgcctgcttggtattttagcacaaaggggtttgcaggggtcttaaaacaggacattggcgacttatccaaaaaagttgattttagcacaaaggggtttgcaggggtcttaaaacagtttctctatgactctgtaactgacagatgttttagtaaaataaaaactctcctaaagaactttttgaacttgttccaaaaacagcggtaccgatctaatatctttgtatatgcctaaaaagtagctaagctgctctttttgtttatcaaaaatagggctgatcgtaagatcttcataaaccatatttccctctttggtatagttacatatatttacctctacgggcttttgcgcactcagggcttctcttatctgcttaagagcttcttgtttcgtgtcgttgccgtgtaaaaagcggcagttttgacctaccgcttcttcatactcatacccaaacagctcacaaaacgcctcgtttacataaattattgggttgtcatactcgtttgggttagtgacaactataggattttttgattgctctattatctcaaaaaactgctctttaatttttaaagatctacttatttgctcactctttagcatatagtatccgccgtatatatttacaatgttgacgcacggtagtgattttctaagccccgttataaaattacgtacgcttttttcattgaactctctctcctgtgagtcattgagctcatacaatatatctagatttagaacaggtctatttatattcttaactaaaaatttaaacaactttttctgagaaatagataacttggcatactccccatctacaaaaagtgactctgtttgcacgctccaatagcagctgtttgttagacgtattaaatcattactcttcatttttcaatcttatttaaattttttactttttttggtagtatcaagctctgttaaaatagtctataaaatcatccatacttaaggcgcttgagtgatagaaaccttgcgaaaagtcacatccgattttttttaactccatatactgcttctgagtctctattccctctgcctgcactttgagattaaacagttttgcagtatttactatagattttacaatattcagatcattttcatcttgagctatgttttttataaacgatctgtctatctttaacttgtcaactttgaaattttttagattattcaaacttgagtgctctactccaaaatcatccaaagctatcttaaatcccatcaaatggagagtttctatattctcttttgccacagaactatttttcattatctgattttctacgattttaaactctatctgcgatttatctatggagtagcttttggatgcctccgatacatttgaagaaaaagtgggattaaaaaactgattttttgatatatttacagatacgaccagctttttatttaaaaaagttttattcattatcaccaaatcatttaaaacttttgagacaaccatgcagttgaactctttgtccatatctccagataagacaagttccaaaaactcactaggttccagtatgcctcttttactatgatgccatcttacaaacgcctctgcaccgacaatagagttggttttaaaatctataaccggctgataatgcataacaaattcgtttttctcaagagcccttcttatatctgccttcattgagagttttgtagccgcctcgcttgacatagatttgtcataaattctaaaatcatctctttttgtttttttgacttcatacatggcgatgtcggcatttttcaaaagttcctgccttgttgttccatgttgagggtatatcgctatgcctatggagagagtgacattgaagatgtgcgtatctatctccaaaggctccctgatttttctttgcagcttacgcgctaactgctctactatctctatactttttatatctttagctattaatacgaactcatcgccgcctatcctagccactgtatcatcttctctgacactgtttaaaagcctcttggctatggtgacgagcatcttgtcacccacatcatgtccgtatgtatcatttacctctttaaacttatctatatctataaaaagaagagctattttagagccgttttgtgaagattcttggagtatgcttttgagttgttttttaaaataagccctatttgggatagtggtcagcgaatcatagtttgcatgatagtagatttttttgtctgtgtctttgagtgttgtgatatttgaagagatgtggatgagatattttgaagttgtgtaaaaaaaaagagattcaaacaagacggaatcttctagtttttgcatactaaaactctttgatatagctaactgggattttatatactcaaatgtaatatcataaggctttatcttgtcaaaatttaaattctctttctctgagagatcaattccgtaagcttttgtgtagttgccatttgcatagaaaaaattcccattttcatcataaacggctattcttgagggatgtaaatctacaatatctacaaaaacattatttatactcaaaactaccccgttatcttaaaaatttaaagagattaaactattttgctaaatttgggtaatgttatcgaaaaagtgtctagtaaattactactattgtataaaaatgatatgcgggatctcttccgcatatcaaaaatatgatctacataataaaaatatgcggaacaataagcgggtattttttcatttttctgtagatatgttttctaaccgcttggcgaagatcgttttcaagtgctcttggattctcaagaagcccctcttttatatttgccaagaagtgttctaggacatcttccatctcttttgcgaaaaacttatcctgtttatccgcaacgattccaaatgatgtaactatcggttttgaaagcattgtagagtgctgtccgtcgatctgagcgactatcattacaataccgtccgttgcaagtttttgacgatcgattacgatgtcatcgtctatcttgtggttattttgattgtcaatatatgtcttaccggttcttaccgtttttacttttctcatatatttaggagcgatctcgacagtgtctccatcgttcataatatatatatttctctcaggaacaccacacaacattgcagtatctctatgtctcataacatggttatactcaccgtggataggcaagaagaacttaggattcacaagacgaagcataagcttctgctcttcaatggaagcgtgacccgatacgtgaagctctctgtcctgagccacttttgctcctgcacgctgaaggtagttcaacattcctgagatagaaccctcattgcccggaatagggcgagatgagagaacaattagatcggtcggcttgatcttgacatgtctatgctcgccaatcgacattctaaatagtgcagaacttggctcaccttgtgaacctgtcgttactataagaacatctttatcgttaagatgtgctatctgctcaggctctacaaaaatattttttggcagttttatatagtcatactgcattgccacttcaatatttctctccattgagcgaccgatgacacatactttacgtccatattttacaccatactgaattgcttgataaacacggtgaatatttgagctaaatgtcgagagtattactcttccctcagcctttgcaaagactctgtcgagtgccggtgcaacgcttagttccgaaggtgtcggagctgtgttgtaagagtttgtagagtcacttaaaagacatagcacacctttgtccccataatgagcgagtctgtgcaagtctgccgtgtatccatctaccggagtgtgatctatcttaaagtcacccgtgtgaataatagttcctgcactagtcgtaacagccagtgaagatgagtcaatgatagagtgtgtcatatgcatccactctacctcgaaatcctcacctattttatatacttttcttttctcgataggattaaagtactgtttaaagtcttttatgtgatgttcatcaaacttgttgcctatcatcgcaagaggaagcggagagccgtatataggaaactgcatctctttatataggtatggcatagccccgatgtggtcttcgtgagcgtgggtaatgattaccgctttaattttatttcttatttcgcgaatatatgtaaagtcaggtaccaaaatatcgacaccgtgcatatcctcatccggaaaactcataccgacatctatcagtatcgcctctttctcagtttcaaataccgtgatatttccgccgatctcaccgagacctccaagcggagttatacggatcttctcttttgagttaagatcaagcttatagtgagggttaagtctctgcttatgagcttcttgatttatctctacaaatgcttttaagctgtcgtttacaggtgtgctttggcgtctacgccctcttgatgcactcttgcttttagagccatttgaagggtttgcacctgtagtacctgcctgcttgttgctgttttgaccacttggtctgctggggttgttgtgtcttttgttgttgttatattgtttacgattttcttgagaagtgcttttaacgctttcctgattctcttgttccatccaaactccttgttagtttatagagttggtgatagtcatccgtgcagacctgatgaggacgaatcgtttgtgctaggctaagtttctcaaaaacttcttgaagtatatttttttcataaacggcagagagatttttcataagggttttgcgaggctgcgtaaatgcaactctaagcatactctcaaaatctttatcaaatctatcactctgtttttgtatcaaaaaaactgcagagtcaatttttggctgtggttcaaaagcagttggcggaactttcacgactaatcgtgcctctcctgcgctttgagttataatactcaatgctccaaataccttatcgccttcatgagcgcaaaatttctctgctacttcaagctgtaccattacaagtatgtttttacattttggatctgcgagggcttttaagattatgttagtcgcgatatagtatggcaaatttgccaccagatcatacgactcatctataagctcactcttccaagcagtcaatacgtccccgcaatgtatgcggagttgcttggttgcgatctctttttcaaactttttttgtaacagtttacacaaatcggtatcgacctcaaaagcatctacgcttttgacatctactaaaaatttagttaaatcacctaagccaggcccaatctcgacaatcttattgtcattgttgggcatcgcttcgacgatttttcgtaaaactgtctcgtcttttaagaaattctgtccgaacttcttctttgctgtaatattttccattaaccgacataatataataattttgcttacagttgattaatatcaataaaaaataactttggtgtatagtacttttttaaaactgaatatatagttaaaaactattattatctatttatataataattataactacagacgaatagttatgtttcatgtgaaacattaaaagtaccaaaactaactataagccattatgtgtataatttcactatattatataagggtactttttaacccacaaggtagaattttgaactattttgcaaaaagaattattccgtgtctagacgtaaaagatggacgcgttgttaaaggcgttaattttgtcggtcttaaagatgcaggagatcctgttgaagttgcaaagagatataacgaagagggtgcagatgagatcacatttttagatataactgcatctagcgacaaccgcgacacaattgtagatattgtcgcagaagttgctcgtgaaatctttatacctctgacagtaggcggcgggataagaaaactcgaagacatatataaactgctaaatgtcgggtgtgacaaagtaagcgtaaactccgctgcgatcaaaagacctgagcttataaacaagggtgcaaaaagatttggctctcaatgtatagtcactgctatagatgttaaaaaaactggtaacagatataatgtatacctaaacggcggtcgagtagatacaggtatagatgcagtggagtgggctaaagaggtagttgatcgcggaagcggtgagatccttttgacctcaatggatgcagacggaacaaaggctggatttgagctaaacataaccgaacaaattagccgtgccgttaatgtcccagttattgcaagcggtggagcagggagtatggagcatataaaagaggcatttttgcacggtgcagatgcggcactggcagcaagcatctttcactataaagagatcgacataatggatctaaaacgctatctacacgataacaatataccggtaagactctaatgataatatgcgcaggaaacaacgagacctttgattttgcaactccgatgggagtagggctgatagagtcagccataaatcttacaaggctctgcctcttcgacaaacctgagtttttactctttataggaagtgcagggagttatggagagcataaaatatttgacattgtagagtcaaaaacggcttcaaatatagagcttgcttttttaaataatgatgcatacacccctttggacaatgtggtctctactaacacagaccaaacaaaaagagatgttatagtcaactcgtcaaactatatttcaacaaatgaagagctaagtaaaaagtttctaaaactagacgtaggcatagaaaatatggagtttttcgctgttttaaaagttgctcaagagtttgatattcctgcaggcggagtgttttgcattactaactacactaacaaaaatgctcatgaagattttttaaaaaaccatgaagaagcaaaaaaaattctagagattcacgtaaaaaaaagaatcaaggagctgactagcagatgaaacaatcacttcttgattttagactaaaagagcttcaagagatcgtaaaaccatcttttagagcaaaacagatctacggttggctttatcacaactacgctcaaagttatgatgagatgagcaatataccaaaagcgctcaaatatgagctctcagaaaagtatgttgtaaatcctctcaaaattgtaaaaaaagagatctcaagcgatggcactataaagtacctttttgaacttcaagacggcaaaacagtagaagcagtatggctaaagatgaaagaaacgcttacagatgaagccggagaagtgatacaagaagcaaaatataccatctgtgtatctacgcaagtgggttgtaaagtaggttgtgcgttctgtctaacagcaaaaggcggttttacaagagatctgaccgcaggggagatagtagcgcaggttgtagcccttaagagagataatgaccataaacacaacagaatgataaatatcgtctatatgggaatgggtgaaccgcttgacaatcttgagaatctagcgcgtgccatagagattttcaaagagagtgacgggctctcaatatcaggcaaaagacaaacagtatcaacaagcggtcttagcagcaagat

SEQ ID NO: 1495 - DNA, 23336 bp, synthetic construct
  misc_feature 1..23336: note = Synthetic
  source 1..23336: mol_type = other DNA
aagttcaggtgtattaataacattttccatatgctctatataaattgcttcaaaattacaagagtttatattttcattatttttaaatttatcagtaatagaatcaaagattttgtcatttctatcaaaaattttcaaatactcttttaatgcagtacttttttttacttttttccaagattcaaaagtatctataaaatcacaagtttttttccaacaaattatagaagatttcccatcatattgtgattctataaatttccaaattatatttttttctttttgtgaccaattatgctctagtgaaaatctatttactaaactatactcaatttcataatttttatagtaaatatggtgtatatcactataatatgcattataaagcatatctaaacaactagcatcatagctatctaaattttttaaaatcattgatgcaaaagggtattcgctaaaatcagattgtgttaatgcataatgccctaattgttttaaaataacatgacccaatagtgttttataaatttcaagatttgattcttctaaattccatttttctttaagtacaaatgcggaatgtaatattctctcaggacagattttaattaaaatttgaccatttaattcatcactattttctatatacacacctaaaaactcagtatcaaaaagagataaatcttccattttataagtacgtttatctctttttattatgtcaccataaagttcaacttcattaacaaaaaagatgttaagttgatttaatttattttgtccattatggattaaagagtgatttataattttatttatctcttctttcattttgtaatctacaggtaggattgtagatttatttacatatattatttcaagttgcatattttctcctttttttattttttatagtatttaatatatgagacaaatatatgtccattaaaattaataaaattacttaaataataaaaggaaaatataaatgcttattaatattttagaagatgcttgtacaggattaagaaaagaagagaaaagctataaagttattgatactttaaaaatattaggattaaatggatattggtttgaaaatattgaagaaaaattcgaaatttattgtttatttgaaaacgaattaaacctgtctaatgaagattttggaactttatgtctattaacaaaggattgtgctttagaaataggaatcagaaatggaataattaatgttggataatcttaaagcttagtaaatagcttttttagtagcattagatatgaaaattagaaaaaataattataagtaggattgaaatgaaaatagcattagtcgtaacagataaatttaaagattataaacttttagaaataaaattagatgaattaaaagtaaaagaagttatttcaggtacttctaatggctatgttatgcttgaagaatatattaaaacaagacctaatgtaaaaataagtttggcaaaaggagaaaatcgtccaattataagagcatataatgcaataaatgaagctgataatgtagttattttcgcaaatggagatggaattagaacagaacattcaatagcaaatgctctcaatgaaaataagagacttaaaatttatccttataaatcaaaagcttttaatatagaacaacaaaatgaatatataaaaatttctatgtgtggcaacttgcaaaaagcttcaaaaatagaaagtgtgtgtttgaataaaaaagaggttgaaaaactgattgatagattaactgaaatgaaaaataaattataaaataaagctaatgaaaatacttatttattttaattaagcctagaatttccaaaattagacaaataattgtcctataaaaacaataaacttcttttttataaaaggagtttattatgtcaacaagaatattttttcaaacttttccaaaactttttttaccagagtttcaaaaaagaaatagctggattgtaactgtttattcaaatgaaaatgaagaaaaagcagaattttataatgcttattttatttataaacactattattgttctaaatgtggaacagttgaaataactaaaaaaagagcaaaaagaagagataacttttattgtggttatacttgtaaagtttgtaaaaatagtgatttcctaaatttactttcaaataatgaattttttaaagcaaaaaatataagttttgagctttttgaaaatcaagatttttatcatattcaaccatatattcatattccatctgtaaattatgaaaataaagttatagataaaagaatagaactaagaggttataaatgtgataaaaaaatctataattcaaactattttaaagatgatttttttaaagaagaaaatatcaaatatagatttactgatatttctataaatgagataaataatttctttttggagagtttgagggttgaatatatatgtaaaaaagatgagattaaaaatagtatattttataaataatttgataaactcaatgaaataaataagattgataaaaggataaatattgactatttctatacattctcaaacaaaatttgatgattataatttttttagagagaagatggatgaagtaataaaaaaatatccaaatataagtaaatgttttacaaaaagaagtaaaactactgaatttgcaataagatattttgaagataagaatgtaatttgtgaacaacctgatttagcaattagaaagttggcaaaattaaaaagattagttgaagttgcaaatttaagtatctttttttatagagaagatattattgtaggtgcagaattaacaaaaaatacaattgatagagcaaaaaaattgaataaagaatttattatttttgaatatccgatattttaaaatttaatatattaaaaattatttatggagatattataaatgcaaattaatttaattgagttagaagaaactttaaaacagatgaatacttttaacttatttaaaaataatgatacatattttgatatattaggatatggacattatgaaaatattaacagcaatattttatcttattatttttcttctgataaaggacataatttatataaatattttattgaatcactttttgagctgttaaatataaaagaaaacttttttactttctcgaaaacaataagagaatattctacattaaatggtggaagattagatattttaattgaaacagatggatttattataggtatagaaaacaaaatttatcatcatgtatataatgatttaaaagattatgaaaatacaatttcaaaaattgcaaaaaaaggtaataaacaagctattttatgtttattatcacttgataaagtatctggattttctataaaaaatatttctcatatagaattatggaataaaatatttgaaaaaatagaattcaataaatttatacttgataaacatattattttacttaatgaagtaaaaaaaaatatagaatttatcacaaaaggaatacaaatggaagtagaacaaattaaatttttacaaaaaaattcagaaaatataaaaaaattattaatattaaaagatgattttgcaaaagaacaaaaaaataaatgtgataaattaaaacaagaaattgatgaattatttaatgataaaataataattaaaacaggatttgcaactgtaaataataaaggatactttttaaatgattatatagtttatgtagatattgaaatagataatattattattgcaatagatatcgttttagatatttatcagaaatggaaaatttttttatttgatagaaaagagggaaaattaaacaatagagtaaaaaaaattttagatgatcatgatattaaagttaaagaagaagaaaaatatgataactgtattagagcaaaagttctaaaaactgaaaatatagaagattgtatagaatttttagaagattttttaagaaatttcataaattaaattaattttaataaattctagataaaacaaatatagagcgaatcaataaatataaaagaatttattcaattaaaatttagacaaaatattgtccacttaaaactataaacttctcattattcttatgggaagtttatttttgaaatactcataaaaatattatgtaaaagcaggaagatttttttatgggactaatatattataactatgaatttaaaagttcaaaatatcaagaactttggaaagatgaattagaaaataccatttcaaatatgcaaaaatattataaaaatcacatgagcttaaatgcaattttatcaatatttaaaaaagtatttcatattacaccaattacactaaaaactgatttatcactaaataaaagatatttaagaacacttgctatttatcttttacttacatacagtttttaagaaaaagaaaaaattgcacttgaatttcaaatcagtttaaatgaattagaacaatttgaaaatattggtattggttttactaatgatattaaaactttttttgaatattttaaagatgactatttaatagaaagaaaaagtaatttagcttttcaagaggaaatttcattaaatttaacagatggagttttaaaacaaatagacaaaatattgtccacatagaactataaacttctcctataaaatatgagaggcttatatgaaaatagctacaaaaaaactacaaaatatcaaactacaaattacttttccatttgcaaataaaaatgatgaaaatgagctaattatttatcaaaaaactatacaagaagttatgaaactttttaatcaagagagattttatatatcttttaatcgtaataataaaggaatagtttgtgttaaatctattgttgattttatttatagtttggatgaagagattaaaaaatcattagattatccaactgttgagattttttcaagggatgaaacttttgagaataattttatttgtattacttcttgtgaaaacttatcagttaatctaaaggataaagagaatagtgatttccagttagatgaatatttacgaactactacagttgatttaaaaaatttaaaaatttgtatctcttgtgatattgaatatattttaatttaaaaggaaaatctaaatgaaaaaaacatcttttgtaatagatttgagtaaagaagattatattaaatcatatatagaaaaaactaattttaataaaactaaaatttataataaaaatgaagttgaaaaaattggtttagatggatgtaacagtatagatacttttaaagcaataaaatctatttcagaagcatatataaaagctgtaaaaaatataaatgaaaagattgatgaaactgtgattataattggacaagattatgtaaaaatgccacttgttgatatagaaatcaatatggaaaataaaatcattactaaaaatgatattacaaaaatcttacaagatatggttaaaaatcataaataccataatgattatattgctattcaagttcaatctgtatggttcgttttagataatgatagacatgtacttgacgtagtaaatcataaaacttcaatacttagatgttatgcttctatatattttgtagataaaaatatattttcaaattttcaagagatatttagtaaatgtggaattataaatccaagatttaaagccatgttttttgaaagaaagcataaatatgaactagacataaagggaaatcttattgaattagaaattttgagtgcttttgaaaaaaagtcatcttttggtaaatggctacatgaaagaaaatttgttttaagagagatttttaaaattttttgtaaaaaattaaatcaataaaaaaatagaaatccttataaaagattgagttttagacaaaagagtgtccaaaattttgtatatgatgttttaaataaattaggagaaaaagatgccaatagcactttatacaatagaagaatatatagtaaaagagagaaaaagagatacttattggttggtttttaatacagtttacaatgacatccatgcttttaaaaaagagccaaccgtaaatgaagatggttcaagaaattatttaaaaaaagagtttacagattataaagcaagagaagaatttttagactttatgaaaacaaattttccacaaactaagctgattgaagtttttgattttgtgagtacttgttatttgttatatccatatttaggtagtattgctattgattgtgaaaaagatgatgaagtttttatggctttgagtgaaaaatatggaaatccttacgaagatggtatcaaaaataatgctgttttttgggcaatgacttatgaacttgcattagagtctcataacgaaagaatggaagtaattgagggtgagtttggggattgaaagttaaaatatagattaaaaataatttataaaaggctataataattcaattttgttacagtaagaatacaggagtaaaatttgttggatgaaaaatatataaatttttttgagaaaattaggctttttaaagaagagcaaaaaaaacaaaaacagcgtggtctaaatgattataatatggtaaatgttgtaagaaaagaaaacgctgaagttggaatgcattcaaatgtaatctactcattaattgacccagatggattgcattatcaagatgatttatttttacaaatatttattaaagatgttttagaaataaatgattttggaaatattttaagtgttaatgctgaagaatcaacaaatgagaatagaagagttgattttactataaaaagtagtaattactatattggaatagaaatgaaagttgatgctggagatttggataatcaaatttctcactattatgatgatttaaaagaaaaagcatcaaaagattcaaatcaagaagttataatatattatcttacaaaaaatggaaaagatgcttcaatatatagtcataataatcaagttaaatacaaaaaaatttcttttgaaaaacatattttaaattggatagaaaattgccaaaaagaagttagaaatattacaaatctaaatgaagcttttgaaaattataaagatattgtaaaaaaaatcacaaataaatatgaaggaagagtaatgtcattagaaaaagaattattgaaaaaagaaaattttggattagctaaagaaattagtgaagcatttcaaaaagcaatgcttgaatataaggaagaacaaataaatttaattattaatatggtaaaagaaaaaggattagaatttaaaacatgttttcctaaggatacgtcaatagaggtattatctgaatatataatcaaatttttagctagagatgatcattatttgatacaagtttttgataaaactggttatggattagatgttgataaattaaaaaaagatattattttaaaaaaactaataaatattgataataggtttaaaggtgtatattcaaaagtatatggtcaaatgacaattaattatcaagatgtaaatgacgaaaaattaaaggatttattttcaaaattaataaacttaaaagatgaaaaataatgatactatctaaatctcaatatatccgaggacttcaatgccacaagtccctttggctttataaaaataagccaaaatgatattgtatttcctatttatgattcgaaaacttctgttttagcaaaaagttcaggggtcatatgctactagcaactacaaaaggaacatttgcatttgacaaaaatattgcaaaaaccaaaatatatagatgatagacaatatccaattattagaaatgttggaatggatgtacctattactagatttagtaaatagtttataatgaattattgtttctatataattaaaaaggtaatttttcaacaaaagcttttccactatctggtgcaagttttgcatatcttaacgtcattcttatatctttatgattcatcaatttttgaattgtaaagattggagttcctattatcgctagatgacttgcaaaagtgtgtcttagagaatggaaaactattttgttttttctatcattaaaatctattccttcattgaaaagttcatcaagtatttttcttaatcttctttctggatttgaaggaaatagttgatcatttaatttcaaatcaacaacttttttttccaatagactttttaaatcatctgttaaaaaagctttatatgtactattatttttaaaatcttttaatgtaagcaaattatggctgaaatcaatatcttttttttgtatatttaaaagagtttctagtcttcctcctgtttttaatgcaagattaaaaagtaaaaaaagtgtttcatcatcttttgaattttcataaagcgtttcgatttcttcttttgttaaaaatctttctcttgcattatctatatcgagtaagattatatatttagaaaaatcattttttataaaatcatttttaaaagcatattttataagagcttttaagaagttaagtatattattaatagatttatcagccaataattcttttttcaatacagattttgttttttttagttgaaaagtaaatttttgtatttcatcttttgttatattttcaaaatctagatttttaaagtagggtagaatgtaatgagtaaaatgagatttatcagtaagttttgattttccatcttttctcaaagtaaaatattcatttgcaatagtttcaatagataaaacatttctttttttcttttgtgcaattacaggtggttcttcaccatttctttgttttgtgagtatttcatttcttttttgattacaatatgcttctcttattccttctgaatatttacctattttttgccatacttttttattttgttcatttttgtatgtgatataataagttttatcaattttgtcatttgtagtagtttctctaaaatagatgccagttagatttgttttaatcatttgaaaattttataccctatttataccttcagaatatgtaaatcatattttataagctttatttgattttgtcaagtttaaactagtatcgataaaatagtatttaaaggcatatttgaaaatttaagttttatagaaaattaactttacttaggatttcctccagaacacgcaagttcgaatcttgctggggtcgccattttaaaagcccataaaataggcttttatttgaaaaaataatttaatattttatatatttttgtaagatatatttttttaggtgtccttataggatagtaaaaagaagtattctgggctaaaaataaagtagctttcaaatattgctggaagattagtaacacttttaaatatacataaaaaatatactgactttactcataatcttatagctttaaaagattttaaaaataattcaacttacaaagcttttctaacagatgaattaaagtacttattagagcttagaactcaaaaattatctttaaatgataaaatctttacatctaatcctgaaaagagattaagggctattttagacaatctttttaatgatggaataatacacatgatagaaaaaataaagttgtaatccatacattaagacatacttttgcaagtcatctagctatcaatggaacacctatctttacaattcagaaactaatgaatcataaagatataaaaatgactttgagatatgcaaaattaagtcctgatagcggacgagaagctgttattaatttaggattatagaataaaaaaagactgttcagagtctttgtgtcaaagattggtagccctagaattttagcatagttaatcttactaatcctaatttgtgccaaaaagtacaggttatggaacaagcattttgataactcattttttgtcctatttagtgttgacagatcactaccctgctattaatattaaatcattaataaagttattggttaattagtatataataatttaagttttttatttagggatttttatgaataggatattaagtttagatttgggtgttacatcatgtggatttagtgttttagatgaagttgaaactaatcaatattctcttatagattatggtgttgttatgagagacaatccaaatgaaggtggtactcaaagtgattggaaagcttatattcagcaacgaaaattaaaagataagaaaaaacaaagagtgaaagatttaaaagacatattcaaatcttttaatttaaattttgtagaaaaaaactatagtaatctttgggagctaagagctaaagatagttttgaaagaaaactacaaatagatgaactatttgctatatttagatatttagcaaaacatcgtggttataaatctttaaaaatggaagacttaattgctgagattgagtcacaagaaaagataggcaactgtgaaagtgatgatgttatagaacctaatagtgaagaatttacagaaacattagcatatcttgatgctttaaagtgtaagttcaaagagaaaacagtagctcaaattatctacgatattgagtcacaaaaagaaaatccaaattttagaaaccataacaactacaaatatatgataagaagagaagatactaaagatgagattgagaagatagttgaagctcaaaaactgttcggattttttaaagatgaaaaagaagcagaaaattttaaaaatagtattatagatgaaattatcccacaagaccctgtattactaaatccaaatcttataaataattgcttgatttataaagaagaaaaatctgctccaatctactcatatagttttgatatttttaatttttataaacatataaatgatttaaaaataggaaataaaaatgctacaaatgaacaaaaagagatattaaccaatgattttgaactcaaactaaaggagttgaaaaatatctcatcttataccattaaaggtataaaagagttacttgatataaaagatgatataaaaatatctggacttcgcgaaacaaagatagttaaaggaaaaagtgtagataattatttggtaaaatttaactttttagcacattgggcaaagtttgataaagagattgtagtagctttaaaagataaaataaattattttgacaaaatagctacaatatttcatatcaatataaatccaaatgctttaattgaagggtttagtaaatattttaaagaaaacaatctcttttttgaagaggaaaagattaaaaactttgctttatctctttacaaaaataaagttaaaggaacttcggcttattcatttaaagcattaaatgatttgatagtgcatatgaaagatggtaaaaatgaaagtgatgcaaaagagattttaggggtaagtaaaagtgaagattattcatcttttgagaaaagcataaagtatttaaaaccaatagataaaaatggaacactccgatatgagatagatgaaaatagtatctcaaaccatgtagtaaaatcgcttatttcttgggcttgtagaattattatagatttacatgaaaagtatggttcttttgatatgataaaactcgaatcaactagagaactttcacaacctgatgagaaaaaaagggagataaaaagtgcaaatgatagaatacaaaaagagtgggaagatttaaaagatagatataaaagtcattttgaagcattgggcttaaatatgggcaataataaagagtatcttttaaaaataaagctttgggaacagcaaggagaaatagggatatattcagggcaaagtcttgggatagttgatatccttagtgataaaacggagatagagcatattgtaccaagagagtgtggtggggcaaatgctgaatacaataaagcaatagatacaaaaaatgaaaatgctataaaagctagaagattgccattggattatcttgttgaagaaaaaagagaagtttttttacaaaatatagatgaactaaaaaatagtaaaaaaataaactttaaaaaatggttgaatttaaaagcacaaactttagatgaaacttttaaagaggtaaaagatgatgtaagtatgcatgctactagttatacggaaaaactattgggtgagattttaaaaagatattatccatttacagataaacaaaaagagaaccaaaaagtgatgcatatctctggtcgagcaacttcatatttaagaaaaatattaagtatagaaaataaaagtagaggtacaaattttcaccatgcagaagatgcgattttaatagcttgtatgagtaaatcttatcttcaaaatatctcaacaaattttgaaaaaaactatgagctaacacgtgaaaatgcaaaagataactttaaaaaaatagtacccttcataaatggtgcaaatccaaatgagatatttagttatttgcaaaaaagctatacacaagatatagaggaaaatccattttatacaaatgtgatagataatactctaaggattcctgcattttgggtgtctaaaaaacctataggaacaaaagctcacaatgaaactattcaatctaaaaagaacttagcttatcgtgttaatatagatagtttacttgaaagggtaaagccaaatcacaaaatgagtgctgagagtttttttgaacaatacaataaagaaatcttagaaaaaattcaagtttttaaagataatccaaaagattttacagctcaagcatttataaaaaaaagggataatatcattcagttattacaagaagcaaattttataacatcaaaagatgaaaaagcagatatagataaaaagctaagagatgagatgaaaaaacctattgaagatgtaaatggcaatactataagaagagtaaaaagagttggagaagatgcaaccattgaggtacgaaatggtcttgcatatactgcaccatcattggtttgtttacgatgtagttttgatgagcctaaattacaacttcaaagaatagatataagaagtcatgttcaaaatagaaataaaaatgatacacaaatagatatatttaataatgacttgattgaaatatatgttattaaatctaaaaaaattgaatataaagctataggagtattaaagggatttacagaaagtaaaggtggaagagcaaatttaagaaatccaaaatatccacttctaaaagacaaacaacctaaattatttcaaggagaattttctataggttcaacttgcggtatcaaaaaatacaaaactgatgcaagtggtagagttcttggattttattatttaggtagagttttagaaggtgataaagaagtgttttcaaaagtagtgacatataggaagatgtgatgggttttcaatctttatttataacaaatccttgtaaaataagtatcaaagatgataacctagtgataagtaatgacgatggacattttaaagttatattggataacttagtctcaatcgttattgaaactacacaagctactattaccacttatgctatctcaagattagctgaggagggtgtaagtattttatatgtggataaaaaatataatttaaatgctataaccctaccttttcatactcattcaactttttcaaagatagtacactctcaaatagatatctcaaaaccttttcaaaagaaactttggcaagaactgataaaacaaaaaatttataatcaagcgagtgtattggagtattttaaaaaagaaaaagaagcaaatgaactttatacttatattgactatgtaaaatcaggcgatagtgacaatgttgaagcaaaagctgcaaaggtgtattggagcagtttatttgataattttgtaaggattcaaaaaggagcagaagatgtgcgaaatgcatctttaaactactgttatgccgtggtaagaagtgcggttgctagatctattacaaatgcagggcttatgccatcatttggagtacaccataaaaactactttaatccctttaatcttgcagatgatttaatagagccttttcgtccttttgttgatttgcatataaaacaaacccttataaaatataatgagccagttttaatctctgcaatgaaacctgaatatgtaaatatattaaaccttgaatatgtcaatatacaaaacaatataagtgctgtaagagttgctatagatacagttgtgcaattggtacaaaaatcaattttacaaaaagatataagctttttggttttaccaaaaattgattttcaaagatatgaagatgagtgcgtatagatttatgtggttgatgataatgtttgatatgcctacagatactaaaaaggcaaagaaaaaatatagatatcttagaacaaaacttttaaaagagggatatattatgatgcagttttctatttatattcgctcatttcactcttatgaatcagcactcaatgggaaaaagaaaataaaagattttatagcatctaatactgttaaagggaagataagaattatagtatttactgataaacagtttgcaaatatggatataatagttggtacaaaaagtgaagaagaaaaaaatgcgccaaaacagctattgctgttttgaccattcaaaatctcctttgaaaaatcaaaggattattttaagtccccataagaaacttttagtttcacaaacccctttgtgataaaacttctaaatattagctaaaaaaagctcaaattgtcaatatttttttaactaaaactaggtaaaagcctatgaataaggctatctcaagacacccattttatcacaaaggggtttgtaggggtcttaaaactctgttactatatcagttacatctgtatctattttatcacaaaggggtttgtaggggtcttaaaacctaaaagtctttgtgcaacacttgtcatttattttatcacaaaggggtttgtaggggtcttaaaacgctttaatagttatgtctccaactgcatcaattttatcacaaaggggtttgtaggggtcttaaaacatataaccaataagcacaattctcttttttattttatcacaaaggggtttgtaggggtcttaaaacaaaactggtacaagttcaattgaagatacaattttatcacaaaggggtttgtaggggtcttaaaaccgaacaaaagtagtcggggtgagtgtatttattttatcacaaaggggtttgtaggggtcttaaaaccaagcattctttattatttctaacggtgaaattttatcacaaaggggtttgtaggggtcttaaaactgtaaacaggtgacaaatatctataagctcattttatcacaaaggggtttgtaggggtcttaaaacatgagttcaatagaaaaagttaagttttcaattttatcacaaaggggtttgtaggggtcttaaaacttagatttattatcttatcttggtgttattattttatcacaaaggggtttgtaggggtcttaaaactaagttcgtattgtcaaatgagggaaaattattttatcacaaaggggtttgtaggggtcttaaaacaaggaactactacaagagcaaagaaaagagattttatcacaaaggggtttgtaggggtcttaaaactaacaaagccctgtagttcctgcaactaacattttatcacaaaggggtttgtaggggtcttaaaactaatatcttgttctagagctttaacctgttattttatcacaaaggggtttgtaggggtcttaaaacccaccttttgaaagtggaactttaggatatattttatcacaaaggggtttgtaggggtcttaaaacactaagttatcagcataagagtagtagttaattttatcacaaaggggtttgtaggggtcttaaaactgactcttgtaatgattctaatttaacttattttatcacaaaggggtttgtaggggtcttaaaacacttttgatgggaatgcgagtacagtttctattttatcacaaaggggtttgtaggggtcttaaaactactcataagttcttaaaatattccattacattttatcacaaaggggtttgtaggggtcttaaaacaaagcccaagttctttaagtccttttgaatattttatcacaaaggggtttgtaggggtcttaaaacactgttttgatatttgttccacttactaatattttatcacaaaggggtttgtaggggtcttaaaacactgttttgatatttgttccacttactaatattttatcacaaaggggtttgtaggggtcttaaaacaaagtcattggatttgtattcttttgcattattttatcacaaaggggtttgtagaggtcttaaaacacaagtgcacttgcactcatccactccgttattttatcacaaaggggtttgtaggggtcttaaaactactcataagttcttaaaatattccattacattttatcacaaaggggtttgtaggggtcttaaaacgagttggtgcgggagtatttgatagattagattttatcacaaaggggtttgtaggggtcttaaaataaagaggttcaagatgttacaggttcttgaacttttcgtatattcaagtcatcatttcatgtcttattttctgttgacagatcaattttaacttgacgttttttcaagtgatttagctttttttaattattcgttttaattttcactactatttgcaattctttttctttctgtcataatctttaaagctaaagttttatcaatttttattctaaaagtatcgtgaatagtactaataacttttgaggctaaatacaaagatgtaataacggctccaactgttccaataccagctacccaagttccaatcataatccaaaatgttgatgtttctatactcatttaaaacctcttattatttaattttcgcaaaaggattaataaactctaacttatctaactcactattgtatgaaagcaatatggtcttactaaaaataaattcatttggtatttcctttacttcattattattgtacttctctaaaaacattaaaaatgaagttattgtattagtatattcttgatttgtaatttctttaggtattaatagtttaaatctgttaccattattcgcctctgccataatagaaaaatctaatgaatatttacccgatttgtctttaagtttattaggagaagaacttgacggaattaaaactcttttagcaacattatctccgaaaaaacaatcttttaagtcaagtaaccctttttttaataattgataatggtcttttcccatctctgataaaaaactgttaaagtatggttttgcaagatatataactactgcagtagccattagccattcaacacccatttttggttgagatggcacttcttccattgtaatagaaataccatttttatttactgtagtaacaaaatcattaagtattttcttttccctatcagtttcataaataataaaaatattagattctttcatcaattaacctttttaatttgaatatataataattccgatatttttttaaataattttagataacaaacccgacgttttttaattcattaattaataacccatatataagggctttagtttataaagtaattatttgtaatgtatctgttctacataagtaaagtaggttatcttagtagtaagctttttagctattttattctatacaattatctaattaaaatcagtagttaaaatacttgaatcataaaatccattttcatttagtttatttgatttgttttttaaagcaatactcttatttgataaataaaaagatttagcattttcattagaaatatttgagaagttcccataatcttgtattgcctcataactaaccattattctaagtttttcatttctatctattattataaattgtccagatgaagaatctcttcctacttgtatatcagtcattttttcccttattaataaattgcacttattttatttaaaatattgttatttattatcaagtgattaagaaatatgatctgtcaggacgtaaaactctaaacagcctctttctcaacctctaagttttggaataaaattagaaaatctcacttattggctttataacctttatgtagaaatataatttgtttaaaaaagtgttcaagaagtagaatctaaaaattctctcaaacccttaggatttttagaacaacaaaaatcattttttaagtcataaattaaaaaactcatttaattcgctttcaaacaatattgccaactatgaaatagttaaataccaatttcttaagctttatttttgtaccagctttaatttgttcaagtgcatctgttaaattaagtgtttaatttattgttcaatcctttagaataaattctatcagattgacacaaaatttctagcacacccaagctaaaagctgtacttttttaatttttctacttatttaaatatttagaatctatcttttagattcttataaattttatctttttccctttttccaacactcaatactaaaacaacaatttcttcatctttaacttgataagcaagtctatatccagcagtttttagttttattttataaacattttcatatccacttagtttatctttttctacttttggattttctagtctttcttctaatttctttttaaattgttcttttattgttgagcctaatttagtccactcttttaaagcttgaggtttaaattcaagattataagtcatctaaacttactttaactggtttttcaccatcatttaaagcttttccaacttctaatgacaaatgataatcatctataatatccatcattttttcataaagtttacttggaactaaataagcactagggatattatgatttaatattgctataacttcattatctgcttcatttagtaattgtgtaggagattttttaagttctgttatacttgcactataatttgctaaaattggttgcattttatatccttaattaaatatgaaatattatactaaatatagtatctttctgtcaatatactcaacaaacaataggacaagcaaaaacaaaaaaagccataaatgaaacaatatctttcatatgtgaaaaagaaaatataaattttaattggatacaaacaggtaaaggtgaaatatttattgatgaaagtaattcacattttcttcaaaatgaagaaaatatttatataaataaatcatttcaagaagaaataataaatgatattcaaaaactttcttcaaaacgacaagaatattattatcaacaaataaaggcagatgtattaaaagaagagttagaaaacaagtataatataagtgatgataaatgaatgatttattttttttaattactcataagattcttgattaatatgttcatattgacacaatattaattatgtgatagaatctctctatgaaacaaaggtttccttttttcaggagtgatgacttgaatagagagaatcataagtgggtagagcctaacagctttacctttttttatacttagaatttgatataaaatattgacctggtacaattacaatctaagttattttaaagttctattagaaagatttaagctagaaagagttaatattctttattaagataaaagaagatgtactttcaataaagctaaaaggttttattgagagtacccacttctcacaaaaccatcggaatgaacgacttgtatcgtttttgggatgaaaactctcgataaccgtaaaatgtggcagtttttggtctgctacttttttattgtctaaaaagtgttttaaaagataatattttagatttaataactcttaaagctaccattctaactactccatcatcaaacttttttctgaatactaaactaacatcagtttgtccagtttgagtatttcttgttaggctcttttcaatactactaaaactattcaatatttcaggaattttgctcaagtaatataagtcttcttcatgtttattttttacatgtcttatatactcttcttgaattataaatttatatgtacaaatatcaagttttgtatgtttttttatagacttacaagcttcttctttaatttttaactcaaaaatttctgttgtggtattacttgtaagagcaaaatctataaattcattgagattcaaaacatttcctaatttttaatttgtagaatactaacttaataatttttaattttttctttccagttcgtattgaaaatttaaaaattgggtacgattcttctccgaagtaaaggtttccttttttcaggaggaatgacctgaatagaggtaatcataaaaaggtgtagttttatagctttagctctttttttagtaagatagttgatatttcatcaatgagaggcaggggagtgctaaaaatataaattcaatacttatcactttatacgtagctacttaagttaattatgtcttgacatatataattttattatatataatacttatctgattagatgtatttatgtaaatctgattgagtttctatctcaaagtataagttttatatttgaagatggaaacattttacataggcgtgaagtggggtcgactagtactagtaatggttagtcctagatgactttcaactgttatcgtcttactttgttttaatataaaattttgaaaggattctaaatatggcagtagtacatttaaataatagtgctaaagcagaaagtagcgtaagagtttctggtattgatgcaaaaaaagtttctgctatattaatagatgaaactaaaaagattacaaaaggtaatttaaattttcttaaatcagttactgcatctctaaaaaactataaataaatgcctctaaaaattacacaaattagtaattacactagaggtgaatttaaaaaaatcataaaagatattaatatttctgttgagcctttaaaaaactatcttagttctatggcacataaacatacagtagatggatgttttattacttatttactggaagatattcgagataatgatagtacagtgttaggatatatatcattttcaaatacagtaattgatagtgattgtgaagaagcaaaaaatttgttaaatgttagtaatgggatgaaatatcctatcccaacattaaaaataacaagacttgccgttgctgatgattttcaaggtcaaaaattaggtaagttattaatagcttttgccgaaataaaagcttttattcaacaagaatctacaggttgtaaagctctcgttgttgattcaaaaaatgcagcaattgatttctataaaaatgcgaattttattccaattgagaattattcagatgatgattcaataatatttatgataaaaaagatatctactataaaagaattaaaaaaagaagaattatttgatgaaactattgaaaattataatgaaatttgtaaattatgtaatttagatactgaatcaaattttttaaataatttaatacaataacttttattttaaagtatcaaaaacttttttaattccttgtgctgcaactttttgttgaacttttgcatatcttcttgtgggtcttgtagaactgtgtcctaatatagctgctacaacttccatactattatctgtgttatttaaagatatttctccaattaaatgtcttaaatcatgtattctcatacttttattaatatttgcttctttaagtattctatcccaagcccatctaagattttttatttttgcacctgttactaaagatttaaatacatatccatctttatcttctatatttataaagatattatagagctcatcagtcatttcataactcatattcttttttgctttgtttatttcatatttaatagtataagttcttttttcaaaatctatcatatcccaagttaaatttaaaacttctccagttcttcttccatgtaataaaaaagtaaatatgtctttatataaaggttctttaaaatttattattgtattgaataatctttttgattctacaaaatctaaaggatattctcttgtattatcatattttggtttatcaactaaaattacaggattatttgttgtaatcttgtgtttaatcgcaaatttgaaaagagctgataaatctgcaagataattatcaacacttttgggagattttgtttttaatagatcatttgcaaattgttgtatattatatgtttgaatagtatttatttttaaattgtcaaattttgttttgaaatgacaattatatacactctttttattgatcaatgttttttgagatacagatttagaattaattagatgttctaagtacagttcccatagctgcttaaatgttaaatctttttttatgtaagtgttattttcaatctcatttttcatcgattctttttttaaaaaagcaatttttgcatttgttttaaattcatcattttcataaccaattatttttctatatttctttttattgattgtaaatgttgctaaaaatactttacctttttgactatcactatagtaacttattccaggataattagtctttgttgtttttggtattgccaaaggtgtccttttaggtgtcttttttaaatgtaaattaatgtaaatttataagttgtatattatagtatatgaacttataaataccataaaataggcttttttagtaagaattggaagtttatgtaaatataatacataaagatttcctccagaacacgcatgttcgaatcatgctggggtcgccatataccaaaataatctcataaaaccatattaaataaattataatcaattgaaaatgaatttgttatttttaactaacttaataattaggaaatgaattttaggataatattgtataacttaaagaaatagtaggaataaatatggatttaactgtacttatcggaataattggtgctattgcatctatttccattggtgacttattagaaggtggaaatcctgcccatgtaattcatatcacttcattaataattgttattccaacagcattatttgcagcagcagcagcttgtgaagcttcagcaataaaagcagcctatcttgaattaaaaatggttttcataaaattaccagttgattatgaatcacgaatagatgaattggttgaatattctattttagttaagaaaaatggtgtactatctttagaaaaatatcttcaagatatagatgatgaatttttaaaagaagcgatgaatatggtcgttgatggttctaaagaagagcagatagaagaatctttagatgtaattattgatgaaacagaacattattatcatagtgcttcacattattgg

SEQ ID NO: 1496 - DNA, 14906 bp, synthetic construct
  misc_feature 1..14906: note = Synthetic
  source 1..14906: mol_type = other DNA
tcgaggaggatgcccgccacaaaccgatgctcacctgcatcaagtgccacagtgccgatcctaattcaatggcggagtgcggcagcgaatgttttgcctgccacccggtcgagaagatcgagaaggtcgatgtggaggagcataaggtgatacgggagtgccgggactgccacgtgaagctcaaagaagcggtgagcaacatcgcgatgcccgaggggcagtcggtccagccgccgctcaaggagctgctgctccccccgcctgaagcgggagagggcttttaggcagaaaactatcgcgttttggcttatccttaaataaccattaagcatggattcggcataattgcgcactaaaaattttgagaggaaatggtcatgaaaagaacataccaaccgcataacacgcctcgtaaacgcacccatggtttccgtgcacgtatggcgacgaaaaacggccgcaagattatcaatgcacgtcgtgcaaaaggccgcaagaaactggctgcctgagaccgttcgccgtgctgaaacgcaacagtgagtttcagcgggtctatcgcaagggcaaaagcgcgcactctacagcgcttgtccttttctatctccccaatacccctatggtttccgtcggattcacggccggtaaaaaggtcggcaatgctgtcaagcgcaaccgtgcaaaacgccgtatgcgtgcgctcttttacgatgtttcgccgcagctgcttcccggcagctacgtgcttgtcgcgaaagcggcgacggttgaaactccctatgccgtcattgaaaaaagcttccggaagatgctggagcgcgtcggagcgctgcagtcatgatccgccggctggtgctgggactgatctggatctaccagcgcagtttttcgctgatcggacgcggaagctgccgctattaccccagctgttcggagtacacccgccagcagtttgaacaaaacccgctcctgcccgcgctctatcattcaacaaaacgcatcctgacatgcaaccagatgttccctgggggaatagactatgtcgaggtgtcgaaattgcggcccaatccgcaagatttaaccattaataggataaagtactggcttgttccgaaagcgggagaccgtttttatctcatcaaaaatttttcgtataaaggttaacgtgtgtttgaaaaaatgagtccaaatcagcgcctgattctggccgtggtcctttcatttgtcttctttctcatctacagtgcgatcttcccgccgaaacagccggtgaacgcggagcagaacgcaacgcagcagccgaaaacggcggcagagacgtccacgcctgccctcaccgacggcggggtcggccatacggtcgcggtcagcgaaaaggtggccaaccccgatgcgacgaaactggtgacggtcgaagcgccgcacttcacgctcaagatcgataccctcggccggatcgcgtcgaaggtgctcaaggacgagaagtactacgttgacggcaagccgacggagctggtcgcgcaggagggggccgagccgctctttatccgctttgccgacgaagcggtcaatgccgaggcaatgaaagtcccgtaccgcgcgaacgtctctgccgtcaccctgagcgaaacagggtcgcagacggtgcgcctggaacagacgctcccgcaggtgacggtgaccaagacgctgaccttctacggcgacggtcactacgacgtccaggtctccctctccaagccgatgcgctatttcctctatgtcgggcagcatgcggagcataaagggcagatggttatggcggtgcatggggtgatggcgtataccgccgacggcgtttccaatatcttcgaagacggcgatgtcgaggggcgcaccacgctgcgcgacgtcaaactgctctcggcgtttgaccagtatttcgcctccatcttctatgggctcaatcccgatatcatcatcaatgtcgaccgcgaccgcagcgacaacccggtggcatacctcgaactctccgactccctgagcttcaacggctatatcgggccgaaagattaccgcggactcgaagcgatcaacccgatgctcgtcaacgctattgagtacggctggtttacctgggcggcgaaaccgctttttgccatcctgatgtggctgcacggcatcttcggcaactggggctgggcgatcgttgcgcttgtggtgctgatccgcatcgtgctttacccgctgacctacaagggcatgctctccatgcagaagatgaaagacctcgccccgaaaatgaaagagctgcgcgagaagcataaaagtgatccgcagcgcatgaacgcggcggtcatggagctctacaagaaaaacggcgccaacccgatgggcggctgtctgccgctgctgctgcagatcccggtcttctttgccatttaccgcgttctgctcaacgccgtcgaactccagggcgcgccctggatgctctggatcggcgacctctcgcggatggacccgtactatgtgctgccgatcctgatgggggcctccatgttcttccagcagaagatcacaccgaacaactttaccgatccgatgcaggagaagatcttcaagtacctgccggtcgtctttaccttcttctttgtcaccttcccggccgggctcgtgctctactggctgacgaacaacctgctctccatcgcgcagcagtacatggtcaacaaacagtatgcaaagatcaaggcactgcgccatgatgctcacctggcggaaaagcagcacagcggcgacaaggcctgatcatgaaaaagatcgaagcggccacgcttgaagcggcctacagcgaggcctcgaagcactataactgttcgatcacggcgctggatatcgttgtcgttcagcagccgagcaaggggtttttgggtatcctgagcaaaaaggcggtgatcgtcgcccgtccgatagcggtagagttgccgtccaaagaatcggaacgcccggcagaggaattttatgagacggcgccggcggaaccgatcgtctatcccgaggatgatgagagcgagtacgaagaggtgtacgccgacgaggagtactacaccgaggacgaggatgacctggatgccatcgcggaggaggtcgaagggaaactcaacacccttttcgatacgctctgcttcgccctcgatccgatccgcgtctccgtctatgacgacaacaccctgctggtggagttcaacggcgaagatgcggcactgctgatcggcaaggaggggtaccgctacaaggcgctctcctatatgctctttaactggatcaacgccgagtaccagcttcagctgcgcctcgagatcgccgaattccttcaaaaccaggaggagtcggtcgcccgctatttgaccggggtgttcgaaaatatcgaccgcgacggccatgcgcagacccgggtgctggacggcgtgctggtgcagatcgcgctcaaacagctgcgtgagcgctaccgtgataagtatgtcgccatccgtacgacccgcgacggcggcaagtacattatcattaacgactaccacaactactgatcatgcacgatacgattgccgccatcgcgaccgcccacggcgtcggctcgattgccattatccgcatcagcggggaacaggccgcggcgatcgcgtcgaaattgacggggcagcgtccccttgaagcgcgtcgcgcccacctctaccccctctacaaccccgaaaacgagcttatcgacgaggcgatcgtcctctttttccgcggcccgcgcagttttaccggcgaggatgtcgtggagctgcagtgccacggggggcagatcgtcgccgaagagatcctcaaggcggtgctggcaaacggggcgcgtctggcgcagcccggcgagttcagccggcgcgcgtttcacaacggccgcatcgacctgaccgaagcggaggcgatcgcccggctcatcgaggcgcgcagcgaagatgccgcgaagatcctggccaagcagatgaagggatcgctgcgcactttcgttgaaggcaaccgcgatgccctgctggagatccttgcctattccgaggtgaccatcgactacgccgaagaggatctgccccaggacctgattaatcagattcttaaaaagctcgaaacgatcgccgccgcgctgcgccgtaccctcgcttcgagcgaacggcgccgcgggctgatgcagggcttcaaggtggcgatcatcggcaagcccaatgtcgggaagagctcgctgctcaacagcttgctcgattacaaccgtgccattgtcagcgatatcgcgggcacgacccgcgataccatcgaggagcaggtgcgcatcggtacccatcttatccgcatggtcgacacggcgggtatccgcgaagccggggacgagatcgagcggatcggaatcgaacgctccatcgaagcggtgagcgagagcgatatcgtgattgcgctgttcgatacgagccgccccctcgacggggaggacaaagcgatccttgctctgatgcaagcgcataaacaggagcgggagttcattgccgtattgaacaaaacggacctgcctcagcaattcgatgagacgccgctgcgcagctacacgcctatccgcatgagctgcaagcaggatacatcggcgctgattacggcgctgcagtcacggatggaccgtcagaatgtctccgaagagacgatgcttatctcgcagcgccagaccgatgccgtcaagggggcgctgcttgcaatcgaaaatgcctttatgccgttgcaggaccaggagctcgaacttttctcgttccatgtcggtgaagcgatccgggcactggcctccattacccgccccttcgataacgaagagatgcttgataagatgttcggcagtttctgtctcggaaaatagtattaagtgctaagtattaagatgaagtttcccgtattggcgatcgatctcgggttgaagcggataggattggcgttcactgccgacggaagcatcgtgacgccgctctccgccatcgagcgcaaaaaccgcaaccaggcatcgcaggcggtcaaagatgtcattgcggagtgggggatcgaaaccgttgtcattgggattccgatgggaggctccagcgaggatgagatgcgcagaagagtggcgcattttatgaatcttgtcggtttcagcggtcctatcgcctaccaggatgagagcggcagttccctggaagcggaggagatgatgaaaggtgagatccgctacaaacgcgacggccgtgtcgattcgctctcggcgatggtcatccttcaacgctgtcttggagtgtaaccccgaaaaacgccagtgcctcctcttcatcatccgtcagatcggcgtgacggtagctgctgtcctcttgtagaacggtgcggatgtgtttgacacaatattcaaagcattttgtacgggcacagaccatgtcctcaataaagcccattccgctgaagtggtaattctccccttcgttttcaatgcagagcagggtaccgtcgcagtgcgcttcgatcatttcgacaagctcgcggtacttgatgccgaattccgtggcctgccatcctatttcttcgagttcacggtcggtaaactcggcaacgccgtccccggtggtgtcgtcgtagtcggcattgcggacattgtattgcatgatctcctgccagtttcgcgcggccttgatcaggatgcggtcttcgacttcgacgacctgcatattgccgccgagcagttcggcgaggcttttaggctgtgtcggcatcagcgccgagggggcagggcgcgcgacggctccctggaagatatagcagcttcgcctgtcataggggggatggtggatatcccctttgatcgtgatgccgaagggtttgccgccgttgaccgcagccatcatgagcggtttgtcgacggaaatgatctccttgacgagattgaattttttcataggtgctcttccggaatttttcggcaattttagcacgcccccggcgcggggtgattaaagaatcggcttttcgaaacgcctaagcggcgcctaaactactcttccatgactttttggtacaatgcgcaaaattttttgtggtgcgcaggacgctttttgcgccggtgccgcccacaagtcaagggattaactgatggcattgaatgtgtattacgataaagactgcgatctcagcatcatcaagagcaaaaaagttgcaatgatcggtttcggctctcagggccacgcgcatgcggaaaacctccgcgacagcggtgctgaagtcatcatcggtctgcgcaaaggcggttcgagctgggcgaaagcggaagcgaaaaacttccaggtcatgacggtcgcggaagcggctgcggctgccgatgtcgtcatgatcctcctgccggacgaaaaccaggcggagatctacagaaacgaaatcgctccgaacctcaaaccgggcgcgacgatcgctttcggccacggtttctccatccactacggacgcattcagccggcagcagacatcaacgtcatgatggtcgctccgaaagcgccgggccacacggtccgcagcgagttcgtcaaaggcggcggcatccctgacctgatcgcgatcgagaaggacccgagcggcaatacaaaagagctggcgctctcttacgcttccgcgatcggcggtggccgtacgggtatcatcgaaacgaccttcaaagacgagacggaaacggacctcttcggcgagcaggcggttctctgcggcggcgtctccgcgctgatccaggccggtttcgaaacgctgacggaagcgggctacccggaagagatggcgtacttcgaatgtctgcacgagatgaaactgatcgtcgacctgatcttcgaaggcggcatcaaagacatgcgctactccatctccaacacggcggagtacggcgatatggtctccggtccgcgcgtcatcaacgaagagtccaagaaagcgatgcgcgaagtgctcaaagagatccagaacggcaaatttgccaaagacttcgtcctcgaaggccaggcgggctacccgcgcatgaacgccgagcgtaaaaacctggcggcacacccggtcgaagtgacaggcgagcgtctgcgcgcgatgatgccgtggatcaaagccaacaaaatcgtcgacacctccaaaaactagaatagcgacgcacttgctgcgttgctctcctcgtcacgtactccagtgcgcttcctcgtcggcgccttgcaattacatcactctttcagtttttgaatcatattttatataatggcatcaatgatgcgatgaaggcaaatacagtgcaggaaaagaaaatctaccttgtcggcggtgcggtcagagacgcgctgatgggccgggaggtcacggaccgggagtacgccgccgcgggtccttccccggaagagagcatcgaagcggtcctgagacagagggaccttaccatcaatgccattgcgtacgacgagcaggaagacctttacatcgatccctatgaaggcagggaagatgtcgagaggcggatgctgcgccatgtttccgaagcgtttgcggaagaccctatgaatgtactgtatctggcgcatttccgtgccgcgttcggtaccgggtggaacattcataccacgacaagggtactgatctacgggatgcgtgagatgctggcgcatctgccgcctgagagggtatgggaagaggtcgaaaaggtgcttgcgcttccggacgcacacctttttttcgaaaccctcttcgagctgggcgtgcttgatgtcattttcccgtccatttatgtgttgacaacgttcaaagaggggacaaagtaccaccgcgaggcctctttgtttgcgcatgtgatgatggtgctgcgtgaactgaaaaacgaatcgctgctgctgaagctgacggcgctttaccatgacatcgccaagcctttctgttttcggacgtacggtaacggtaagcgtcatggggacccggacaaaatagcgccgcggatcgatatgcagatcccggcggcaatgaaagagagggtactctttctgagcgaaaaacatgtcaaactctccaaactcccggagatgagcgtctaccacatcgcggatttttttgagagtttccataaggacgacacgctgctgatcgatcttatccgttttaaaagagcggatgaccagggccgttttaccgatgtccccaggcctgaaatctgggaaagggcgctttttaaaacctttgatgcgatcagcgcatacaacccgaaaaagtggatcgattcccaggcacagagacccgacgacaaagccgtcgccctgcacgtacacctgcaaaacatcgagatcgtcaagcggacgtttttcgcatagcttccggcgggtatcctgagcgtttgccttatcggatatcccgggagagcctgctcttctctcccgtccgcagcatctcaatcatttcaaaaaaggcttctgtgatagccttttacctccttttcatccgttcagaatccgaattccaaaatccaacgttttcaaatgattttatattcgcaaaaatagcattaatactgtagttgattccagatgatgtttgcaagcgtgaaaattaaatctatgatgctatagtgtttcacgaatgtctctatggagcagagcgtgaaacatgattacgacaagattttgacgcgtctgaccgttattctgcagcgtctttacgagggtgagatactcactgtctccgagcttgcggaagagttcaatgtcgatgccagaacgcttcggcgggatttcaaagagcggcttatccgctttcccatcgaaaaagaggggcggggctggaaaatgagggacggcttcaggctggagcgcgaccgcaaacccgacgaggagctggtgctcgacatgctggagacgcttgcaggtggggtcgggagcgggtttcgcttcgctggcctccacactgctgggacgtctgaaaaatcaccgggtgagtgcaattgattcgaagacggtgatcgaggatatcctggaacatcagcatctcttttcgcagatcgaaaaggcgatcgaggagcaccgggtcgtctccttcgcctacagcggaaaactgcggctggtcaaaccctgcaagattgtctcctttgaggggtactggtacctttacggcgaggaggcgctgagcgaacggctgaaaactttccatcttaaaagcatcggagccctgacggtgacggaagagccttttacctgcccggaaaacgctctcaccatcctgaaccgggcaatgaacgcctggttcgaaccccacaacgagcctttcgaagtcgttcttcatgctactactgaaatcgccaaatatttcagccgccgtcccctctccccgacccagcgtcttttgaaaacctatcccgacggctccatagatttctctgtaatcgtgaccagcgaccgggaattgctgcacgaggtgaagaagtgggtgccggatcttttggtacgctctcctcgtccgctggcgatgcaggcgcgggagatggcacaggcgttcgcggaagcgcaggtaaaaatgatgctggagtaaaaatcggacatgatgttgtccgggtagttgagtacgatgagggtatgaaaatgaaacagagactaaagacaccaggaaaacatgctgttaaccgtcgaaaatttctcggccttctggctctgttttttctaccgaaaatggtgccggcaaatgaaagtaatcgcatgctgctggatcaaaacgcactgctgcgggcgaaggtgaaacggttagatgcggaagccgagagttggaaacgggtgaaaatcgtggtggagtgatggaacagtttctttaacaagctccaaaatctgattgaatggttttggcagattcttttttctttcaatcttcttttttttcaaacacattgatataatagattcaaattgagaatcacattttgatgggagtgtagatgcgcattttatctttggatatcggttcaacttcctgcggttttgcagttttgacggaacagggaaaacatcagtacatacttcacgatttcggtgttgtcatgcgcgataatccttatgagggcggtacacagagagaacgtagcggctataaacagatgagacagcttatccgcaagcggaaagatcgtgtttcattggtgaaacaaatgtttggggaatatggatatgacgtagaagagagaggctttacagatctgtggaaattgagaacagtcgatgcttttgaacggaagctcgcttctgacgagctgtttgcaattttgcgctttttagcaaaacataggggatacaagtccctgaaaatagaggatttgattgccgagattgaagcacaggagaagatagatgattgcgaaattggaaaggttgaagcccctgacgttgaacacttctcggaaacccttgcttatcttgatgcattgaagtgtcatcacaaggacaaaaccgctgcacagatcatttttgatatcgaaaaagagaaaaaagttccagcttttagaaaccacgataattaccgttacatgatccgcagggaagacgtggccaaagagattgacatgatcataaacgcgcaagaaacattcggtttctttggcgggaaggaagagactgttaagtttaccgaagcgatcaaggcaatcatcattcctcaggatccggtcgtgcttaacccagatctgataaacaactgcattctctataaagaggaaaaaagtgcccctgtgtactcttacagttttgatttgttcagcttttatcagatggttaatgatcttaaaatcgatgggaagagtgcaacgcaggaacagaaagagaaactcatcgatgagtatacggcaaaaatcaaagccttaaaaaatattgcatcgatccgcgtcatagatgtgaaaaagctgctcggaatcaccaatgaacgtatcaaggttaacaatacagccgagtataaaacggtcaaagggaaaaaggaagctaacactctgcgaaaattctattttatttccaagctctcgaaatttgaccatgagatcatgcagagcattatgcaaagggaggagcaactgtttgatgccatggcgacaatcattcatcggaatattgacccgaacgcgcttttggaaggattttacgatcttttcaagcaggtaggtctcaggtttgaaaaggaacggatcaaaacgttcgctctacggttgcacaaagagaaaagcggcggtacgagcgcctactcgtttaaagccttcgaagctttgacggctttgatgaaagaagggatgaacgagagcagcgccaaagagatattagggatcggaaaagctgaggattattcaacatttccaaagggcgttaaatacctgaaacccatcgatagacaaggaacctttcagtacgaacatgacgagaacaggatctcgaaccatgtcgtaaaatcgttggttgcctgggtgaacagggttgtagtggacctgcatgacaaatacggccctttcgacgtgatcaagctggagtcgacacgggaactttcacagcctgaagaggtgaaaaacaagatcaaatcggccaatacaaaaaatcagaaggaatgggaagaacttgctgagcgatattcgaaacacctggaggtgaaaaagatacctgaacgtgaccgaaacaggagcctgctgaaactcaaactgtgggagcaacaggaacaaatgggaatttattcgctcaaaccaatcagtatcgatgatattctaagcgaaaaaaccgagatagagcacattgtaccgcgggcctgcggtggaagtagcgccgaatacaacaaggcaatcgattacaaagacgtcaacatgcgaaaaggcaaccgtctgcctctggactatctcgaaggcgatgctgaagatgccttcatagtattcattgacggattgaaagaagcctacaagatcaactggaaaaaatggaaaaacctgaaagctgaaacgcttgatcagacgtttaaagaagcttcggatgaggtttcgatgcatgccaccagttacaccgaaaaactgctgggagagatgctaaaacgctattacccgtttacggaaaagctgaaagaaaaccagagagtgctgcatgtttcgggacgtgccacgagttatctgcgaaggatattgagcatggacaacaaatcccgcgataccaatttccatcatgcggaggatgccattttgatcggtttgatgagccgcacctatctgcaaaatatttccaccaatttcgaagagaactacgaacagaccgaactgaatgcaaaagagaactttaaaaagatcgtgccgctgatcgatggggcggtaccgaacgaagtgttcgcacatttgcgcgaaagctacatggaaaatatcgaagagaacccgttctatatcggattggacggtagtttgcgtgcaccagcattctgggtatctaaaaagccgatcggtacgaaagcccacaatgagaccatacagtcaaaaaagaacatggcctaccgtatcggtgtagatgcgttgctcgataaagtgagaccggtacacaagatgagcgcggaggcgtttacaaaggcatatgacaaggaggtctatggaaaagtacaggtcgcaaaagataacccgaacgatttcacggctagggcattcgttgaaaaaaggggaaagattgtagcgatgctgaacgaagccgcgtttctcacatcgaaagaggaaaaagcggatatggacaagcggctgcgggataccatgcgtgaaccgatcgtcgatgtgaacgggaacaccgtcaggaaagtgaagcgggtaggggaaaaagtacgatatgaagttagaggtggcttggctgcaatcagtgattcaatgattgcaatgagatgtcattatacgggtgaaaagtatttgcagcttgataggatagacattaaagatgtttctattttaaaaaagaacactgccaatacgcttgatatatacagcaacgatttaattgaagtgtatgttttggaaaaaaagagcgttgttctaaaaaaggttggttcattacgatcctttgttgtgaaggccaacggttcgaaagaaataaaactaaaaaatccaaaatttcctagtgtagaagaatatcaaccaccatcatacacgtcatattttgcgataaagaaaacgtgtggcctgaaaaaatataagatcgatgcttctggggtagtgcaaggatactattatcttgggaaagtcatagaaaatggcgaagagctttttgcaaaggtattgacgtacaagaaggtgtaagatgggttacaaatcgatcttcataacccatccatgcaagctccatatcaaaaataacaaccttgtggtgacggtggaaggtgaggataatcttgttgccctggacagtgtcgcttctattgtcatagaaacgccgagggctacgttgactacctacgctatttccaggttggcggaagcaggggtgagcatattatatgtcgacaaaaaatacaatctgaatgcgatcactttgccctttcatacccattcgacattcagcaaaatcgttcatgcacagatcgatatttcaagaccgttgaagaaacggctctggcaggcgtttgtcagaagtaaaataaccaaccaggcggctgtcctggggtatttcaatcgcacgggcgcggtaaaaatactcgacggctatgcagaaagcgtcaaatctgacgatgcggacaacgcagaggccaaggcagcaaaaatatactggagcgaactgttcgagaatttcatgcgggtacagaaaggggcggaggacgtccgtaacgcgtcgctgaactactgctacgccattgtgagaagcgccgtggcgaggtcgctgacgaacgcggggcttatgagcgttttcggtatccaccatcagaactattttaatgcgttcaatctggccgacgacgtgatagagccgttccgcccgtttgtcgacctccatgtcaaactggtattgctgaggtatgatgacgaagtgttgtcgagtgctataaaggccgagtacgtcaatattttgaatataggatatgcgaccgtcaacggtgaactgagcagcctgcgtacggccgtcgatctcgtcgtgcagtcgcttcagaaatgtatgcttgaaaaaacgcttgacggccttttgctaccgactatcgattttgaaaagtatgaagatgagtgcgtataggttcatgtggcttatgatcatgttcgacatgccgaccgatacgaaaacggcgcggaagaagtaccgctatctgcggacaagattgttgaaagaaggctacttgatgatgcagttctctatttatatcaggtcgtatcactcctatgaagccgcattgaatggaaagaaaaagatcaaagacttcattgcatccaatatgttgaaagggcggataagaatgatcatgttcacagataagcagttcggaaatatggatgttctcgtcggcacgaaaagcgaagatgaaaaaaatgcgtcaaaacaactgttgttgttttgaaacattcaaaatctcctatagaaaataggattattttaagtcccctaactcaaacccctctgagttaaaactgtaaatatcatagcaaaagctgcaaaaagaagtcaaatttttcggctttttttgccactaagccccgaacttaaggtcttctgagaactcctattttaactcagaggggtttggaggggtcttaaaacatacaatttttgctatatgcgttccgaactattttaactcagaggggtttggaggggtcttaaaacgcgtctcttgctgaagattctgcagcctggattttaactcagaggggtttg

SEQ ID NO: 1497 - DNA, 23645 bp, synthetic construct
  misc_feature 1..23645: note = Synthetic
  source 1..23645: mol_type = other DNA
caaagccttgaggatgccaataagttgggtgcgttccaggatgaggataagcagggctatggaaatattgataatggccacaatgatcataatgatgaggatgatggcaatgttgatgtcaaagaggtccagccactggaaaagttgttcatttaactggcgggaggtaagcgcatccagttcaaagggcaggagcgtacgtagagaggaagccagttcatcggccttttcctcatcttccacaaatatctcatagccccccgtttgggtactgtcccatttgttcaggcgttgtatgtgcctgaggtcgcccaccaccaccgtattatcgatctcctcaaaatcagtctggtaaaggccggctacgtagaaataacgcaggaggggaggtttgggagcctcgcgcacaaaatagatgctcaccttatcattaagtgcaatctgtagctttttggcgagggccgtgctgatgaggatactgtcgttgcgctgcgcatccagcccgtgcaagcggtggccctgtttcaggtaggagttgaaaagtgaccagttaaaggagctgtccacaccttttaataccgttccctcaaagaggtcgccctgcttcagtatgccggcttttttaccaaaagcctgtatatggctcacttcttttagattacgcaactgccggtaaaggctgtcgtccaggctaaccggagtttgctcaagggtggggttcggctgataattgattatttgaatatgtcccccgaatccaattactttgttgcggatctccttacgaagtccggtacctgtggccatggccaggatcataatgatcatacccagggcaatagcccagatggaaatacggatcaccggccgtgagattttacgggtggcggtgttacttttgaggattcggttagctataaaaaattcgaaattcaacctatgcgtatatccaattggattgccaaatatagacaattgacagtgctgatgttgctgttgccggttatggtttttggacagctcaacaaagcggagaacctgcttaccggggctgaaagagcaggcgcttaccttcccctggtgtacactaaaaaggtggcggtggtggccaaccagacttcagtggtaaaggatcagcacctggtggattaccttttaaagagcaaggtaaacgttgtgcgggtactggccccggagcatggctttcggggaacggcatcagcaggagaacatgtagcggatggaaaagatacccggaccggtttgccgattgtatccttatacggctcgcacaaaaaacccaccgcagcggacctgcaaggtatagacgtggtaatttttgacctccaggatgtgggcgcgcgtttttacacctacatttccaccatgacttacgttatggaggcctgtgccgagaacggggtggaaatgatcatactggatcgtcctaacccgcacggctactatgtggatggcccggtattgcaagaaggatacgaatcatttgtagggatgcaccatgttccggtcatccatggtatgactatgggtgagtacgcccgaatggtaaatggagaaggctggctgaagggtggcgtaaagtgccggcttgaagtggttagctgccagaattacgatcaccttacggagtacatattaccggtaaaaccatctcccaaccttcccaaccaggcggccgtggcgctgtatccttccctatgtttctttgaaggaaccaatgtaagtgtaggacgtggaacggatacacctttccaggtgataggcgctccgtatttcagggaagggaccaccacatttatcccgcgcgggaacgatggtgccaaaaatcccaaatatgagggtgtggaatgcaagggctttgacttgcgcgagtttgcagaattctacgtagatggtttaggggaactataccttttctggctggtggaagcctaccagatggccccggataaggccgcttttttcaccaggttctttgatacgctggctggtacggaccagttgcgtaaacaaatagaggcgggtaagagcattgaagagatccgcgagagctggcaggcggacctggctgcttttaaggatatacgcaggaaatacctcctgtatcctgattttgaataaacctacggtatccggtctttcatccggtttaccatttccattacggccgggcaggcttcggcatttttacgggtaagttccagtatctggtgcatcttattgcgatcggtatgcggatactccctgcaggctttgggccttacctcgtacaccgagcagtagttatcttctcctaaaaaggggcaggggagtacctggagtacaaaatcaccatcttcatcaacccgtaagtattggtctataaattcggcagggcgtaatccaaagtgtttagccaggcggttgatgtcggtatccgtaaagagagggccggtggttttacagcaattggcacaattgaggcagtttatctccgcaaaaacttcatcgtgcaactcatggaattgctcgtccagttgccttggtttcaggctttttaagcgtttaaagaatttttgattttccttgcgttgggagcgcgcctgctggcgaaattgatgcaggtccattacttaccgcgtccctgtagtacgatcaggatggtatagatgagcaccttgagatcgttaaagaggttcatgttctcaatgtagatcacatcatatttaaggcgttgtaccatctcctccacgttttcggcatagccgaattttaccataccccagctggtgatgccgggttttaccttgagaacgtgcttgtaatgaggtgccttacgcatgatctgctcaatataatactggcgttccgggcgggggcctacgatagacatctggcccaggataacattgacgaactggggtaattcgtccaggcggtatttgcgcataaagcgcccccagttggtaatacgctcatcattttcactgctcagttgcgggccgtccttttcagcatcctgcaccatagaacggaatttgatcatgtcaaaactacgtccgccatgccccatacggctttgccggaagaaaataggcccggggctggacatgcgtaccatgatagcggtaaaaaggaataagggagagagaataatgaggaccactgcagataccataatgtccatgaaacgtttcaccaccttttgccacaggggcataagttcatggcgaatctcaataagcggggctcccagggaacccagccgtactttccccgaaataatgtcgtaggtatccggaatcatcttaatagtaacgttggtatcctccaaaatattgatgatctcctctaatttttcgtgttccgaagattctatcgcaataatcacttcttcaattcgttcacgctcaattatttggggtagctcggtgtgcgtgcctaaatgttcaagatttttttctaccaggaagcggatgttgttgtgaacgctcacaaaacccacaaagcgattgccgttactcttgcccggggccatgtccgtgtacaattccaccgcattgtcattgctaccgatgagaatggtattgaaccatatttttcctttcttgatgcggatggacgtacgggtgctgatgaggaaacggaagagggctgtaatgatgaactgggaggaaaaataaaccaggaagccccggtaataatcggtgtagttggaaacccaatcgtccaggatgagcgcaaaaaagatgaagatgctgcccagcaggctggcgttgaaggtgtagatgagttccttgagccgcgatctgcggtaaatatcgcggtaaaaacccgtgatccagtatacggtgatccagaaaaaggctatgagcaccaggcccaggtaataattatcactgaaggtaagctccgagccttcaaaacgctctttttcaatcactatcctgcggaaagtgtagagggccgtatagctgagaccggccgcaatgatatcccaaaaaatgtactttaatcgctgtaagtagtcgtttttcatacgctagtacacgattttgagattatccaatagtattttatgaggtgcttcgctgtcggtttcctgaccggctataaggatctgaaaaccgatggcatcggagtatgctgtaagctccgtaaccaggttcacgtagatctttttccattcatcattgggcagtagaaccagggtgctggccctttgggtgatccccccgggataattagccaccacacccactaccataggcacttccgttttatacgtcatctccagatacacacttataccgtaggtaggaagggaataggcttcggaagattcgagttcgaaaaagttccgttcgccctccaaaactatttttcctgccctgccgttattttcggcttgttcagggtttacgaaaatttcacccggatcgttggttttgatgaccgaagtatcgcttcggttggtggccgtaaggttgaggccattctcatcaaaggtctccacctgcaggatggtggcgctactggcatagcgggtataagggctatcgagttcaagggtatccagctcggtaaggtccagtgtttcgcgtagcacctggtagggcgtataaatggcgcgggtagccccgatcccgttcatggtgataccgggataaacttctaccaaggtgggcccgctattgggtacaggtacggttgccggcagctcaaatacgcctacagccttgccattggcgtaaatccatgcggtggttattgcactatgtgcagaaccctgggtggggtaaaaagtggaatctacctgtatggaggggatatgcaggtaagcaggagtagtggcctcgaaactttcgcggctacaggatactattaaaagtaaagaagcagccagggctgcaaagcgtagtcttttggccatatttcaggcaatcacattgagattgaggttgatcttttccagcacctgtcgtgctacatccaaagcacgatacccgtcttcaagagtaacgtacacgggggtgtttttattgattgcttcaccaaaagttctcaattcttcttgtattgcgttggttttgaggctctctggcttctcaaaatagatctgttttttctttccgttgcccaaatccattaccatggcgtagggattttcttcgtctacaaggttttgcatgcgaataacttcactttccttttccaggaaatcaacggtaatgtaagcgtccctttggaagatgcgggtcttgcgcatattcttcatggaaatacggctggcggtaaggttggccacgcaaccgttatcgaattcaatacgggcattggcaatatcaggggtatcactgaccacggctacgccactggcgctgatctttttgatgttggaaggtactacgctgagtacaatatcaatatcgtggatcataaggtccagcaccaccggtacatccgttccgcgggggttgaattcagccaggcggtgggtttcaatgaacatgggcccctgtatgtagttgcgtgcggccaggaatgccggattaaatcgttctacatgccctacctgggccttaacgcctgcttcttcactgagctttataagtttacgggcctgctcgggggtttcggtaatgggcttttctataaaaacgtgacgggaggcacggaggctctgcactgcgcagtcgtaatggttgagggtaggggttacaatgtctaccacatccacggcacggatgagtttctctatggtatcgtaatgggggatatcaaattcctgcgatactttttcggccacagcggggtccggatcgtaaaatccttttaactcgtacaggtctggtaattgccggatgcatttcaaatggatcttgcccagatggcctgctcccaaaacaccaatttttaacatacaatgggctttgcgcgcaaaggtaaacgttttgtgaagagcgcatctttatttcggcacgggctattcacagtttattgttatttatttaaattaagggggtggcagattaccgcaagggagttgcaaattagccgaagctatgcctatggaccaacaccgacataaaggacaacgaaacaaactgatacgcacgcttatacaaaaaggcgtgcgtgatgaggaggtattgaaagccatctacaaggttccccgccacgtgttcatggattcttcttttgaagattttgcctaccaggacaaggcttttcccatagcggccgggcaaactatttcacagccctataccgtggctttccaaactatgttgctggaggtgaagaaagggatgaaagtactggaaataggcacgggcagcggctaccaggcggctgtgctgtgtgaactgggggtaaaattattcagtattgagcggcaaaaggaactctttgatcaaacccggatattgctccgtaaactaaagtatccggcccacctgaaattcggagacggttttgccggcatcccggcctacgctccttttgatcgtatcattgttacctgtggggctcccaatattcccgcttcattattggagcagcttaaaccgggtggacggatggttattccggtggggcaggatgtgcaacagatgaaactggttaccaaaagtgcggatggccagataaaagaaggggaccacggggattttcgttttgtaccgatgctccgtaaccggaatgcctaaaagttttccttaaagggagtaaccagccagaaaaagtttttataccagattacccggaaggtaatgcgcacttcattttgaagattgtccgtagaatatataaaactcatatctacctggtataggtcatcgtagccttccgtgggcgtgaacagggtttccaggtattcggtttttccgccttctttacgggctttttggtagtagtctttaagctggtttacgctgttctggtaatcacggtaccattcttcgtagtttgcgttgatggtaaacacatcccgttcggctttttccccgttgtgctgggcacgggcataatcgcgatagtccgatacccacatgaaatccaccgtattgtagtcttcatcggttatgagcttggtgtacaccaactggccgtaatcttcaaaatccttttccgtttgggctgtggccaggccccaactcaaacccagtatacaaatacttaatacatacttcatttagtaacgattatctccgtccaacaaatcacctaagccgcccagtacactgccttcttccctgcgcttgccgcccattttgggggcgctggcaattatgcggtcggccaggcggctgaagggcagggattggatgtataccttgccgggcccttgtaagcgggccaggaaaaacccttcacccccgaaaatagcatttttaagtccgccaatgtattccacatcatagttgacggccccggtaaaagccacgaggcagccggtatccaccttcaggctttcaccggcctgcagttccttttcaataatggtaccaccggagtggacaaaggccattccgtctccctgtatcttttccataataaagccttccccaccaaagaggccggtacccagctttttctgaaaggcgatactgatggaaataccgcgtgcagcacagagaaaggcatctttctggcaaattatggagccgcctaaggaggccaggtctataggaatgatcttgccggggtagggagacgcaaaccaggccctggctttgccgcttccctcattggtgtatacggtcataaaaaggccttcaccggtaagcaggcgttttccggctgaaaccagttttccgaaaataccacggtcctgcgggctgccgtcaccaaacaccgtttccatacggatgtgggaatccatcatcatcaggctgccggcttcggcaattacactttcctggggatcaagctcaatttcaacggcttgcatttcctcgccatgcaggcggtagtctatttcgtgggcgggcatagctttattttccctcaaaggtaggaagtaaagcttatccttgcctaaagaaagctgaccttaaggctgtagctttttgcaaacaggctgctatctgtatacacgtgcttgttatgcaaaagcttttcgatgtgttgggccaggcccagagtgttggtctctacgctttgtacgctgaggctgcccttttcatccactttaaagtgaatggtagcgtgatgatcgcccattttgcccaggataaaatcggggtaggtaaggagggcaataacctggttgctgaggtactccatctgcacctcttcctttttttcttctccgccatgggcggtggctgtggctatgcttacagcgagcataagcatgcttaatgttccttttaatgatctcatgatgttagcgatttgtggttagcaaattttacacggcaaagggacaaaagaggtccttaatcaaggttagccaggtatggtctgtttattataatgacgttatgaaaggcattggtgagatggccgtttctgaagcgattgttacgacaaaccgggttttgttgataccgggcctggatagactttacacaaagttaaagggtggtaaaggcgggttttatacggggtattgtagctgcaaaccctggtcaaggccacggcaaccccaggtgatacccctgccaggccctggtgaacggtagtataagaatctgaaagaaaggagcgtttttaagaatatgaaacgcaaactcaagagtggaccgcatgaaatgaacggtaaaatgggtgatatggtatattatcacctgaacggcagatatgtatcccggaggatcgggaaaattgataaaaaacgtttccgagaggaggcagtttttgaagatatgcgaaggcagcagagcgaatttggcctggcttcccaatacggaaaagtaatacgagcgggcttagggccctattaccggctcttcagcggtccggaatgtagtggccggttaacgggggccttatgccgctgccttaaagagggagagggcaaaaagggtgaacggatctttagcaaatcatcattggcgggactagcggggtttgcgctaaatgccagaaagcgaggagtttttgagtgggggagccgctgggaatttgaccgtaaacatagccggctctacctggggggaaagagggggagttggtatgatccggtcctgacgggtgcccaggtggaggaactggtggtaggggtggtattacttagcccgttgatctttaaggaaggttatgatttgttgctccgggaatggcacggccgcagctttttttacgcgattgatccggacgatgtggagggccaggatttactactggaaccggaggagaaggaggtattgccggagggattattggctgtgggggtgatgggatttacctatgctaggggtgaggctggtagggggtggatagtggggagtttgtagggtggagttttgtagttgggagttggtagtctggagtttttagttgggagttggtagtctggagtttttagtttggagtctggagtaggcagtttttagttggtagtttttggctttgagggttagggccaggaagggatttattttggatattgaaagctgaaagggaggctgttctgtagatccattaatggtttacggaacggtctctttggttttgggaaggagaaaggaaggattgggaagatacgatcaggttgaaaaggggagaagcgggatattgaaaaaacaaaagccccaccgaagcagggctcataggtctttcaaccttcggcatatagccttattgtggaaagattgaatggtaaatgtaaataataattttttaacaactcttttaaagctccaaactttggaagagctcatgagtaggaaatgaaattatcagagtaccctattaacggcccggtgaaaccatcatttccaaagtttggaaatgatgagaggagttacttcttgtatttaaaaaatcaactatgaccaaactcacattctcttttgacgcaggaaccaactctttagggagtgcggtaattgataaagaagccggcaagatcctgcatagtggagtgagcatcttccccatgggggtaaacctggaaaaaggaaccaaggaggaatcgcgcaaccttatacgcaggctgaaacggcaggggaggcggcagaatttccgttcgcgcatgcgcaaggagaagctggcgcaattgctcatagccaaaaggatgttcccggatgtagacaccttgtaccaaaaatattttgagggggatgggcaaagtttccgtgaccgatgggaaaaagtgatccgtatgacaccgctgccggaggagttgcaagactacttccataaagatccctaccagatccgccaccgcgcctttaaagaggaaaggctgagtttgcacgaaattggccgggcactgtaccactttgcgcaaaggcggggctataaggaaacgctgcaggacgatagcgaggaaaagggcaagatctaccagggcgacccggagagcggtaaaacaggaattgatgaaaccaaggaactggtggcgcaattcggcaccctgggtaatggtttgtaccaccaggatccgcacgacaaaaggcaccgcaaccgctacaccctgcgctctatgtacaccaacgagtttgatacggtttttcgcgggcaacagccgtatcacccggaagtgctcaccgaggaattatatcaaaaactggggggcatccatccttcggatactcaacaaaatggcgtgttgttttaccagcggccgttgcgctctatgaaacacctgatcggtaagtgttccttagaaagcggaaaacctaaagctccggcctctacgctggagtttgagagattccgcgcctggcaaaccattaatcaaataaaatttgaaggccatgaactggaagaggatgaaaagcggcttttactggattatatattgagcgccaaaaagaaactgaagtttgagcagctggccaaaaagctgaaaaagccggtggaacgctttaactatgaacctaaggatagcattgcggcttctccggtacacgccaattttcaaagcatctttaaaaagaagtgggaccaattcagtgataaggaaagggaggacttgtggcacttaaaatactgggcggaagacccggaatggctggaaaagcaattggaaggaaaatatggcttaagtgaggaggagatcaaagccttcaagggttttaaaatgacgaaggattacgccaacctgagccgtaaagccatcaagaatatcttactgttcatggaaaagggctaccgctacgatgaggcggtgttgctggccggggtgcggaatgctttaaaaccggaatggtttgatgaattggagttgtacgaacagaatgaaatggaagatcgggttctgaaggctgcccgcaggaaagagaagggatctacttccattgatagagtaagggcttatctcagtaaagagcatgaagtggatgagaagcatctggataaactctaccaccatagtatgaaggaggagggggatggttctatgaaataccttcctgccccggaggagttgaaaaatcccattgtgatgcaggcgttgtatcagctgcggaaggtgtacaatgctttggtggatgaattcggggagccggaggaggtgcggattgaactggcgcgggagttgaaaaccaataaggagaaccgggctaagatccggaaacgccagcaggagttggaggtggagaatgacgagatcaaggagcggctggataaggaaggggtgccgcacagtccggccaatatccagaagctgaagctaatgaaggagatagagcgcatagcagggcgttttgccaatcccttccggccggatgagaatttcggcattaccaaaagctttttcagtgagggggcggtgcaggtggagcacattataccctattccatttccatgaacgacagcctggccaacaaaacgctttgcgatgcggataccaaccggctgaaaggcaataagaccccttaccagtattttaaggaacaccgcccggatgagtgggaagagatcaagcagcgcatctttaaaatactgccttatcaaaaggctaaacgttttgtttcggaacaaaacccggatgccgatgatttcatcagccggcagctgaacgatacgcgttatatctcgcggcaggccgtagcttacctgaaaaagacctgtaaaaaagtagagatcacggaaggaagcgtggtaagtatgttgcgctattactggggcctggacggggtacttacgcctagtcttacgctggaagctccggacggggaatacctggccgccctggatgagcgggatgatattatttctcatacggtctaccatcctcaaaccaaaaagaaggatactgtggccctggccaagctgggtgaagtggtgcacgggcaggtgaaggacgggcgcttttacctgatcaaacaacgggatgatcaccgtcatcacgccctggacgctatagtggtggcctttgccaaccgtagctacctgcagaaggtatctactcttttaggagaaggcctggaaagaaaggagatcaaatattcacgtgatcatcaactggaaaaaccctgggaccgcttttacactgatgtgcgaaaggcgatagaaaatgtgctggtgcatcaccagcacaatgaccgggtagttagcaaggtgaaaaaacgcttgtataatcatgagggagaggtgaagcgtaaacccaatggtgaggaaatgtttgctgagggactagcagcccgggggcaattgcacgaagaaagtgtattcggaatgcatgcgggagagaatggtgaactgtacttccacaaaagagattctttgaatagtattaaaggctataagcagtggcgtagtattgtaagcccgcgggtgcgggaagctatttatgagagggttaaagaactatatcccaaagaaaaactggtgaatggtaagttgcctgaaacttggagcataagtgacctggataaagaggatcaaaaccatgtattcttcataacggatgaagagaagaatccaataccgcagatttttctgggtaataaaagcggagagccggtgccggttaaaaaagcgcgttttcgggaaaagatcggccggccggttcaggtaaaggaatccataaaccaatatgtaaagcctggtagtaaccaccactgcatggcgtatataagtgcagggaatgagttgcaatttgagtttgtgactttttgggatgcggtagagcgtaaaaagcagggtgcacccctgtttcaattaccagccggaggtaaggaggtgaagaatatcttcctgaggaaccggatctacgtattggaaatagggagtgatgaattggacgaactgattgagaaagaacagtacagtgctattggcaattatttataccgggtggagcagatgtctccggccagttactatgtgcagttcaggaagcataccgctgcgcgtttggataataagaatgattggcgtggcttttcaagcgccaaggcatacggattattgaatccgcaggaggttactgtggacgtattggggcggattaagagacgttaatacaacttttctaaagtttggaactttagaaaagtaattgaaaatggaaactctacaggcggaacatacctatcatattttcaaccgggccaacggttatgaaaagctatttctctccggtgagaattaccgctttttcctggagaagtaccggcactatatagggccggtagtggatacctttggttattgcctgatgccgaatcactttcattttttgatcaggataaaaagtgcttcagagaaccaaaccttcaaggtttcaaaaaccttgaaggttttataagcaagcaattcggcaatttcttcaattcctacgcaaaggcctttaataagcagaataataggaaaggaagtctatttatgcacccgtataaacgtaaaaagataaacgatgaaaagtacctccgcaagctggtccattgcatccaccacaacccggtagttgcaggattagtaaccgaaccagaacgatggaaacattgcagttatgctacgatcatttcagagcaagaaacctggctggaaagggaggaggtattgaattggtttgaggatagagagaattttatttattgtcatcaactgccaccagagttaagcggtataggataagaccttgaaggttttcaaaaccttcaaggtccatgaagaaaaaatatgatcaaacgcagtttatttttcagcaagccttaccacctggctacccgtaaccgtcagctggtgatccactccaaggaggagaggcgggaagaggttacggtacccattgaggatgttggttttatggtgctggaaaacccgcagatcacctttacccaatcggtagtggaggccatggccgagcaaaatgtggctatggtgttttgcgggaaaaactatatgccggtgtctatgcttttccacctggatacgcacaccactcaaaccgaacgattccgtgcccaggtaaacgccagcgaacctttaaagaaaggcctttggaaacaaacggtaaaaacaaagatcactaaccaggcggccatgctggaatggcggggaaaagaaccggaagcgttgcactacctggctaagaaggtacgcagtggcgatccggataatatagaggggagggcggcaatgcggtattggaatgagttgtttggtaaggactttagccgtgaacgctttggcggagcgcccaacccagccctgaattacggttatatagtactccgagcagcggtagcgcgggccctggcgggaagcggtttgctatccagtttggggatccatcaccgcaaccggtacaatagcttttgcctggccgatgatattatggaaccttaccggccttacgtggatatgctggtgagtgacatgcatgaaggaggcatgaacactgaagtattgggtaaagcggaaaaggccaagctgctgaaagtcctgacttgtgatgtggtaattggcaaaaagaagaggcctttgatgatagcactctccgaaaccacctcttcgttggcggcttgttttgaaggaacggcagaccgaattaaatatccccggttttgagtggcctggatcattcacgttttaatgcttaccgtattatgtggcttttcgtattctttgatttacccaccaacactaagaaggagcgtaaagcttacagtacttttaggaaaaaattgcagaacgatggttttgtgatgatgcagtacagtgtatacacgcggcattgtgccagctggcaaagtgcgcaggtgcatattaaaagggtaaaatccattattcccggtgaaggacaggttagtattttacagattacggataaacagtatggggacattatgaacttttggggtaaaaagaccaagccattagccccgcagcccaaacaactggagatgttctgaaaaatgaaaaaccttcaaggtttctgagtccctgaaggtttgttttaatctttaacttttgcggtaaatctttgatctatagaaagttctatcaatcgatagtgtcaaagatcattcagttcaatcaatccacaaccgtccacaaaggctataagcagatttgaaaagtgtcaaagatcattcagttcaatcaatccacaactttgttttggcaaacttaaataaaattccagtgtcaaagatcattcagttcaatcaatccacaacaatctttacggagccttcgcctcctgcagagtgtcaaagatcattcagttcaatcaatccacaacacatctattgcagctattgttagcttaacaagtgtcaaagatcattcagttcaatcaatccacaactcaagacggtgattcttgaacggtcgctttagtgtcaaagatcattcagttcaatcaatccacaacccctttccagttcttcagatttttttgttagtgtcaaagatcattcagttcaatcaatccacaaccatcaaagataaaacttcaggaatagttaaagtgtcaaagatcattcagttcaatcaatccacaaccaaaaggggcaatgctggatacctcatcagtgtcaaagatcattcagttcaatcaatccacaacctgaaactccgagcttggttacggcttataagtgtcaaagatcattcagttcaatcaatccacaacccaattctgttaggatcgtagaaattattaagtgtcaaagatcattcagttcaatcaatccacaaccttttaggaaaagcactacgcacaacatcaagtgtcaaagatcattcagttcaatcaatccacaacaagcagattgaatcagatttgttaagtacagtgtcaaagatcattcagttcaatcaatccacaacgctttggttaaagatcccgatacaggacgcagtgtcaaagatcattcagttcaatcaatccacaacagtaaacaagctttgcgcggttccgatcctagtgtcaaagatcattcagttcaatcaatccacaaccggcacaaaagagtttaatcactcacaaaaagtgtcaaagatcattcagttcaatcaatccacaacaagcagattgaatcagatttgttaagtaccagtgtcaaagatcattcagttcaatcaatccacaaccggtggatgactaggatttaatggtgtggtagtgtcaaagatcattcagttcaatcaatccacaacatgctgaccgttagagtgccagaagaggtaagtgtcaaagatcattcagttcaatcaatccacaacccgcccgctgatgaattccattggcatgttagtgtcaaagatcattcagttcaatcaatccacaacaagtaattcaagtgatgcagacgctataaagtgtcaaagatcattcagttcaatcaatccacaacgccgatgatatgtcagaatcatttatgcttagtgtcaaagatcattcagttcaatcaatccacaacctccaattgtcaattctgatgtcaatccctagtgtcaaagatcataagtgtcaatcaatccacaacctggcgcaaccaatccattcaagcctacggagtgtcaaagatcataagtgtcaatcaatccacaacctaatttccttaagcgtacttggcggtttgagtgtcaaagatcataagtgtcaatcaatccacaacaaaacaacggaggttaatgagggtaaacccagtgtcaaagatcataagtgtcaatcaatccacaaccaacatcgccagtgatgttccagtagagatagtgtcaaagatcataagtgtcaatcaatccacaacgacctggaggcaatagttgatagtgacgcagtgtcaaagatcataagtgtcaatcaatccacaacggaaggtcccggagtacctgaaacttctctagtgtcaaagatcataagtgtcaatcaatccacaacataccggctattggtttacaatagaaccctagtgtcaaagatcataagtgtcaatcaatccacaacaaaattaatatcttctaaatctgcccaattagtgtcaaagatcataagtgtcaatcaatccacaaccatttaaagaatctactacggtggttacgcagtgtcaaagatcataagtgtcaatcaatccacaacctgattagcacctctgcgcgtaaattttctagtgtcaaagatcataagtgtcaatcaatccacaacacttagttcttaataccttaaaaagctataaagtgtcaaagatcattcggttatgcctgcctggttttattttcagtggtagacatgagctcgctttgcttcggttcaatccatccacaacccgttcaaaacaatgctgctatgagtgaacagtgtcaaagatcattcggttatgcctgcctggttttattttcagtggtaggcataagctcgctttgcccggttcaatccatccacaactagtttttgagttgctagtttttagttgctagtgtcaaagagcatttggtatcccttatttccgtgaaatccatgcccccaagaacctcttgtaagttatcacttttatatcactgcccgacctgaaaaatggccagtatattttgaagcttataaggacaaggctccttttaagcacggctatgtagctttgccggactcccgattttaccatcctccggatttaaaagccattccttataaacagcgggtggcgtcttatacaagatgatctttggtacccaacaaagcggctattggtcttttctcaatagaaaagctatttttaggggtaccgagatgttgtatatgaataagcctacccacattttttgttgccttgcatttttcattgctactatagctaacgcccagcctgaagaaacagccagggtgctacgggataccctgggtgagcggctggtgacgcttcacagtcctctttttgaggaaacctaccgttttgaagtgggcacccatcattttagcgtaaagcgtaaaaagatcctggattccttattttaccgtaccccggatgaagtacttcacttttttatggtggatacggctgagcaggaaatataccaaggtgccccggccatgcgaaaaatacccataccggtgaattcattctttttggatacgctttttgatccggatactggtaaaatactggcggtggacaccatacgttccgtagtggtgcaaagccgttttctatttaccatcccttcggtaaacgatttctttgaccgcatgaagtggatggaccgttttgaggccctgcacccggagtataaagtatccgtattcaaacattccggttccggcccgttcatgcatttgggggattacggcattcgtgatgccgtagcccacctggtggcctatatgtttaaaagggaaacggacgattggtttatcctcaacttctattgcccggatgcacgctttaaggagcctgacataaagatcgtcatgcattatgatccttcctgaaattacaaaggcagttttttcacttctccgtcctgggttaccaaaatcacctgcttctcgatctcggttttaaccacttctttaacggcctgtttttccggcttttccggtttgggtgctacattgaacaacaactcatattcaatctgtaccactggttttaagaggctggagtttataacaaagtcataccccttggcggttttgggcatataaaactccgaagtggttttggtggcgggtacaaaagtgccgttttcctgcaccacgttcaacttattactgcaataggccgtgtaactttggtattgttccagggggtaatgcatggcaaacccatcggagagcagcttttggaattggttaaaatcctcgcccaggatcttttgatagcggcttaactgaaggttgagcaaggtttcggcacgcgccatgagttccgccttttttgcggccagatcatccacaaaataatccactcttaccaggtcatagatctcttcacgtgcgcataagctgaccagttcattgagcattgccggttcggtatagcggaaatgcaggttctgcttcagttcaaaacccttggggatttcgttgtaggtgtctttactgaacagttttttggtgtgttccacctcaaagatgggtatgaaggagatcatatccacgtacacttctacggccgtggctttggaagtaagggccgcttttatagcctcaatcttggagctcaccagggagtcggtctcacgctgggtttttccggtttgggttatcgtaaaaatagcgaggtaactgtcggcttcgcaattgtagagtcccttaatactgaaggtgtgatttcccggtccgctgaggctggtaaggctgccggcctgcggcagccttaccgctgcggtttgcatttgtacggaagaccggaaatcgtaatttcctcttacctgggcttgtatgcgggtacctaaaaataccattgaggtgaggagaagcaattttgttgtctgcatgattttaaggttttaaattcaccggcaaagcagccttatccggaaataaaaaccctgtatcccggctgttttggacttgtatgtattttacaagccttttacaagcttcattacgaggagcttattagttttacccgagcccatgacaaaagctgagtctgaaaacttcttgcgtcttaaagagaaggtgcatcaaaaggcacaagagcgcctttctatccgcaaggagtttgccgactggagtcttggggatattgccgattttcaggctgatctgcaagcccagtgcaaaagcagtgtgagtgagaaatggttttacaaccatttgaaaaagcagggccgcagtttacccagaatagacgtgctgaacctgctgagctgttatgcgggtttcaggagctgggatgatttcagcaaccaggctacaaaggataaaggaaaaacaaaattgaggtctttgttatacctcatccccctggcattactggtactgatggccttttgggcctggccggcaggagaagaaaaaaccgtgatactgacggatgcttatacgcgtgaaaatatttctactgaaagcgtgaagatgtggtttaaagaaggagtgtatgtaaaacccgttttcggccagatcaaagatcccccggaagataccctttacctggatggtccttattacaaaccacaaaagagatatgtaggcccgagcgatacgttgtggattacgcttttcccggacgattatgcccttatgctcaactatttttcacgcagtaccactaccaactggcaaaagcgacaggggcaactgatggaagcttttcatcccgaagcaaagatctttcaaagccacccgcgctatgaaggcatagaaatgctgaaccgggatgagtttattgagcggctgatcctgccgatcaacagcttgcgtaacctggagatacaggatattgtataccgcaacgataagatctatcgcctgcgctttacccaaaaaaccgaggaagatgaaaaagaataattttttgctggtattgttgttgaccgtctcaggatatggcgttttgggccagacctaccaaagcctggagaatcgtttttctcgcgaggtattaaccagtatagacagtgcagccttcagggagcaaggccttcaaaaggtaaggtcgttattttacaaggctgatctttaccaacgcaatacgggcaatgtaagcaaccagagctacattggtggcagtgtggaggatatgttttacgtggaagagggggatagcctggacctgaagcccatgctgaaggctattgcccgtataatggatagttccggtaagcatgaaccgaagttgaaggtgcttccttctaaaacgtacctggccagtgtgcaaacggtaaaaacccatccccagctcagttatttcctgatcctgaaacgggtacccaaacagtttggttccagtagggagatgatgtggcaggtttttctgagtattccggttattaaagagtaagcccggaggctaattggccggggagaccggctccatgtgcatgaccttctcacaaaaggctgtggccgcatccagcccggatagccagtttttggatttaatatccgaacctataaaatgggttttgggcgtacgcagtttttgcaggtgatgccgatcatccggggtacccagctcttcatgtacctttgggaactcttctacgtccacacgccagtctttttcaatatagttttcataataatacagggtaagtaccgggcagctgatcttttgaaaggtttccggcaccatggtagtttctaccagctgctgcaggtttcgcaggctaataacggggtaaatggtatcccaatattgttctgccaggggttccgggtgttctattttacggtggtcaccggtaaatatgaggtaggagatctcgtcaccccagggtgtattcagcaagctgcttcccagttggccatcttcaatgttgggggatatgttgataagcccccatatttcatccgggaaagttgcggccagttttaaagccagggtacccccggtagaggtactgatgatgatggtcttttctcccagctggcgggcaatggccaggtcgcggcaggctttttcccatactttttcaggagtgaaattgatcatggatgaatccgctgtttttccatgtcctgccatcctggaaaggtaaatgttaccaccaaagtgttcggctagttttacgtttagcggctaaccgtcacgatagctaccggcaaaaccgtgcaggtatagaaaactgtatttcgtttttcgggcggtagcattataccagattatgcgtgcttcattatccggccttaaggagcgggaagcctcgtaatgctccaggtaatcttccagttgtgcaggagaaccgggaagcccgggaatttcttctgtatataccggatcttcaggctgagggcctagcacaaaacccaccagcactaaaaacaggaaaatcccgataatccaccaatatctacgatccataagctttgagatagacaagagaagaaccccagaaaatctggaaaggtttaagctctattgattcttcatcaatggctgtacagaacgccccctttctgtttccactataaggatatacagtccggaggtgaagtccgttacatccaaagtggggctaagcggttggtacaggcgtaattggccacgggcgtcatagatcctgatataacctttttcgcccgtgtttatatgaagtatgtcttgtaccgggttggggtagatagttaccgaaaccgctttttgcgctgggcgggaaaagaaatttgcattggtcagtttcaggatacggtcatcatgggcagcggggttgttgttgcgcccgtcccggttgctggtggagaggtaaatatctccatccggactaacgcatacatcgcgtaaacgtccgtattgattattaaggaaagtatgggtttgtacaatatcctggccactggcatccagctccagcacacggagatcacgctctttaagggttaccagtaaaaggctgttttgccactccgggatggacgggtggttgtaataatccaagcctgcaaccgccagggtaggggtccaggcaaacaggggctccgttacattgttgttggtgcaaaagcttacctcctggggcaggttgcaaaagccttctacatccggccagccgtaatgcccgtctttggtaatactattgatctcatcatcgttggaagggccgtgttcagagctgtaaatgatcccgttgggagcttctacgaggccctgagggttgcggtggcctatactccagatgtagctgttgggatagggattgtcagccggcactgagccatccaggttgaggcgaagcactttgccggcaagcgaattgaggttttgggaagaactggtgttttcagcatctcccgtagtcatcagaagtttacggtttgcggttactaccaggcgtgagccgtcatggttgttgttggcggggatattatccagcaataccacggggttttgcagggtatttccctggt

SEQ ID NO: 1498 - DNA, 23192 bp, synthetic construct
  source 1..23192: mol_type = other DNA
  misc_feature 1..23192: note = Synthetic
cgcccggtggcgatgccgatttcagcccccatgccgaattcgccgccatcggcgaactgggtcgaggcattgtgcatcacgatcgcactgtccacgcgggtcagaaaggcctcggccgtggccgggtcctcggtgacgatgctttccgtatgcccggacgaatagcgggcgatgtgcgccagtgcgccgtccagcccctcgacgaaacgcacggacaggaccggtgccagatattcgctggaccagtcgtcctcgcccgccggaacgatgccgtcggccagcgcctgaaccccttcatcgccgcggatttcgcagccggcctcttgcagggcggcaagaatgccgccggccatgtgccgcgcccgccggtcgatcaacagggtctccagcgcgccgcagatgccggtgcggcgcatctttgcatttagcacaaggtcgcgggccatgccggcatcggccatgccgtccacatacatgtggcacagtccttccaggtgggcgaagacgggcacgcggctctcggcctcgacccgggcgacgagggaccgcccgccgcgcggtacgatcacatcgatcaggccgctggccgccagcatcgcgccgaccgccgccctgtccgtcgtgggcaccagttgcaccgcatcgcccggcaggccggcctgcgctaggccggcctgaatggccctgaaaatcgcctgattggaatggaaagcctcgctgccgccgcgcagaatgacggcattgcccgccttcaggcacagggcggcggcatccgccgtcacattggggcggctttcgtaaatcacaccgatcacgccaagcggcgtgcgcacccgggcgatggacagcccgttggggcgttgccagtccgcaatcgtctcgccgacggggtcgctcagtcgcgccacgtcttcgagggcgctggcaatagcgtccagacgatccggcgtcagacgcaggcggtcggtcatggcctcggacaatcccctggcgccggcggcttccagatcgcgcgcattggccgcgataatgccgtcccggtccgcgcggaccgtctgcgccgcatgccggagggccgcgtttttctcatccgtttccgccagggccagcacccgggccgccgtgcgggcgcgcttgcccatatcggttatgagcgtgccggcgtccgcatttgccggtttcgggtctgtctgtgccggctcgcgctggttggtgtgtgtccgggacatgtcgttatccatgacaggtcattccatcatctgggccatgtttcaggcgccatactcgatccgccgcacgcaaagcgcggccttctgcgtcatcgtcaaaacaggaccagatcgtccctgtgtaccagagctgaccgccctacatagcccaatatatcgggaatgtccgacagctggtgcccgcggatccggcctgcctcgccggaactgtaggcgcttagaccctggccgacaaggcgtccgtcggcgccgataaaggccaccagatcgccgcgcgcgaaccctccctccacatcggtcacgccggccggcagcaggctggcgcctcgcttcagggcgtccagcgcacccgcatccatatgcaggaagccggcaggggccatcagaccgcgaatccattgcttgcgcacattgagcggatcacccgacgccggaaaaaaggtcgcgcgctccccccggtccagccggttcagcggccgtcccgaccggccgttcatgatcgccagcgtgcatccggccgccaccgcgatgcgggcggccgccaccttcgtcaccatgccgccggacccgagacccgagaccgccggcggtccggccatggcctcgatctcgtcggtgatgaccggtacgatatcgagaaagtcggcgcccggatcgtggcgcgggtccgccgtatacaggccgtccacgtccgacagcagcagcaggccgtcggcgcccgccatctgggccacgcgcgcggccagccggtcattgtcgccgaaccgcagttcgctggtggccaccgtgtcgttttcattgacgatgggcaggatatcgcgcgccagaagggcctcgatcgtctgccgtgcgttcagatagcgaggtcggtcctccaggtcgccgatggtcagcagcagttgcgccgcggtcacgtcatagcgtttcagactgtgctgaaaggcttccatcagggccagttgtccgatggacgcggcggcctgggcatcttccagccgttcggggcggccggcaaagccaagcgccgactggccaagcgcgacggcgcccgatgacacgataacgatttgtgtgccgttccggcgccagcgattgatgtcggccgccagtccgcgcagccacagacggcgcggcgccgtgccctcggcgatcagggcggagccgaccttgatcaccaggcgcctggcgcccagcaggccccggcgcgcttcttccgccgtgatcgcggcggcgctggcggcatcggacgcggccgcgtccgcttcgtcgatactgtccgccgccacggtccgtgcctcatgacgggggggcgcatccgtctccacattcccccgcgcgcgtggcagggatgcggggcctttgccggtcttgccgaaccaggacaggatgcgttgcaacggcatgggccgtctcctcagatcggcgaccagccgccggcggtttcgctgtcgtccgcgccggcgccgtcggcctcggcgcgggtgcgctggcgccggtcttccttgatcacgtcccacagggcggacagcgcgtcgcgcacaccggcgccgctgacgcccgacagggtcatcaccggccgggccgatgcgtccgccagggccagccgcttttcctcaagcgtgtcctcggggatggcgtcggccttgttcaggcctatgatcatcggcttgcccgtcaggtcagccccgtaatccgccagttcggccatgatggtttcataagcccccaccacatcgtcggccgtgccgtcgatcagatgcagcagcacgccgcagcgctcgatatggccgagaaaacgtgtgcccaggccgacgccctcgctcgcaccctcgatcaggccgggaatgtcggccagaacgaattcgttgccgtcaacgccgacgacgcccagttgcgggctcagcgtggtgaagggatagtcggcgattttcggcttcgcccgggtgaccgccgccagaaatgtcgacttgcccgcattgggcaggccgaccagcccggcatccgcgatcagtttcagccgcagcacgacccacatttccgcgccctcggcccccggtgtcgatcggcgcggcgcctgattggtcgaacttttgaaatgactgttgccaaggccgccgctgccgccctcggccagcatgaccctgtcgcccggctgggtcaggtcggcgatcagaaagtccatgtcctcgtcgaaaatctgcgtgccgacgggcacttgcagggtgatgtccgcgccgttggcgccggtgcggtccttgcccatgccgtgctggccgcgcgcggccttgtaatggcgcttgtagcggaaatcgaccagcgtgttcaggccgtcgacagcctccacatagacatggccgccgcgcccgccgtccccgccgttggggccaccgaattcgacgaatttttcccgccggaacgacacgcagccattgccgccgtcgccgcttttgacaaagattctgctttggtcgacaaatttcatggggccctgtctatcagacaccacctccgcttgaaaggcttggcggcgggttattttcggctttgttccccaaggggccggcggcgctttcccgctggacttatatccgtgaagggcagtgtctgcgcgtggaaaaccgtccgcttgcaggacatggaaaagtgggctttccgcatttgtcgggcggtgtgtcggttgccgggcaccatagcctggcacacggagtacgtcgtgcggcgtttccttgctgccatgatcgtgtgccgtctgacgtataaggacggcaacagggacgccagacggcaaaaggccgggctgttatgccggcccggccttttgctgatactgttctcgaacggattttttgtggcgtgtcacacccgtggcgcagcattggtcggcgatcatcaggtcgccgtgccgcatccatgctttatgtggccttacgcctcgccgccgtcgacggaaacaaaggccttgccgcccttgcccttggaaaatttcacatggccgtcggtcagtgcgaacagggtgtggtccttgccgatacccacattctggccggggtgccatttggtgccgcgctggcggatgatgatgttgccggcgatgacgcgctcgccgccgaatttcttgacgccgagacggcggccgatggtatcgcggccgttgcgggaactgccgcctgctttcttgtgagccatctgtttactccttccggtatctgggactgcctttggggccggtgcggcgcttattcagcggccgactctgccggcgcggcggctgcttttgtctcgtccgccttggccgcggtcttgcgcggggcggtcttggcgatcttggtcacgcgcaggacggtcaggtcctgacggtggcctttcttgcggcggtaattgtggcgccgctttttcttgaaaacgatgattttcttgtcttttttctgttccagaatctcagccgcgaccgaggcacccttgacggcgggctcacccaccttgacacccttgtcatcgcccaccatcagcacggtgtcgagcgtgacggtcttgccggcctcgccatccagtttttcaaccttgatgacatcgccttcactaacgcggtattgcttaccgccggtcttgacgacagcgaacatgtccttgttccttaatttttgcgcgccgcggacaatcggacggggtacacccatttggccctgtcatatgcagggccggtcccgtactttgggcgatttccgctggctttttcacaccagatggcgcggcccgtccatgggacagcccgccatcaatcggcgcaccatacggatttcgctccccaagtcaatgtttatcgcgggtttgtcacggccgtattccgcttgccggcggtttcccgcatgtaaatcggctgtcgggccctgaaaccctgtttcgggtcttgaccggactgccggcgcggcggcaccttgaccgggtattgcgggaaaagccacccggcaccatggcggtccacgcatagggccgacaccggtcggggccctcaacggtatctcagggtatctcacggtatgccacggatggaaggacaatgacggacgggcaatgacggtgggcgaaaaaatcatgggtgctttgttccgcccggcggacgggcggtcgctggccgttttccgaatcctgttcggcctgatcatcatggtcgaggtctggcgctatgccgatcatggctggatcgccagtaaatacatcacaccgggtttccatttcgcctatctggggctgacctggatcaccccgttcgaggccccttatatatactgggttttcttcgccctcgccgtggccgggtttctggtcatgatcggcctgttctaccgttttgccgccgtcgccctgctgctgttgttcagctatgtctttctcctcgacgaaacccagtatctgaaccatttctatttcaccatgctgctggccgccattctggcggcggtgccggccgcgcgcgcgtggtcggtggatgcctggcgggcgcggcggcgcgaacgggcgggctccgtgccggaatccgcagaaccggcggcagttacatcagcccctgtatcagcccccttatcaacggcgccatcagccacatccgtacccgggtggagctacatcctgctcaagggccagatcgaaatcatgctgatctgggccggactggtgaaaatcgacgccgactggctggccggccggccgctggccgactggctggccgatcaggcctacaaatatcccgtttatatcgccgacctgctgacgatgcccgaattcggcgtcgccgccgcctggggctcggtcatcctgcatctggtgggggcgccgctgctgctggtgcgccggacccgtctgccggtgtatctgatctattgcgggtttcacctgtccaatcacagcctgtggcagatcggtattttcccgtggctgaccattgccggcatgctgatctttttccccgccgactggccggcgcggcttatggaccgtttgtgccggggtctcgtcttgctgccgtttctcagaccggcggaaggctggcttcggaaagcggcccggatattggatctggagcccgccccggcgggcgatacccgcgtgcccccgtccgctgccccccagtctactgcacctccggcggctgcggcccccgccggacggctgaccctggcgcggaaggccgtggcgggcggcgttattctgtggctcggcacgcaggtgcttctgcctgtgcggccttatctctatgacggggccgcgtcctggaatgaacaggggcaccgtttttcctggcgcatgaagctgcgcgacaagtcgggccgcgtccgctttcgtctggtcgatcccgtgaccggacaggaaaccgccatcgacctcaaccggcatctgaccgcgcgccagcgccgcaaaatggccgtgcggcccgacatgatcctgcaattcgcccatcatctgcgcgacgaatatcgcgcccgccacggccatgacccgcatgtctatgtgcggtcgcgcgtgcgggtgaacgaccatccgccggcgaccatgatcgacccggaccgcgatctggcgacggtcccctttcgcctgatcgcacaggatgatttcatcctgccccatccgcagctggacgcccgccggtgaaggcggcgcccgcagcggccatgcccgccgccctggccggtgtgacggcggacgggccgatcctgttgttcgacggcgtgtgcaatctgtgcaacggcacggtgcgtttcgtcgcccggcgggacgcgggtcgccgctaccgtttctgccccctgcaatcggctttgggtcgggcgctggtgaacgcccacggcggcaccgcggaactggataccatttatcttgtcgaggacgggcggctttatgaccgctccaccgccgcgctgcgggtgctgcgcggtttgcggatgccgtggccgctgctgtcggcgtttctggtcgtgccgcgtcccgtgcgcgatgccgtctataattttatcggccgccggcggtaccgctggtttggccggcaggaccgctgccccctgccggacgccggcctggccgcgcgctttctcggcatggacgacccggatttgtgatccacccgtgccgggccggtagggtgaccccggcaaaaggctgatccgtctcgtttcttgatcgccgtttttttcgctgccgatacgcttcgggacgatgcgctcctgcgtcttcctttaggggtccgctgtcgctttcaggccggtgatggttcctccattgacaggtaggatataaatccagggacggtatatggattttattttagaaattattatttaatatcaatgacttgattcaaaaaattcaagaccaaaaaccatatactgtccctgaattattctatgcggcaaaatccgtatactgtccccataatttcaccccgtattgtcacatgcgttgccgcatcctggacaggccggtcaaaggccagcccgccacacttgggatgccggaccgctcagtcagggccgggcttgtgccataagtccatcgccgcgcaatttccggcttgaagcccgtcccccctttgagtagggtgcgccggttcctgcgccccttggcctcccaggcatgtgtcccacactgtgggccgcacagggcgcaccacacgcggagagttgccggagcggtcgaacggggcggtctcgaaaaccgttgtgcgcgcaagcgtaccgagggttcgaatccctcactctccgccatttttcttatataaataattgataaaaatagattattttcgtgggtagatggggttttcccacattttaccccacatttttatatgcttgtaaacggtgtgggaatggtgcgcccagtatgaggctcttggcccgacaccgtgagtcttaataagggagttttgtcgcgcctgttgcccagcaataaccctgtagcacctttgcccgagactcagtcggttgtccaggcgtgtgcggacggagagggttctatggtgcaccaccgcattagtcagagcggttctgccgggctttctcgatccgcttggctttccaggcgacaatgtccgcttccacccacagcgctcgggtgccgacatggatgggggacggaaacgggtcgtccgcctccttcatcagcgcatagagtttggatttcttgagaccgacggtggcttcgacctccggcaggcgcaggaaccgcccatatgggtccattattggtttgtcttcaacgcgcatggcgcactcctccccttaagaaaaatcaagaggacgggggacaaaacccacttctttatgggcagtgaaaacggcgttcgcgcaagcggaatttgattaagcaaaaaaaatcgcgtttaaggcccaaaagtgttgcttaagcaaagcgtccgatttcagcgtcgtggctataaagtgccttcccgttgcttaggcaaatctgcccggtcctgcggcgtttgggtcttaggtatttgtgccgggatgtttcaaccgcacaccatcgccgccgccattggccgggatgaattcaacaccggctgcctcaaatgtttgtctaaggacgaccaaggtgcccttctgcggggtggttttctcaatctcaaagtggcggatcgtcacatcgctgatttcagactcgcgggccaagtctttttgagaccatttcagcaggccacgggcggcacgacattgggcaggtgtaatcatgggcgcaatctaaagcccttatggaaaatcataaagacatttgattttgcttattaaaaagcacaattacttatgctataggtaagaatcttaaggcgtccgtgttttttgcgcgcgagacggcttttgaggtttttatcgtaagcggcccgacagagtgcggacacaccctgccgagcctaaccacaccaacctttacaggagattggcatggctaatcatggctttatcacaaaccgcagacagttgttaattggtcttggtacatcgacactgaccggcagtgctatgtcgctgacggcctcaaacgcagcagatgaccccgcctatgcagcctttctgaacgcccaaagggcagcagatcgtttgaatcgttaccacgggccagagggcacttatctcgacacactttatgcagcttacatcacagcggagagagaattggttgcaacgcccgccataagccttcccggtcttcggggcaagcttgaacgattaatcgcgatgaccggttgggagacagaacaagacgatatcgacgctatgatggctcgttccgcctgtgcagacctgaattgcatagcaacgcacacaagcgctaagcaagatatcctatagaatacgtgaagttgaatgctgaggtctcgtcgagcagctaaggcttgatgaccgttgagggctgcaaactggacatgtctatcaatagcgcttttagcccgtttctgccattaatagttgcatcaaaattgcccaaaatatactattgaagcggacgtcgaatgcagactgcgttggtggaacacggccaacgcttttatgattatgaatctggatcgaaatttgtttctaaaaagagcctccgccagcgagcggaggccttgatatgagaaacctaaatattagtgcttcaattaaggaatttccccgagggatgatccttcacagtgaagctctgttaccgtggcttcccttccgatttgccgattacttcaatcgcagattgacgctgtccggtcaagtcggttgtttggccgatggagagataaggtgatgaatagtccagcatccaatggcttggtcttcggaatagacctcgggattgcttcttgcggttgggctgttctgcgccagcccacgccgaaccatccgactggtgcaatcgaagcaatcggcagctggatgtttgacgtcccggaaaccgatgagaagcgaacacccaccaaccaaatcaggcgtagcaatcggcttctccgccgtgtcgtgcggcggagggcacagcgcatggctgagatccgccgggtgttcagcgagcatagcttgctttcttcaaatgatcgcgatgcgttaaagcgtaccgatatcgatccatgggaaatgcgggcaagaggtctcgacaagcctctggcgcctgccgaactggctgtagcgctgggccacattgccaaacgacgtggtttcaaatccgctgccaagcgacaggaagcaaacacggccggcgacgaccaaaagacgctcaaagcgctggaaacgacaaaagagaggctcggtcgttatcgcacgatgggggagatgttcgcccgtgatccggattttcaggcacgtaagcgcaatcgtgacggaatcttcgaccgaacgcaaagccgagatgacctactcgacgaagttcgcaagctattcgaggcgcagcgccgactaggcaataaacttgcgagtgagcaactggaagaggccttcatcgcaatagcttttcaccagcgacccctgccggacagtgagcggttagtcggcaaatgccttttcgaaccgacagaaaagcgggccgcaaaacacgccccctcgttcgaaaaatttcgcctgctgactcgcctcgtcaatctgcgcgtcacgactgatgatggcgaacgtccgctgacgccggatgaactcgcggcggccaccaccgatctggggtcgaatgccaagctctcggtaaagacgatacgcagacggatcaacctgcccgaccaccaacgttttacggcaatcaaacccgaagatgaaggccaggatattgtcgcccgcaccggcgaggccatgcacggcacgaaaaagcttcgcgatgtcttgggtgaggaattgtgggctgacttacgcgaacagcctgcaaagttggaccatatcgcgcatgtcctgacattcttcgaaacagccgagacaatcggcgacgagttgcaaaagctcgacctgccagcgggagcggtcgataagctgctagaatcgttgcaatcgtttggacgcttcaagggggccggccacgtttcagccaaggctgtccgtgcgctcatcccgcatctcgaagcgggcctgcgctacgatcaggcgtgcgaggcagcaggctacgatcacgccgcctcgcgctggtcaaagcgcgaacaggtgaccgacaagaaatccttcaaccggctcgtcaaagatatgggcgaggagattgccaatcccgtcgcgcgcaaatcgttgaccgaggggcttaagcaactctgggccatgcgcaatcgttggggtctgcccgatgcggtgcatatcgaaatggcgcgcgatgtgggcaacagcctagaggaaagggacaagatcaagaagcgccttgatgaaaccacggcgcagcgcgagagggaacgaaaagaagccgccgaacagctgggcgtcgatcctggcgatgtcggcggcgacacgttgctgcgttaccgcctgtggaaggaacaaggaggacgctgcccctataacgatattgccattccgtcgactgcgatcgccgcgaccgataacagctttcagatcgatcacattctgccctggtcccgtttcggtgacgacagtttcaacaacaaagttctgtgcagcgcgcaggccaatcaggaaaagcgtcgggacacgccatttgagtggatcacacgcacgaagggcgatgaaggctgggcaaccttcgttaaggggattgagacaaacaaacaataccggggtttcaaaaagcgtaacttcacactgaagaacgcgagggaggctgaagagcgtttccgaagccgaaatctcaatgacacacgttatgctgcccgtcttctcgctgaggctgtgaagctgtttttccctgaaggcgagaggcaggatcgtgcgagcagtcgccgggtgttcacgcgccccggcgcgctcaccgcagccctgcgtcacgcgtgggggatcgaatcgctcaagaaggtcgatggcaggcgggtcgatgacgcgcgccacaacgctctcgatgcgctcgtcgtcgccgctgtcggtgaaggggaaatcaaccggctaaccagatcattccagaactgggagcagcgtggccttcctcgcccccttcggcgcgtcgatccgccgtggggtgatttccacagtttccgacgggaggtcgaagaagcctttgatgccgttttcgtagcccgtccggagcgtcgccgcgcacgcggcaaagggcacgaggcaacaataaggcaggttaaggagcgagaaggcgaaacacgcgtttacgagcgagtgccaattgcgaaactgaccgaaaagcgactggaagagatcaaggaccccgagcgcaattcaggcatcgttgcgtccgtcaaacagtggattgcaaatggccgacctaaggattcactgcctaggtctcccgcaggtgatgaaattcgaaaggtgagagtgctcgccgacaggaaatacaagaacccagcaattcccgtccgtggcggtacagcagcgcgaagcaaaatggtccgggtcgatgtgttctcgaaaaccgacaagcgaggaaggaacaagtactatcttattccagtttatccgcaccagatcatggacaagcggcgatacccaaaacctccaatgcgagcgattgtggcgaataagccggaggcagattgggagcagatcgacgagagttttgattttcagttcagtttgtatccacgctgctatctggaggttgtcaaatcagacggaactgtgttcgaaggttacttctcgggtgctcatagtggaactggcgcccttactctattcaatccaaacaacaagaactcgtatgttgataaatcgggacgaaaaatggaaggaataggtgcgaggactctgttaactataaaaaaatatagtgtggaccgtttcggcaatcgattcgaagtgaagtcggaggtccgcacatggcgtggcgcggtctgcacatctccaaccccgcgcgactgacccatcgccggcgtcagatcgtcattgcgcttgagagcgaggacgaagaactgtcctttccggtggaggatgtcgcctggatcatcctcgacacgccacaggtctcgctgaccggcgcgctgctaagcgccttggccgagaatggtgtcgccatgatcgtgccggacgcaaaacaccaccccgccggcgtgctcatctccttccatcagcatcatgctcaatcggcaatcgcccatgcgcaaatcgccatgacaacaccgttgcaaaagcgactgtggcagagaatcgtcaaagctaagattgagaatcaggccgccgtcttgcgtgggattggcaatgatcatgcgcaggcgctgtcagccatggcgtcccacgtcgcttcaggcgaccgcggcaatgtggaggcgcaggcggcccgtatctactggtcccggctcttcgaagacttccgcaggcatgatgaaacccgggaaaatggcctcctcaattacggctatgccgtcgttcgcgccgctcttgcgcgggcctgcgctgcgtccggactgttgcccgcttttggccttcaccataagtcacagacaaatcctttcaatctggtcgacgacctgatcgagccctttcggccctcggtcgatcgtatggcgcagcggcgcgcgaatgacagggacggcgaagacctgaatgttgaggaccgtcgccacatggcgggcattctaggcgagacggttttgatcggggacgaacggctgaccatcttggcggcgaccgaagccgttacgtccagccttgttcgtgccatccaaagccgcgatgccactttgctcaacacgcctgctctgccactggcgcgacgaggatgaccatggaggctggggagattcgcttcatgtggttgatggtgttcttcgatttgcccacaaaaaccaaaccccaaaggcggcgcgccaatcgctttcgggaattcctcagaaaagacggcttcataatgctgcaattatccgtttacgcgcgcgtctgcagggggcaggatgcggtggaaaagcacgtccgaagggtgcgttcgaacctccccaaggagggcagcgtaaggacactccaggtgacggataagcagtatggcaggatgcaactaatgctcgggaccgcgccaaaaaccgagactgccggaacgtcacaaatggtcctgctgtgatttcggcggcaaataatccgcgaaaatcacagcagttccaatatgttgccgtagaggcagcctaccatgggcaaatcggtagggaaaccacggcgcgtcttccggctttacgctcgggtctctgagcctaccatgggcaaatcggtagggaaaccacggctgcccggtccatctggctttgccattcggaagcctaccatgggcaaatcggtagggaaaccacggccagtgaaggtacagttatcagccacatcaaagcctaccatgggcaaatcggtagggaaaccacggcgtaaaatgacgatgacagccaccgcgccaaagcctaccatgggcaaatcggtagggaaaccacggctttgttacacttggtgatgatccgggcttgagcctaccatgggcaaatcggtagggaaaccacggccttgaccggtccggaatgctcatatgtctcagcctaccatgggcaaatcggtagggaaaccacggcgaaaagtcgagcaggccgagctgccgacccagcctaccatgggcaaatcggtagggaaaccacggctgatcatgtggacaggcatctggaagatatagcctaccatgggcaaatcggtagggaaaccacggcttcaccatggtattgggggcggggagcgcgagcctaagcctaccatgggcaaatcggtagggaaaccacggccgcacgatgcgccgatggctgtccggtgagagcctaccatgggcaaatcggtagggaaaccacggctgcatggtccgcctcccgctcatcgacaccagcctaccatgggcaaatcggtagggaaaccacggcgtgaagcgccacgggcagacatttcatattagcctaccatgggcaaatcggtagggaaaccacggcaaacctcaccggctgaacagcgcgccgattagcctaccatgggcaaatcggtagggaaaccacggcgtgcggtttgcggcggcgccgatattcatcagcctaccatgggcaaatcggtagggaaaccacggcatcctggatgtggaaggcgtataaaatcgcagcctaccatgggcaaatcggtagggaaaccacggcagaattcaccaacgcttgtgttttcattaaaagcctaccatgggcaaatcggtagggaaaccacggccgccttcgcgctcggcgggtcgtcatcgccagcctaccatgggcaaatcggtagggaaaccacggcaccaatgaccgcacgcccatgaacactttcagcctaccatgggcaaattggtagggaaaccacggctgccggtctcgaccagcacgccggcattgcagcctaccatgggcaaatcggtagggaaaccacggctttatggcggactggggtccaattgtcatcagcctaccatgggcaaatcgaaaaaagggcacacaaatgtccgctaacgatagatcaatagctgaattctgcatctgcagcgaacttccgcttcccgcccaaggcggttcttcgctgcagaaccgcttgtgtccgcaatgggaatgtttcggacgaccactcgctctgcagctgagtatcgctaccggttttactgaggttgcagctcacaatatcaactcagcccgatttcgctagtttgccgctatttgatgccgattgaacgcattaaggacagactgcggcatggataattgtacaaagtcttgcgagcggtggctggagccgctcgcgatggaaacgcgaaatattattttagaatagcctatgatgccgcaataccggaattttgatttagcgtttttcttttcaacatatattgtgctcctattatgccgtccaccaaaggaaaggccttaactgtcactaaaatatgtctgacttgtctaatggatgaggacagttagagcgcgatactgactacagtagtaacgactttgacttatcagttgcacgtggcctgagattgacagcgtccctctccaagcaaaagagctcatttataaggttgaattcacgcaccaatgcgcagcttgtacttctgtcttcccgatgtgcccggcggttgcggtatgccccaaagatcgagatgaagaggttggtgcggcctgtgtgttctccatcatccacatcatcccaaccaagccgccgttcttttgcaaggaaagcttgtgagaataacttctgaccactggtggttaagccggttcgctcgcggacaatgtcctcaagcttcctgaatgcgcggacgagcgccgcatccggatctttcctgaagtcgattgccaagtcgcataggcgggggtcgaccacgccaagcgagagaactggtgagaaaaaacctcgaaacccatcctgatcggacttacgcaggactaataggtaatcccaaaggcgttgaggccgaataggacgtcgctccgcgatctcttcagcttgttcgtaagtcagcaaacaggagttaatctgctcaagttccttgtcggtgatgtcaacctcatcaatctcaacctgaaacctatccaacgtggtgatcacttctgcgaagccggcagggcctgtaccaccataccccgatgtgaaaccagatttgatcgctatcgaccatgcagagtcgatgtagagcaaaaaggcgtgttcattgcctgccgttagaataagcgcgcgcttaatatccgcgccacttaccaaaagccgctcgatagcctctcggcaaggtacggttgcgccggcggcgccgtggaactgcatttgtgctatctccaaatggtttttccgttcgcattttgctagtacgaagcatattggaataatgcacatcttatcgtcgcacaaccgttccgagtttttgtccgttccgcagctaatccggttcgaatacgctcatggtcgcgatggttttgaaccaactcttctcattaagggcagtacattactattgaaatacacagtgcttggagcgcggatgcagcttgctttcactgtgtgcgacggtcgcctactgtgtgcactcaaagtgtgtgacgacggcgaagacggcagtatcctttggtctgttgtggagcacgaagaagagttgaacggcattcgcagtttggcgcgccgggaaccattagtggcgtttctattcaacgaacttgctgtaaacgtctcttggaatgacctatatacgataggcgctttagatcgcctatcgacgatggcagatagtgctgcgctcggccaggttaatcactcggctatcaaggttaaggtatcccccttactcgaccgctttcatcgtcacgttcaagatgatggcggatggtgggtgttggagatgggcggaaggtccgattggaagaccgtccacaatcacttcattacgtcaggcgcttcgtccggcctgattgacctgttcgacagtgatgaaggcaaacatcaagagcaactgggcgtttggctgactggcaatcttcaacctttgggggttcagcatagcccacaagtttcgaagggcaccgggacgcgagaactaaccaacgagtttggctcggttttgattgagtccaagacgctttcggttttggcgcgcaaacaactgcccgagagggcgaagctaaagcgcaacctttccgcccacattagcaaagcgttcgctcaattgcgtggggccatacgggcgcttaaatccggcgctccagtgactagtaccaagggtaataagctactggtcgaacgggaatattctgtccacgctatcgtcttaattcctgatttggaacttgtgaacgatcgttcagcttatggcatcaaattcattcaagattttatgagcgcgaccggcggattcgcccatttgctcgacgttgcggagttactccgcagcgtgcaagccgccgaaataatagcgatgcgaggtaagacggccaccccgcgatgatggcgtttgactattaccttttggaatgcgctaaaaaggtgacagatgctggcacattatgcatcgaaatgcttttccgctttgctgacgaagcaaagaggctggactgacataaggaccgctgcaggttggcttgtagcgtaaaggcggctgttcattatgtcgtttgatgcaggtggggtgatttgtagcgatggtgcgcgcacggccacacatggtgagccgtgtgagacaaagatgcgaactattccttcgccaccgcactacagcgacatgactgcaagatgcgctgtaaggaataattctacgccagcatactgagactgtaggtcttccgagcacttgctgcgaacggacggtcagagccattcgtggacattagcttgcaattttttgcggcgtgctagactccaatttatgccgtctgtatcgcattttgaaaacgctgtattcagataccgttccatcgatgctctacttggggagcgcgaagagttggggcgtcaaacggtctattttgcaccgcctgagcatctcaacgaccccatggaaggcctgcgtcaaatctactggcacggcgatcggattacatggcgcaatcttctgcggcattacgtgatatgtctccaaaatcgtctctttcaggcgctttcgacagatgattctgagcgtttggacccgcagaccatctcagtgttccagacgcttgataatctgccaacgccagaggccagatcgttgtgcgaggcgtgtatcgcggcggttgaggctggtgagcttcataccgctctgctcgacctgctggcgtgtgctgatcgggatatcggcttttcagagcttcaactgctcttaaggactgtccatattgactggcttggaacagtttacggagtattcgttgaacacggattagcccagcaaggccagcctgtgagcgccgaatcatccagtctggtggatgtgttgcgtaagtttcaacatttgatgccgcaagtgcgcgaacaggtttcagatgatggcgtcgagattatccataacattcgacaaatcatgtccgatcaaacgaccctgttggccgcataccagcacgccgatgttttacagccgaaacgtgcaagtctgtttttcgagtttacgactgaatatctcaccaacctgatgaagctggtttatccgccgtggtatgtcgcctgcttttccggtcgacacgataatgctgcgatgtggagctattatgcggacaaccatcggggttgctgcctcgtatttcgagcagacgacacagaaaccggtcgaagtttgctgcttaacgggccaactggttacggttccgatggcatttcgaggagtgttcaaaacctcccactcgaacccgtgcgttatactgccggcgagcagcggatcgaattcttcacgaatattgggcgattgccccttgctccgctggcgcggaattggtttcaggataaccatggccgtacatccccgcttgcccaacatctcaacgaggacaggcaggaggcatggggaaacgcttattgggaaaacttcactccgccccttctcagaaagctccccgactggcagcatgagaaggagttaaggattgttctctcagacattttgaatatacgcggtacggatgaaggccgtaccttcacatacgattataatacacttgatggcattatcttcgggatcaacacaaacctctccgataaggtgcggatcatgcatatcgttaatgcgaaattggcaagccggtcagttcctgagcccttcaagttttatcaagcccgttacaatgctagaacagaacgtatagaggctcatcacttcatttgatcgcgcacgtcagtaatccttcacagtcttgagttcggatatctaacgtccagaaccttagttaaaatggcgtctacaaaaataatatccggctgattcaacaacctccgttcctgcaacgacatagaggtccgcaaagggttcgtcgaaccggcgagtaatacgtcgcataatcggccgcgaatggcggaacaaacgaggttcggatttctcgattagcgtcggcctgtgagtccagtccatgacaagtataggtcctggctttgcgacgctcaattgagccataggttttggtgtcgagctgcaatcgaagattaggtcttaattgcctgagcgagtattgtccagaaaccccgcccatttatccataagcacaatgcgtttgtcgaaataattggtgcgccgataggctgcctccacccggttgcggatggtgtgggcgagggcggcttccaccacgtcgccggggagggtggtctgttctgccgcccagtcgcgaaaggatgagcggaagccgtgcaccgtgacatcgccgtggcccagatcgcgcaaagccttggtcagcgtcatgttggacaacggcttgcctttgcgtatgcccggaaagatcagattgttctccgctctaagcggcctcagcgtgtccagcacagcgattgcagcatccgacaggggcacatgatggtccttacccgccttcatgcgctctccgggaatgcgccaggctttgccatcttcgtcgatctcgtcccatgtggcgaggcgcacttctcctgaccgggcagcggtcaggatcaggaagcgcagggccagccgccccacactgtccttctcgctgagctgagccatgaaagccggtaggtccgcatagggcatggcggcgaaatggctctcggtcctgggctgtttgggcaggccctttcggacggagcgcaaaggcgcttcctgatcccggtagcctttggcatgcgcccagtcgagtacggtgccgatgcgctgcaggacacggcgagctgtctccggcttggtgagccagatgctgatcaccgcatcccggatcatcggtcccgtcacctcgtctatgcgcacatagccgatatggggaaaggcatacgtctccagggtggtgatccactgtgccctgtgcttggcgttcttccaggtgtgcttgtgttcctcaaaaaccgcccgtgccgctgtctcgaagctgggtgtttgcagcatttcagccagcttgcgcttgcgctccaataccggatcgacgccgctggcatacagcgcccgcgtctcccgcgctttctcgcgggcctccgacagtgacaccttgcttaaagaccccaggccaaaatcccgccgcttgccgttgacctgtatgcgcaacagccaggagcgcgaggttggagacttgaccaccagcatcaggccgtcgccgtcatgatagcgccccggctctttcgcggccttcacggaaagggcggtgagcttgctcatttcaatcgtccgtccaacttattttccccacagtcttccccacactctatcgaggcttaaggtggaaatcaacggatagtcatggaagagcatttcagtaaatggctgtttttaagtaattttatggaatagcaaaaacgtatatggaatatggtttagcggactcactctccgccattatctcgctcccggcaaattactgcgtgatcgtcctgtcagggtgaccaggccccaaccgcagcctgggggctcgggctttcgggttaccaaacagtctgtccgccatttatgcgcgcgcagggtcgctgtgcgagcaattctgcctggggtctgaacagccggggcgcctgacccggttcgatgtggggcgtggtcttttccggtgtggtcccgtcagggtgtcaggcctgcgatctccttgaccagcagttttccgaacagggtgaaattgggctccacgcggctggtcggtccggtgatggagatgatcaggggacgcatgttcacggcaaggccgaccggcgcggaaatggctgtggcgtcagggaaaaccgcccccacggcaatggtgaacccttgccggcgtgcggtatcggccgcctgtaatatggcctccagcgggtggcggccggtatcgatctgccggcggttttccgcccgtcggtacagggctcggatctgctgcgcctccagtgttgacaaataggccgtgccgacgccggtgccccagacggagaatttctgccctttttcggcggtgaaggaaatggcattgtcgcttttttccacctggaccagttcaatcatcagatcctggtaggcggccagcgtcactgtctcgccggtaaggtccttcaatgtttcgagaagggtcatgagcgcctgcggaaatatggacccatcggagatccacgcccccagcgcagcaaaacgcgcagtcgggaaatagctgttggtgcggcggtcgacacccagcatcccctgatcgcacagtgttttcaacaaagccgcacagcttgaacgcggcgccccgatcgcgtgggcgatatcctgcgcggtgagcgctttgcggtcccgttcaaaggtttcgaaaacgcggatggtgcggacaacggactggctaacagaagacattgtaaaatccatatttatagaatttattctaaatatatggattttattgactcaacaaggggcttggtgaaaaatttgtaacaattcgggagggatctatgacgcaactcagcacgcttggccgggacctggctctggatatttaccgcaccatggtgcgtatcgccgcgtgcgatgaacggattcagcagggcctggccgccggggatttgcagtttcagtattatccggcgggcggacaggaagcgattgccgccgccatcggggcgcttttgacccccgaggactattgtgtcaccacctaccgtgtgattcacgacattgtcgccaaggggacccctgtcagggaaatcatggccgagatgtacggtaaggaaaccggaacctccaggggtaagggcggtccgatgcacctgtccgacccgaagtccg

SEQ ID NO: 1499 - DNA, 23189 bp, synthetic construct
  misc_feature 1..23189: note = Synthetic
  source 1..23189: mol_type = other DNA
ccttcagaaacagcggctggggagtgacgggctggatttccggaggggggtcgtttaagacctaaactcgtcggaggctaaggccccttggatcccaagatcggcgtttgtgattctttgaggtgttcggacatgataacggttatcctggtggcccatcttattcttgcggtcgccctgatcttggtcatcctctcccagcgcacggcccaagacggcggtggactcacgggaggaggcggcggtgggggaaccatgggcgggttgttcacggcacgcgggtcggccaaccttttgacgcgcacgacggccattcttgcgacactgtttatcatcacaagtttgctgcttggctggatggccgggcaccagcatgcatcgaagagtcttgtggacacccttgtgccgacaacaacaacggagccagcgccctcccctcaacacgacccatcccccgcccccgccgaaacaccttcggccccccaagttcccgtttcacggtaaggtttgcattttcaaggagttgctcggcttcatgcccacacggtttattttcatcacgggaggggttgtctcctccctcggcaagggcattgcgtcatcggccctcggagcgctgttgcaagccagcgggtacaccgtccatctccgcaagctggatccttacctcaacgtggatccgggcacgatgagccccacgcaacacggtgaggtgtacgtcacggacgacggggcggaaacggacctcgacctcgggaattacgaacgcttcacgggcgtggccacgcgccaaagcgacaacgcgacgacaggccgcatttattcgaccgtcattgcacgggaacgtcgcggcgattacctcggcgccacggtccaggtgattccgcacatcaccgacgccatcaaagaatttattcaggccgatctgcacggtgaagatttttgtttatgcgagattggcggcaccgtcggcgatatcgaaagccttccgtttctggaagccattcggcaaatgggaaacgaactgggccgcgagcgctgcctgttcattcacctgaccctgttgccgtacattccctcggcgggggagctcaagaccaagccgacgcaacactcggtcaaagaactgctcagcgtcggaatccagccggatattctcctctgccgcacggacaggcccattccggaaaccgagcggcgtaaaatcggcctgttctgcaatgtcccgcaagagcgtgtgatcgcagcgcttgacgtggacaccctgcacgtcgtgccgatcaactaccacgcgcaaggctttgacgatcaggtcttgcaccattttggtctgaagcgcccttccccgcccgatttgacgcgttgggccgagattgttgcgcgggtgcgagaacccgaaggcgaggtcacgattgccgtcgtgggcaagtacaccaaccttttggacagttacaaatccctgggtgaggcgttgaatcatggcggccttgccaaccgggtgcgcgtgaaggtgaaatgggtggacgcctcgctgtttgagacccgcgacgtgacagaacacctggaggacgtgcacggtattctcgttcccggaggcttcggggaacgtggcagcgaaggcaaaatcaaagccgcgcgattcgcgcgggaacgccgtatcccctatttcggaatctgttttggccttcagatggcggtcattgaggccgcacgcaacctcgcgggcctgccggaggcctcctccaccgaatttggcccgaccacggcccccgtcgtaggcctgatgacggaatggatcaaaggcaatcaactggaaattcggaaagcctcgggcgacctcggcggcaccatgcgcttgggggcttacccctgccacctccgctcgggcaccaaggtccacgcgatttacggacacgacacgatcagcgaacgtcaccgtcatcggtatgaagtcaacacaacctaccgcgaaattcttgagaaaacaggctttgtgttttgtgggctttcaccggatgggcttttgcccgagattctggagcgcgaggatcatccgtggttcatcggcgtgcagttccatcccgaactgcggtctcggccccttgatcctcatcctcttttctgttcctttattaaggccgctttgcaccaaagtcgcctagtctgattcctattctaggaggttggcatgttcacatcccttctggccgtggtcgtcttcagttgggttctttgcctgccgtccttgtgggtcgcctctcggcggggttcgtggtttctgtgggacacgggaaccctcctcctcccctttggggtgtggtggctctttggacaagcggccagttacacgcgtggacccatcacgttggagattgacttgttgatggtggccctgctggtccccatcgccctgtttatacgtgtcttcatcattgatcccctcttcaaccagccgctggaggcggccagagttgttttcaccttggctctgacatcgccgcttctggcccgcattctcgtgccccacttaggaatctaacgatcagacgatcgtcagtcccttcgcccgaaaaatcgcccgtacacgctcggtctgttcaggcgttggcggcggtgtggaggtcagcgtgtacgtcagtcccaagtctttccatttaggttcgcccattttgtgaaatggcaaaacctcaatgcgttccaccgacggcaagtgcgcaaggaacgtggccagacgctcaaacgtcggctcatcgtccgtcagccccggcacaaggacgcagcgaatccacatcggcttgtgcaaacgccccagacgttcagcaaacgcgatcgtcggcgagaggtccacgcccgtcacacgaaggtacgtgtcagggtcgaaggatttgatgtccaacaggacaagatccgttgcattcaacaacgccgcgtccgcccgttcacctaagaaacccgacgtgtccaaagccgttgaaagccccaggcccttggcctcctgcaaaagggcggtggcgaaggcaggctgagccaacggctccccaccgctgagcgtcacacccccacccgtgcggagaaggaaatcgcggtagtgagccatctcggtgatcaaggtggacgcgcgggtcagcttcccctgttttttgcgacgcgtgtccgggttgtgacagtaaaggcaccgcagcgggcaccccgacaaaaacacaacgtaccgcagccctggcccgtccacggtcccggcggtttcgatggaatggacatagccttcgatgtcatcctcgggcatggaacgcgacacctcctgcagggggtcttttccccatccccgtcatcaactctgttgatggggggaaaatcgtccttgcgaggcgggcgatcgtctcgcaatcggttctcgtaaccgttgtcatcccggtccccgtccgttcctacccgcaacgcctgaagagtggtcagggcctcacgcgcccgtagatcattcaaagcgaagcgagcctccccaccttacgcaggaaagtgtgtcatgaaatcatccttgctttcttctgtctacaatgtgattcggccccgatgttcgcccgatgttcgattgcctgccaagccattcacgcgcaacggcctcaaacgtgttggtggtttcttggacgttcccttcttttttggccttgcggctcgcggaaggatcaacgccctcagcgaggaggtcccgcgccttatcgcggcgatcgttggcttccttgagactgacctggggataaacgcccagcgagagagacttttctttgccgtcaaagcggtatttcagccgccaccatttctgccccttgggggtaacaagcaggaaaaggcccttctcgccggacattttgtaggacttggccttgggtttggcggtttgaatcgtcaggtgggacagcgtcatgggggtaactcccgaggttccggagcagggttgttaccccacgccctgtaccgttacccccaaagttacccccacgcggtaccggctcgcaaggaacaatcccgaacatccgcgaaccgaaggtggcggttttgttgatgtttgcgaggtttgggtgaacggtgccgaacgtcggcaaatcgggccaaggtctatcgaacaaaatgcgcaaccctttgaaaaacaatccctatcatcaatttcccaaaaagacctgcccctaaagttgcccccatgtgtgtttaacgggactacagcttgatgccaaagcgtagtaccatgcctgcgagcgacctttccacatgggcgtcatgttgggccacaagacggttgaaagtgcgttggtgcatgcccttcggcttccagccgttcccgttgagaatgccgggttcccacttcagcttgtcgcgtaggcggtcggctcgccgtgcggctcggtcatcccaggtttcgcgctggcttgggtaggccagtcggtagcagcgacggcaagcaaagataccgcctccgtagaggatcgcgacccggcggccgcatccccgtgcaggacagaggaaccaaggacgtcgcccgcccaaacggcaggaggtccaatcaagtgcgacgggataatcctcgtccttccattcaacgtcgcctgggcttcggtggcggtagattaaacgcacataaccctcttcgacgcctacgcgaatccaggccatcacctcgccgtcacaactccattgccagctgaagacgcggtccggcacaagaagtccatcccgttgccagcgccgcacatcaagagcccggtagtcattggttgcgtcgtgtgcgccgtaatgtcgaccttgcccgctgccgtatccgcccattttggccctccgttttttccgaaatcatttggcaaatcacgctgttatccctcgcctgaaggcacctgccggaggtcatcttcccctgtgacagcttctgccttggggctggaagaaaccggcaaaaccggcaaaaccgattccacccgccacttctctgccgagctgtttccgctcgcacggacaaagcgcagaccgttcaccatgcatccggtatggtgcttgatccaccatcccaagcggcggcggttgatctcgccacgttcgctggcaatgtcattcagcacttcgtttaaatcattgttagtggtggggttcatggttgcccgatgaatggcctctcgaatgcgggtaggctggtccgcaaacgcctcccaccaagaaatgagcagccgtgccaaagtctcgcggtcggggtcttctgccatggcctcaaagaccgaggcggtcgggtcggcacagccgagccacagcagcggttggcggcacaggtcggaccattcgccatagcctgccagggctttgcagacgctcttgggcctgtccgcaacaatccaggcccgcacgagggtcaacgccgccgaaacgtagcgtccccgttctcgcagcagctcgcgcaccaggtcgggccgcttgaaagtgcgtgccgccgggacctccagactggggtcgaggcggatggtcaggcaacgccgtgtcatgtccttcacagggccgacgttgttgccgcttgataaaaacagggcgcgggtgctgacggtcgcggtcttcgagacgcccaggatgcgtccttcaaggaatcctgaggtgagcgtggtgcagagacttttgtgggccatcagatcaccgttgaggttatcaaactcaatcaccgctggagcccgtagcaattcggcaagcagaagtttccggcattcttcatcgtcggcggggaaagtcgtcggagcactgcgttggggggtggcaaaggctgtgatcaattcgcacaagtaggatttgccggaaccgaccacgtgggcccgcgcatgaaacatgggcgcaagggcgaggctgggacgtagagccgccgtcaacagggctgccaaggcggccgcgcggtcagattctgcggcaaaactgaactcccccaagagatcgttcagcagcgcaagcgcggcttcggcctcagcacggctcggtttttcagggacagaaaacgcgtgttcggcgaacacaccaaacatgcctgtggcttggtcatagcctgctgtctgcatcaggctcccatccgctcgcaggtaaggttggcgtgccagtccgttaagcacgggcaagtgtgcgtaactggtggcgtcgtgcagcacgaccgcatgacgagcgggcggatctgtgcgcacccacgcttgggatcgtgcgtcaaagcgctcccatgttgctgcacccgccaacgctcggaccaaggcaggctgcgaaacttcctgcacgcgggtttcaagcgtgccaggatcggtcacaacggtgacgatcaggctgccgcgctggtagtgccgacaggactgggccaattcgcgctcagcggcgtccacaacacgatgaatttcccccgccatgatgcggatggtgggcttcatgcgcgccgcacctacctcaatgtcgagcacgcgaagcaggtcgcggatgtgccgttcggcgcaatgcccatgcaggcatttgaagccgcccagaggccaatggtcctccggctcaaagtaggctgtgccgctgtccgtcccgtcggtgtgctcctcggaccaagggcaggtgatgtcgtgtttgccgtcacccagaggggatttgtacaacccgcgatgatgcagagcggcaaggacagcgttttccgttggtcgaggaatccagatcgggtcgccatccaccggggacgttcctgtccctcgggtgtcccgacgctcgggccgttttgtcggggcgatttccagctgaagcccatccaccagttcttgcacggcatagcgccgcttgggctcccattcctccatttggcaacggaaaggcggtgtgtgttttccgttcaccgccaccggcaaacgcgcaagccgcgcacgaggcccgttggccccggggtcgcatagcccggcattcacaatcgcttgcatcaaccggtcagcggcgttgccgtctgtaagaggttccttgagcaggtacccggcctggtagtttccgggcgaggtttcaaggagccagcttggctgtaacgtcagcctatccttcgccaccttgcttccaatatcgtccagcatcacggcataaagcgcatggaaacgcgccttttgccgtcggtactgccccgcctcgtccgggcgaaacaccgctaggctgaaataattgttggcggtgggagggagaagctggtccgttgtgccctcttcggaccaggcgcgtccgaaccatgcccctttggggatgttggtcggattgccggcgaagctcaccagaaccggccgcacatcccccaacccctccccaaacaccgtgcgcagaaactccccgttgctcacggtgtcggttttgccggtttcggaggttttgtcgggtggggcatcggaatctgtcacgcgcgtcatgaccggccctccactttggacgaggacggacgacgagcctgaatgcgttgggtcagccaggcgtccacttcctcttcgacccatccaacggctcggccgccaagtgagatgggcctggggaaagtgcccgtggcgatgcgcaggtagagggtgctgcgagaaagtcccgtgcgggccttgacgttgggaagtctgaggattgtcgtaaccatgtcggcgcctccttgggcgttgttgaacatggttagggattaaaggggcggcacaggggttccgtgcaatattccgccctaaagagctcagaaaagctcgacttttagggcttagggcggaacccctcacgggatgctcgcgcgattttgttcaaacgactgatttgttttcgtcttccaaaagcgctctgatccgacgttccgtacggccttcgcgtagggccaatgtcttggtgggcgcacgattacctttagctatttcctcattgtgttcacgcctaagcctctgccgccgttcttgcgccgattcccgatccccaccgccagaagctgggttatccacgcaatgcgtcaactttttttgatccatccagaaagagcctttttcaaatcccaacacttccgtaagcctgaccgtgtgccctgccagagacaaaagaaattcgtcctcggccatcagcaccacgtggctagcgtgtttcttgcctttgaggttgccaatctcccagcgacctggcgcatccctccgggcaacaggctgatgaatccccaacatagctgtcagcaaggcggccagcgcatcaccggacgtctgccaccgatcaagactcgccaaaggaatcggcacgcggttggtatcactgcggagatcacacacgatgaacgccatcgaagcgccgggcagaacgtgcaccggcctcacacactgctcttcacaaccggggcatgggatgcttgcgccgggatgtgcttttttcagcaatcctttggccttgaaagcgtcaacaaccgttctgtcccaatcctgcaggccctcttggccgatcacagcaaccgcgcctggacgagccgccagaacagcaagccaagcctcaagggtttcctccggcgtcatgcgtcagagggggccgattccggctgcttgggttcaatccccgagcattgcagcatatcccgcagcttcagcccgatgtcgtcatacttgagcgagcatgaattggggtacgtgagccggatggggaaagtcttgggcggcttgtccacacgaagggccacgcaggccaccagctccacctgcgtgacatggtaattgtaaaggcgaaactcgggggattttttgacctgatccaacagatcgtaaatcgcttcggcattctcttcggtgtcagcctccagcgtcagacgctcgccctgtttgatccgcgacgaaaggcggagttttttgacggccacccgttgaatgccgctgtccacggggtagctaaaacggaagctccttttgcgcaatggctccaggtcatagacgcgcgtgtcgcgggaatcgggaagcagctcctccacgttcaaaatggacaaggcgaacatcgcctgcaaaggtccaacggccttagaagagccgcgaaaactcaggtccaaagacccttctttttgcgcatagacgtacacaatctcaaacgctgggttatgcgggcggcgggcgcattcaccgttgacccattcgataccttgttgcgcgtggtcctcggggtagcagaagaaatagtccctttcgccgcgccgatacgcctcaaccacgcagttctgtccgcgcccttccgtgtgatggaaataggtgctgatttgatgggccaaatccttccggctctttgggtccgtacgcgcgtgcttctgagggatgttgttgcgttttcgccaaaaccccagcgtgtccgcgtggcagaaaagacatgccccttgccaaaacgcgggatgatccagaaacgtcaccatggctcgttcaaaatggccgggcagggccgagagtttctccacaagggcactcagggcttcaggcgattcacgcaattgccattcggcttcgtccagaatggcgataacccccttctcgcagcacagcgcgaaaatctcgtgcagttcggcatccatcgcgttgcgttgtgtgtccggcaatttcaaccaagccgcgaacagtttgtccggcttcttcttcggcagtgccgcgaagtcaacgtccttaagaacatccttggtctgaaaataccgccctaaaagctcgttcggcatctgccgaaagaaatgctttgtggcgtagtggcgggtcatggcaccaagccccatcgagacgtaacgagaacggtccggagcttagccgacaagacgggacgtggtaaaggcgacggtgcttgaagagaaggcttacaggcggctcaaaagaatttcccccaccggttgcccgatgggggatgatccttccggagaaacctttcggtaactccgttaccgtggcttccccaccgatttgccatagccaatgggccagaattgcagcataaagtcaagggccggaacaacaggggcaacagggaggacactatgacagatgagcgtttggtttttggccttgaccttggcattgcctcatgcggttgggctgttctgcggcaaccgacgcacgcgggtgaagcctcggtgattgagggcctgggaagctggtgtttcgacgcgccggaaaaccccaaagatcgcacccccaagaatcaggagcggcgaggctttcggcttcttcgccgtgttctccgccgtcgttgccagcgcatggcagacattcgaggcctctttcacgcaaacggccttctcccttcggcggaggcccaggctctccatcatccgctggatcatcgcgcccctccccatcctttcaagaagccgtccattaatccttgggacgtgcggggacggggtctggatgaagcgttgagacccctggagttcgcggttgccctggggcatatcgccaagcaccgaggattcaaatcgtctgccaaacgcaagacggagagtccggacgacaaaaagatgttgtccgcgctgaaaatcacgcaggaaaagcaagccccgtatcgtaccgtcggtgaaatgtttgcctgtgatcccgattttcaggaccgcaaacgcaaccgcgagaaacgctacgaccgcaccgttggtcgtgaagacctgacgaaggaagtgacggctctgttcgctgcacaacgtcggtttggacaagcattcgcttcgccggagttggaaaaggcgttcacggatatcgcgttttaccaaaggcccctgcaagatagcgagcgtttggtaggcctctgtccctttgaacccactgagaaaagagccgccaaacgatccccctcgttcgaaaagtttcgccttcttcaacgtctcgtgaatctgcgggtcaagacggcaaccggggaacgcgccctgaccccggaggaaatcgcacgagccactgctgatttagggagcgttgccaaacttaccgttaaggctgttcgcaaaaaaatagggctgtccgaggacgagccctttgtaggcattccccaagataagcctgaccaggaacgagatattgctgctggcaaaggcgaggccatggggggaaccaaggctcttaaaaatgctctgggcgaagatttatggcagaagatgcttcagcatcccgatcaactcgatgctatggcccgtgcgttcaccttctttgaatcgtccgcgagcatcgcaaaagagttgcgtacgattcccctggaagcagggatcctcgaaaaactccttgctgctcttgaagacggcaaattaaccgaccccttcaaaggcgcggggcatatttctgccaaagcgtgtcgcaaccttgtgccctacctggagcaaggtttgcgctacgatgaggcgtgcgcccacgctgggtacaaccacgctgcttccacgttatcgcaaagcgagcatgtgacgaccaaggcccagtttacggccctggtcgcggacgtgaccgccagcattgcgaatcccgtggcccgcaaggcgttgaccgaagggcttaaacaactgtgggccctccgcaaccgctatggcttgcccggcgccgttcatatcgagatggctcgtgatgtcggcaacagcgccgaaaaacgcggtgagctggacagaaagaacaaggaaacccaggccaagcgcgagaaagaacgcggcgaagcccaggagcttttggggattgcaaacagagaggacgttaacggtgacacgttgctgcgctaccgcctctggaaggaacaaaatggacgatgcccctatacggatcaggaaattcaccccgatcaaatcgcggccaccgacaacagcgtccaggtggatcatatcttgccctggtcccgctttggcgatgacagtttcaacaacaaggttttgtgcctggcgaaggccaaccaagacaaagggggacaaacgccctacgaatggttcagccgtgcaaaatcccccgaggattggctgctctttgcccaacgcatcgagaccaacaaaaaccttcgcgggttcaagaagcgcaactgccttctgaaaaacgccgacgaggtagcgcagaagttcagaagccgcaacctcaacgacacacgttacgcaacgcgccttctcgcggaggcggtcaagctgttctatcccgtcggggagcggcaggaaaaaggcggccatcggcgtgtgttcacgcggcccggagccctcacggccacgttgcggcatgcgtggggcctcgaatcactcaagaaggtcaacggtgagcgcgtggaggattctcggcaccatgcgatcgatgcactcaccgtggcagcggtgggtgaaggcgaagtgcaacggttgacccaatccttccaacagtgggaacaaaaaggtctgggtcgccctctgcgccacgtcacgccgccttggcccacgttcagggacgatgtgctgaaggcctatgactcggtctttgtcgcccggcccgagcgtcggcgtgcgcggggcgcagggcacaaggagacgattcgacaagtgtgggattcggatcaaggccccgtggtctcggaacgcaaagacatcaacgagttgacggctaagaatctggaccaaatcaaagatcccgaacgcaacgcggccatcatcgaatccctgaaggcgtggatcgaaaaaggtaaacctgccgatgctctcccgcgttcaccgcagggggacgtgatcaccaaagtccgctgcgtgacaacggacaagcccgggatcagcgttcgaggcggcactgccgcacgcggcgaaatggtccgcgtggatgtgttcagccaggccgacaagaaggaccgaatcaaatggtttttagtgccgatttacccgcatcaacttattgaaaaggacagtttacctccgaacaaggccgttgttgcccataaggacgagcgggactggacggacatcggccccgagcacacgttttgcttcagcctctacgaccgcagttatgtgagaaccgttgatgcaaaaggaaaacatgttgaaggttatcttgcgggaggtgtggatcgtgataatggaaagatcaggctgttctccaacaagagctcgtccctctctgaaagggtgagtacaaagactttattaagcattagaaagtacactgtggaccgtttcggccaatgtgccgaagtgaaacgcgaggtccgcacatggcatggcgaggtctgcacattgcccaagccgcccgattaagtcttcgggaccgccaaatcgtcgtggcgcaggaggatggcgagtcctcctttgcgctcgaagatgtggcatgggtggttctggataccgtccacgtcagcatcacgggctcgttgctgtccgctttggccgaaagcggtgtcacgctgatcgtgccggattcgcggcatcatccagcgggtctcttgctttcctttcatcagcatcacgctcagacgtacgtggctcacctgcaaagggacctggggttgccgcttcaaaaacgtctttggcaaacgttggtggtcgccaaaatccgtaaccaagccgccgtgttgcaagccctgaatcgtgccaacgccaaggccctgttcgccatggcccggcgcgtcggctcgggtgatcccgacaacctggaagcgcaagccgcccaggcttactggccctcgcttttccagggcttcacgcgcagcaacgaccgcgaccgccgcaacgccttgctgaattacgggtatgccgttatgcgggccacgttggcgcgggcctgcgtggcctcgggccttttgcctgtttttggcgttcatcacgactcgcaatccaacgcttttaacctggtggacgacctgatcgagccgtttcggccttttgtggaccgtctggcccagggtcgtgctgacgcctttcccgaaggagaattgacggttgacgaccgacgccacatggcaactgttttggggcgcgaggtcctgatggaccaagaccacatgaccattcttgtcgcaaccgaggcggtggcaacgtccacggtcagggtcctggaacagggcgacgcaacccttttgcaaacgcccgcgtggccccccgaaaacccggtgacgcgatgaacgaggaggatgtccgattcatgtggctctttgtcttctttgatcttccggtaggcagcaaagagcagcgtcggcgagccacgcgctttcgcggggcgctgaaagacgacggctttatgatgctgcaattttcggtttacgcacgcgtgtgccgagggcaagatgcggttgaaaaacacctgcggcgtgttcgaggaacccttccttcggaagggagtatccgggcgttgcaggtcacggaccggcaatatggacacatggaacttatgctcggaatggccccaaaaaccgagcgattcggggcggatcagatggttttgctgtgatttcggcgcacaagaaagcgcgaaaatcacagcaattccaagctgttacaagcaagggaacctaccatgggcaaatcggtagggaaaccacggcctccagtccatcacccaggcgtctaagtttaacctaccatgggcaaatcggtagggaaaccacggcgtccttttgcgggtactcgtggaggacaacaacctaccatgggcaaatcggtagggaaaccacggcacaccaaccatttttgcgacggccttcacgaacctaccatgggcaaatcggtagggaaaccacggctccgaggggggaaaaggaaaacgggacgggaacctaccatgggcaaatcggtagggaaaccacggcgctttgaagcactcatggtaggacctcttcaacctaccatgggcaaatcggtagggaaaccacggcacattttacaacggagcctcgggacaatcgaacctaccatgggcaaatcggtagggaaaccacggcacatcgccactcagccgacgggcgtagcagaacctcccatgggcaaatcggtagggaaaccacggcaacgggcgcgacgggctgctgtggaccaaaaacctaccatgggcaaatcggtagggaaaccacggccgccctgaaccgccgcgcgattgacctcttaacctaccatgggcaaatcggtagggaaaccacggcctatgcacaaaagctgcaagcaaacgctccgaacctaccatgggcaaatcggtagggaaaccacggcgtagtgaccattcacgtctttatcatccgtaacctaccatgggcaaatcggtagggaaaccacggctcttcagccgatgcttgaggaaaacggaggaacctaccatgggcaaatcggtagggaaaccacggcggaacggcggcgtgggcggaacaacgacgtaacctaccatgggcaaatcggtagggaaaccacggcggtcccagactcgcgcagaggcgcctgtgtaacctaccatgggcaaatcggtagggaaaccacggcgggacgggcgcgttcatgctgcaccgccttaacctaccatgggcaaatcggtagggaaaccacggcgtgaggcgcacactcttcgccacagaggataacctaccatgggcaaatcggtagggaaaccacggccctaccatttcatcccccttcaccctaccaaacctaccatgggcaaatcggtagggaaaccacggcgctttggtcttcaaggcaaacaggtttgttaaggaaacataccttttttatgcgcgaggttgaggtcttgaacacggcttttcgagacaacgcacggtggatttgaacagaaaacgctcccgccattttcaccaccatcaaacaggccatgtgcaactgttgacgatccgcttcggcttcgtaagcctccggtgctcttgtttcttcattcacccgttgactctgcggccataagccgtacgcgccgctggcgtgttctcttgccctgagccctccagccacgcaaagtactcgtccgcgcgtaccgtcacgagggatgaacctgttttttccgccacgcgctgcatgattcgcgtgtgaaacgccgcactccattcgtcccccgtgattcgttttaggtcctcatcgttttcgtacacggccagggccatcggctgtccgcccataccgaggttggacatcacggcaagggcacggtcagcgtaagcctcggcgagggccgccagcaccccgtcaggaacctggcggccagccacccaataccgcacagtgcggtcgttcacgcctaggtggcgagataattcactttgccagcgagggccgtagatggctgtggcggcaatggcaaggtctcgattcatcatttccccctcaacaccttattccaaccccttctaaggcttccgcttcatgcctcgttttctcgtgcctaccacagtcgaatcggtcgggaaaccaggaccattccaataggctcgtgatcgtcaccagcatcccatcatgaagctctcttgggcagcgccacaatctcggccccccttttcatcttatccagataatccgcccactgctgcatcatggcgcggcgttgggggaggaatttggtgcggttgtaagcggtgccaagggcatcgggcacgcggtgggccagctggtgctcaatcacctccggttgaatccccagttcctgatgcaggatcgtccgagccatggcacgaaagccgtgcccggtgatctctgtcttggtgtcatagcccatgcgcttcagagccgcgttgatggcggcgtcgctcatgggtttcaggggatcacgccctgggaaaacatacgtccggttgcccgtcagagggcgcaggtcctccaggatcgcgacgacctgatcggccaggggaacaaggtgctcggttttggttttgctgaccgtgtagcgccactcgcgtttgaccaagttgaagtgttcccacttcgcgtggcgcagctcgcccggccgcacaaagagaagcggcgcaagcctcaaggcactttggacaacaagcgttcctcgaaacccgtcaatcgcgcgcagcaaagcccccacgtcgtcggggtcaacgatcgccgcgaaatgccggtgctggaccggggccaacgcgccgcgaaggtcccccgccgggttacgttcgcaacgtccggtggcaatcccataacgaaaaacctggccgcaattttgttgtgcacggtgggaggtatccaccgcaccccgtgtttcgatgcggcgcaggaccgcaagcaattctggagccgtgatctccgcaaggggtctggaaccaatccaggggaagacgtctttttcgagcctttgaagaatcttgttggcatgtgatggggcccagcggggggtgtacttggccacccactcacgagcgacgatctcaaaactgtgttcggagagcgcgatctcggccgttttctgaattttgcggtatgcgctggggtcaatgccaccggcaagccgcttgcgggcctcgtcgcggcgttcgcgggcgtctttcaggctgacgtcgggatagacccccagggacaaccgcttttctttgccgtcaaagcgatatttcagccgccaccacttccccccggtcggagaaacctccaggtacagcccccggtcgtcaaaaagtttggccgttttcccggtgggcttggcctggcgaatcgcggtgttcgtgagcggcatgggggcaactctttagcggcatgatccacttgcccccaaagttgcccccacggggggccggatgtcaacggatgccctggacgctcttgggacgaaaaccccatggaaaacggccgtttttgccgttttcctggatgtcttgagatatgttcggaagtgtaaatggtggagccaagggggatcgaacccctgacctcgacaatgccattgtcgcgctctcccagctgagctatggccccacggtcgcggaaaaggacggtcaccttgtccgatactgctccaaaacacaaggggccagctgacacggccaactgacacggctcttgagaaaggagtcgtctctggcctagactaagtggggggggaagagggattcggagattttgacaaccacgggcgtcggtaccgtttagggcgcacgaatcggatggagtttggcaccatggtggatgtaaaaccttcgtgttccgtatggatgggatgggcccaggtggtgattgatcagttcaccacggccgtagacgtttacaccaaaccaccctacctcgatgattctgatcttgcatcgcatgagcagcggcaaaagaaggccacacgcctggtcgacatccttagacgtcttcatgtctttcgcgatgaatatgaagatttggcaggacgtgggcaccaggaggttgagcgggcaagcgaccgtttagtcgaaagcctacgcccccttctgcaagatgttcttggccgtttgccggaactatcccgagacatgcaaaagcttttgcattcggggtggcattccaactgtaatggtcgcacggctcagattcttttctgtggacctcggggccgcgaggaagaaggaatcggcagtggctttcccgagcatggccgcttgcctcaatcccttgttgacctctttgatcaagaacaaatgggggatgtgcgcggcgcgggcgacgtgcgcgcacctcagacaagcagccgcacggaggccttgtcacgttggcgctcgcagggactccgctctctcagcggagccggacggattgattaaggggggcgacagcctctctctcccgttccctctgttgaaagctgagattcgaagcaccttatattgataggtaacggaaacatattctgcatgtccgcatgtgcccccctttatgcccccaggctgaattcttatcccgccaaaaccatcgcgcattcggcgggtttgaggcggtagagggcaaaaagagtttcgttcatcgcggactcagcagcggctatttcagatcgcaatgaagcaaccttggcgtctatctctgcaagctgttgctgcaaagaggcgtttgttgtagcggggacttggcacagacgcgccacaagccggtcaatgtttccgcgcaggctaggtgtggtcaagaggctgtgcgccacgccatcgccaaaagctgcccttggctttctgtcaggaagaggttgtcaagcacaggagccttgccaacgtggagggataactcgccctttttccaaacgaccaacagttcgccgtcaacgctgagtgcttccttaagtctttctttcaattctttcagccgcgccaggcgctcggttgtcacgccacggcctttgaacgcttccagttcgggccacagaaggctttcttggtgttccgtccattggcaggtttcaagacgtttcttggcgtcagcgtacaggctgcgcagatcagagtgcatcgattcaagtttttgagcagccgcagcgatttcagcgcattgttgcggggtcgcttgagggacgggcagaggggcgataaattgtttgttggccgacatgaagttgttttgaaatggtttggagattcttcgccacacgaaattagcaacggggccatttaaaatggcggtaagaaaatacaagtcgtcccttcgcttggggataacaccattcacgtcgacattatctgtcgcaaataagccgtcagcgtcaatgccacatcctaatttttcagttaggcgtgggatgaggagtttgggtaaatgttgtttgttgatatttttgggatagacgtaaccccaccagccattgtcttgatccattttgccattctctcgtctacgcaaaacgatctcgttatcacaaatatagcgccatgcgtttggatattttttaaaaattctcgttttgtaatcaagcagggggtgttttcgttgtcgagggcatagggtaacaacagccacgtttccgtttccgggtgcaggtaacgcttggcttcttcaccagagacatgggggcgcatgatggagtcttcaatcgccacttcagtctccacctgtgtttggtagcggttctctccaaggcgtttaaggtgataaatcttgtcagcacttgtctgcaccccaacgacgatttgtgccacgtcagaatcacccagttttctacatttcttggccagcttatcaagcaaagccttctcgtcctgcggagcaaaaatccagacgtcttcagtgggcagtgtggcatagctggccgtgccatcgggcgtcgaccaatcaatccccccgacctgcccatcggacgcaaaggcgaagctgattttttcacaggcgcttttgttatagaactgaagggccgtgtaggtgatggcttcgtcgaacacctggaaatcacgaaaatcgatccagcgttccagatacttcccctgctgaatcagtttgcgcaggcctttcccgtacgcgtttttcagccacaaggacggggcgatgtagccaagccgaccctgttcacgcagcagcatcaagccgcgttcaacaaaaggcagaaataaatcatagttgccgcttgcgaccgtggggctcaccttccgtagattttgcagtttcacataaggcggattgccaatcacgcaatcaaacccgccacgctcgaaaatggttggaaaagcttttggccagtcgaaggcgttgatggcgtcacgctgctcggcgtcccataaatctttccccttcttgttgccgtaaaaatctgtgcccaccagtgcattgccttcaacaatgttctggtcaagatcgcacaacggacggtcggcgcgggtggtatgcagccataaggctaaacgggcgatttcgatggaggcggggttgatatccacgccatagatgttctgagcgagaatgaaacgtatatcgttctcggcatcacgttctgtttcagtcagaacgccaatttcgtttaacacggccttggctctttgtcgttcggccaaaagatattcaagcgcatgaatgagaaatgcgcctgaaccacaggccgggtccaccacccgccaggttccaagacgttcaagataggccagcaaagtgtggtgcagggcaagccgtgcttttttgtctttgggctcgggaatgggttcgctatcgtcccacccggcctcgttcctcaattcggccaagcgcgtgccgatggtttcttggacaacctgggccaccacccattcaggcgtgtagtacacgccatcaagcttacgcttggaaatgaccgtcaacgaaacacgctggtcggcttcggctttcagcttttcaagttcggtgatggattgttcgaaaatacgacccaacgtgtaaagcgtgatggatttttgtccgctggcatgaatgccaaaattataggtggccgccagatagagaagcgtttctttttgcgcgtttagaaacgctacgctttcggcctgcagtttctcacagaaaaccttgttgggaaggcgcaggccatcaagcactggatcgggacggaacaggccaccgttgaaacggttgagcgttttatctccaaaccgtccgcctgcgtccatcgcgtcaaacagctttttcaatttatcccagacctcttggccttcgactattttcagaaatggggagcacaaggtcaggacagtccaagtctcctcgaggaggcgttaaaaaaaggtggttggcggggtccgacacagccttggtcgacacgcgcaaacaacctttctgatcgttgactcacaaagcgtcaagaacacagacacggcagaaaacaaagggtttgacggcggcaagctcatttccggcatcaaacgccacatcggtgtcgacaccaacggcctgccacatatgatccatgtgaccaccgctgatgtgaccgatcgcgccggggctttggccgctttctccctccctcacgccaacctgacccgcgtgcaaaacgtgctcgttgatggcggttacacgggagagcctttcgccacgggagtccgagaaacgctggggaccacggtcaaagtcgccaagcgcagcgagctgcatacgttcgccgtcatccccaagcgttgggtcgtcgaacgctcgttcggttggcttgagaagtggcgcaggctctggaaaaactgcgaacgcaaactcaacaccagcctgcaaatggtcgtcttcgctttcctcgccttgctcctcagaagatcatgagcaggctctaagcctgtgcgttctaaaacaaacctttggcattgattcggaatggtgttgcgccaatacaggcgaaactcgttcatgtccgatacaaaaccccaaagcggctggaagcgctcgttgccataggattcacgggcggcttcgcgcaggtattcggcgcattgcttcacgggactgcgtttgtcattcttgcgtttctgcggagcatccagattcgagtgaatgtccttaaactcgcacagggcgataggaacggaaggaatggtcggatggtcaaaccagcccagggcggcatcggcgatcccgacgtttcctggcgcactgccttggctgactgtatgtttggggtggatcgtgtagccttcgccctcgccgtttaaccgatagccccagaccttcacaaaaaaatgcttgatgaaagccacttcatccgatgtttcatttttcttggaacgcccctcccatgttcgaagggtatcaagaaggcgggcatcctccccggactggcaataggtcgcgtaaccatcgccccagacccgccgaagaaaatcgaaggagattaacgacgcatgggattccatgttcaactcggcgacggaaatcggaaactcattgagattctcgcccttttttcatcttctctgcaaccatctcagccgttttctcggccctcttatcgtccggttgggggggctgccttggcttgcccgagccccccatcatcttcccctgccgttcggtggacacatggccgtagccggtcaggggggtaaccctctccctcggagggagagggaatcctacggcacctcccgcaccccatgcgcccacaacgagagggtccttttatcggaggttggttcttccgaaaaaagggcggttacgttttgggcgcgtggatgaagacgtccacttgctgaccgatgtaaagcggccacgcccgaccgtccggagagggctccaccttgaacagaacgtccatggtccgcgtgtccacgcgctcggacaggctgcccgtgagggaggttttgggaatcacgtaaggctcgatccgcacgaacgtgaggggaaagccgatggcggcgtggctgcgcagagcccccgtagcttttgcccccggttg

SEQ ID NO: 1500 - DNA, 23162 bp, synthetic construct
  source 1..23162: mol_type = other DNA
  misc_feature 1..23162: note = Synthetic
acccgttattcaaaaaacggaaccaccacctgccaataaaaaataagagccatcccctcatcatctaaagaggggaaaatcccacatgacgaaccatcctaggtcgacagcagctctttcatacggcggacgctagcgcctaatccgacaaaaacagcctctgcaatgaggaaatgaccgatattgagctccgccaagttaggaagagccgttacaggcgcgacattctcataggttaagccatgtcctgcatgcagctcaatgccatgtttgttgacgcactgagcagcccgctgtaagcgctcaagctccccttttctaccagaggcataggcccctgtatgcagctccaccaccggagcgcctaaccgatgagccgcctcaattgaggcctcttctggatcaataaaaagagaaacgcggatacctgcctcctttaaacgcgcgatccgtggcgcaagagaggcttcttgcccaacaacatccaaccctccttctgttgtcacttcctgccggcgttctggcacgagacaacaagcatgaggctttaaacgacaggcaatctcgaccatttcatcggtcacggccatttcaaaattcaatggcgcgggaagagcgcgcagccgctcgacgtcctcatcacgaatatggcggcggtcctcacgcaaatgcgctgtaatcccgtcagcaccatgctctaaagcgagacgtgccgcggccactggatcaggatacgactcaccccgtgcattcctcaacgtcgctacatgatcaacattaagccctaggcggatcataacgttcccctttcctatcccattcggtgcgctgtcggctcatttcttcagccatagcaagagcggcgactaaactagacgcgtctgcacgtccctcttgcgagactccacacgcaatatcaaaggccgttccatgatcaggcgatgtgcggatgataggcaaccctaaagtcacgtttaccccacctgccatgtctaacgtcttgagcgggatcaacccttgatcatgatataaacaaatcgcggcatcatagtgagggcgtgctgccgcactaaacatcgtatcaggcggcatagggcccgtaacgtgaaagcctgcatcctgtaatttagcaacggcaggtttgatgatggtgcgctcttcttcccccatcatcccattttcccccgcatgagggtttaaccctgcaatcgcaaggcgcggctttttactgccgaaatcacgctgcaaagcgcgatgcgccagcgttgtcacctcaataatgcgttcttctgacagttggtcgatcgcccgccttaacgaaacatgaatgctggtcaacaccacctttaattcagggcaagccagcatcatcacttcttgccctgttacaccacacagctcagccaaaaactctgtgtggcctggatgtggaaagcctgcggccgcaagcacatgcttcgcaatcgggtttgtcacaaccccacccgcctcgcctctttgtgttaaagaaacggcgcgttcaatgcttttgatcacagctccagcattgcggctatctggctgccctggagtaacaggctctgcacaaggcacatgcatgatgggcaaaacggaggggaaaagagccggcacctcttccactgaagagattttctgaagaggaagcgcaccttccacaagggaagcatccccaatccagaaaaacggtgtgccttgatgtcgcaagcgcttccacgccttaaccgttaattccggaccaatccccgcaggatctcccattgtcaacgccaatggacggctcatacgctcccctttcatcccttatttttccgataaagcggctaagatacgcacccaagaacgtatgcctttatgaaaggaatcaagcccataacgctcattaggcgagtggatacggtcatctgcctgagcaaacccgaccatcaaggcatccatgctcaatgcttctctgacctctccggcaacagggatagacccacctgagccaaccgtcaccgcttcgttactccattcttcacttaaggccttcagcgttgcaggcaagaactggctgcttttcgcaaccgcaaaaccttctgaacgcccatgcgaaataaactccgcttttacatccttgggtaacgcttggcgaatatgctggcgaaatgcttcctgaatacggtcaggattttgtcccggcacaagacggaaggaaaccttcgcccgtgctgttgctggtaagacagttttaaacccttcatcctcataaccgcctgaaataccatttatttcacagcttggccggcaccaggtttgctcaaccgcactaaagcctttttctcccgctgcgattgaaagccccgtcccttcgagaaaaatttcatcacttgggaacaaacgccgccattgcgcacgcgtagcatcatcaggaactgttacgccctcataaaaacctggcaacgttacccttccatcacgatctcgcagagttgcaagggcttggcataaaagagcaataggattagctgcagcgtttccatacattccagaatgaaggtcatgcgttgcagcagaaaggatcacctcttctgcaaccgtcccgcgtagtgatgttgtaatcgccggtgtccgtcgatccgccatcgttgtatcgcaaatcaacgcgacgtcggctttaagttcttctgcattttcttttagaaacggcagaagattttcgcctccagactcttcttccccttcaagcaatacactaactttgacgggcaattccccatgcacctctttccaggcacggcacgcctcaagaaatgtcatgacctggcctttatcatcactcgccccacgcgcgatgatcactttgcgccctgacgcatcctcagccatttgaggatcaaatggggctgtcttccattcatgctcggggtcggtcggttgcacatcataatgcccgtagaacagcacatggggcttcccatcacgatggttcgtactatgggcaaccaccatcggattcccaggcttagcccagcgcacatcccgcacctccgctatcatagcacaagattttaggtcatcccgcagccattctgcagcccgacggcaatccgccgcgtgctggctttgtgtcgagatactgggaatacgcaacaaagtgaaaagccgttcctgagctttgtccagcgtcttatcgacatgagataaaaccgcttctaccgatgcataatcaaccatactataattctatccttttcagcctcgcctattggctcaattgaaccccaagacgggttggtaattcttgcttttctgactcttcctcctcttcagaggaaaccagcccactctttttttcctcatgcgcacgcccaccaatcggacgacactgcaacggagcaggcgcaaaacgcctttctaacggctgctcatgccctaggctctgatcaaaggacatcggtgctgctcccgatgccagagaaagtatgtctgcaaaaacctctctgaaccgcgcaagcgtattctctttttcaacacgctcgcgtgctttggtctgcacatgtttccaaaactcttcgttctgatacagttcagcaatagcctgcgcaaaacgacgtgcatcattaaatccaccattgaagcattcttcacggtccgtccaatgaagggattccatcaacggagcactgacaaccgaaggaagcccatacgccgccccttctacaacctccaacggctgcgtcgcgaaagctcgtgttggcgccaccatcacccgacattgttgcatcagcgcttcacgtgattgcttgggagacgataacccttcaagcaccacaaaccgctcataaaagctcaaattaatcgctgggttatgatacgtcccaacccaaacagggacatctgctggcaaaaagtcattcagatgcggcacaacctgcaagcagaaccaatcaaatccatcatgtacagcatccccagaacgataaatgggcaatgggaagaaaaggccatgacgttctgaaaactctctatccccttcccaagcgggcttcaccgctacaggaggcaggagtttaacagcatcatagcctagctcattcagtaactgaacctcagcctcatccccggcaataatgcattgacatatccatgcggcggagagttcttctgccgcttcttgccgcaaacgcgctcgatcatcctggttgcccacaagacggcgcagatgattctccattgcccgcaagctccctccttcgggagaaacaagatcgagaatgatcccacgcgcaggtaaagaagccgcttcagcctgtaaaatcggggcaagctctgaaagaacagaagtgcctcctatccatagtgcctgaaatttcccccgcctggactggaaaaactccgccatatccacagtaccaaccacacattcgatatctggcgggtaatccactggaatggacaagcgatcttctttcgtaggacgtagccccacgacaatgatatcccatccctgctgctgtaaggcgtcaatctgatagaaaatgcgttttgccgcctctccttcctctttatgcggcacgtgagagaacaccatgaccataaccggacgcgcacgcggggcttgccattctccacttccaggaagggcgtgttgtgacaacagacgtgaaaaaaaacgcttcaaacgtaccggctgctgggaaagagcatcaggcgataccggggctgttcctaaatctctgatcaagatatccgggatataacgcaacttatgcccttgagcccgaagtgcaagtgctagaggcgcaaaaccactggcgagaccacaacgctctataacgggtaaaatgtggcgtaaactgtctcggcgcgcgaagataaatccttgctgcacggcttcaacatcccgctcatgaccaatatccacatcataagcgcttttaccgtggccacatggcgtaatgtggccatcacgccaaagacgacaccccgcttcgacaacatagccatcgacaccaataatctgccccgtcccaccgtggatcgacgcatccgccatcgcatgctgaactgcctggatggcgcctaataaaggctgcattcctgcctgcatgataacgatagtctctgatgttacgtgttgaacaccataagcgagcagcttctcgcgtggttgccattgatctggatataaaagtgtcaccccttctgtacattgcttaattctgcgatgctcttccgcagaaccactactaacgacaatgatctcacacgctgtgtagccctgctcatgaagcgccaagagcgatgcaatgactgaaaaataatccccatctgagaggataataatactcagctccggggctgtaacgacgggaaaacgtaatggagagcgaaatattgctggtaaagcagacgccacacggctgacagcgacacgctgataagactctttttcaggcgcttcaggcaataaatgaagacgcccttcctcttttttaatccataaaacaaacgcattatcccgctgtaacgtcggggtcatttgatatgaatcacgtgtttgcgcaaaagctgcgaggtctagggcctcacagggctgacgcttttcatgcacgcctgatgctaagaaatgtgcatatccgttacgaaaaactccttgagcgatagcgtctcgtacatctggatagcgattaagataataggcctcactaaaaaatggattagggtcaaaatcctgcgcattttcacatgataaataatggtgtagcggattgatatattggccattatcaatctgttctttgacatcaggataacgttttacataccattttgggtcaaaataccatgtcgttctgacgagccctaattgagggttttctaacgaaagatactgctcaaacccaccgcgttcgagatcaaaccccacatcttctttaagacattcatccataaagagatcttgttggaaaaacatattagggctttgacgtgctttatcgcctatacgcaaaaaataatcatagccgttagcaaaccccattttcaggactttgcggtaactgatgtccgtattgcttcgaaaatattctatagaatcaaacaaccaatgcggcgcactgtgccggtacccaacatccatataatgttggaagccactctcaaaaataccgcttagtttcacactacgcataacagtatcgttacgccgcaaataccatgcttcatcaaaataacggttaggagaacgttcacgatgaacaccctccttttcccacaactcttctaagcgatagtcatccgctttctgttcttcctcagacataacgtgccgataccgacggcgataccaactcgcatcgaataagctccataatggcttctctagctcatcatgacggaaccgaggcactagtataccgccaatattttcttccggcacgttatatcatccctgtcaattagttgctttttttgtagctgtgccaaaactcacggaaatcaacaggttgtggattgacggttgagaaaccactctctctgatgaggttgagcaaaaccgcacgcgcggctggcattaaataccctgacgcgttttgcaccaaataagcctctttctcttctgaagacgcctcacctgtcagcccaaaaataccggcatagacaacattagcacgataaacggttggcaagtcctcattctcttcagccttgcgtggcaggcctgttccctcaagcaccaggcgtagctcatagagagattcatcattggatgctttacgcaagctcagattcacgacaagattaagatgtggcggggcctgaagagtgagaaaaacttgtggagattccggcacatctatctctgcatgacaaagatattgagccccgagctgtagctcaagtgctgcacgcacggcattctcgccagatttttttgtcatgatcctgactctgtcctaattatctgatacgcaaacgtatctgttctcgacaattgtgattaacgggacgcattgtcgaaagaaacaggcataagcgtcaagtgttcatacacatgtttcttgtcgcgttccttcaagcaggataagaataccccatgctcagactactcattattgtccttgttgttttgttcctggccacagtcgccctcagtaacactgatcctatgaccatttggttaggtccgtggcaatgggaaattaagccagacgggatttttatttttgctgtccctcttgctgggttggttatcggctttttgcttggctggatgggcgaattacgtcaacgccgccgtgcgcgccgtgcggaaaatcaagtgcgttctctagagaagcaaattgttgagcttcatcaacgcctcgaccaagcgcaagcctctgccgcaccgtcaaagccagcagcacctgctcaaacagagaccgttcaacctatggctgagaaataacccatggccaatcgccgttctacacgcctcattgccgctctagacacatcagaccacgcaaccgcacagcgttgggcgaatgatcttcgtggatgtgttgatgctgttaaactcggcctcgaattcacctacgcatgcggcctagaggctgtgaaagcgattggggcacagcaggatcttttcctcgacctcaaattgcatgacatccccaatacagtagcatccggcctaaaagccctcacaccgctcaaaccccgcctcaccaccattcatgcctgtggcggggcggagatgatccgtcgttccagagaggtgctggatgaagcattcccgggggacccagaacggcctaaactcattgctgtgaccgtcttaaccagcatgaacacccaaaccctctccgagattggggtgaatgccacgccgttgcaacaagtggtgaagctcggccggttggccatgcaggccggagcggatgggcttgtctgctccgctcatgaaattacagccttgcgtgatgcgctcggtgaggtgccagaactgattgtgcccggcatacgccccgagggtagtgaagcccatgaccagaagcgcgtcatgaccccgcgccaagctgctgaggccggagcggactggattgtggttggtcgccccatcacacgggccgcggaccccgcacaggcagcacagaccattcaagctgagctcaaggcttcatgacagagatcaaaatctgtgggttaacgcggcctcaagatgtgcaactttgtgccgagctagaggtgacatgggtggggtttgtgttttaccccccctctccgcgctccatctcggctgagcaggcggccctcttgcaccaaaccatccctacagcccaacaaggcgggccatcacgtgtcgggttatttgttaaaccgacccttgagatgatcaacgatgttctcgcgcatgttccgcttgatgtcttgcaactctacaccacgccagacatagctcagcagattaaacaacaaacgggccttcccgtttggctcgcacgtgggatcaaaacagcgtctgacctccccacgcaggcgagcacgctagaccgtttcattattgaggccccggctgatgagcatgacacgcgccctggcgggcttgggaaacgctttgattggtccttaacacaaggatggaacgcccctctcccttggctattagccggagggcttaacgcccataatgttcaacaagcgatagccaccagcaaggcgacagcggttgatgtctcctctggtgtggaatcccaccctggacataaatccccagaacttttgaagaattttgtcaaaaatgcacatgcagggggttgtctttccacgggagaatgatatgttccccgcacgctcagcggagagatggccgagcggcttaaggcgcacgcttggaaagcgtgtgtacgttaatagcgtaccgtgggttcgaatcccactctctccgccatctatgccgagtagtgcttccctataaaattctgacgattggtccatgtttagagcacagcatatcaacattttccgcgtcagacgatgatccccgcaaggtatatcaagatatcatcccatatgaggcgtgacggccatcatgccctctctcactggtcatcacctcatagctgatcatggaagataacgcctgtaagcagcatcttcattgccccaatagtaaaatttttgtttagaagacgataaacctcttctccccgtacagacgcttcacgggattcaaaaatgactcaatgcaccttacaggcaacccgccacggcctcaagaagggccacgcgaaggctataggcgctgcatcaatagcagcgtggcaccgcatacggcacaagaaataccaaaaagcaggatcatattaatcaagcattacttatttgcctaaggtaagatgcggttgagtgtgtgaactgtcatgccaacgccgtggtttacctaccgatttgcctaaggtaagatctcatcctgcataccgagaacaacaactgtgccgtggtttacctaccgatttgcctaaggtaagatatagatccggaataacttcttgttatcatgatgttttttgccttttttcgggataaaaaccatcgccgtaccgtctctttcacgccaattctgtccgttttttctctcaactggaccgacactcccccattattcacgttaatagcgccataagataataaatgcgcaggagaacagcattcctcatttcggaatgacatgcacgaaaaacgttatgacaatataacgatatattttatgaagacaccatgatgagcgactatgacattagtttctacggcgtcatgccaccaggatgttcttattacacgttaaaagaacacgccatattctaaaaagagaggaatccctctcgccagtctcctgacgagaggtaatccttcacatggaaaaccatgttaccgtggtttccctaccgatttgccttttatggagagtatggagcatactttctcctgtcaatactggggcagaaaaatcatgacggcagtcacagagtcttttttatttggcattgatcttggcatcggttcttgtggctgggcggtcctgcgcaacacggatactgataacgccattgaggctctaggcagctggtgttttgatgttccagagacgaacaaagagcgcaccccaaccaatcaaattcggcgggctcaccgccttcttcgtcgcgttattcgccggcgtcgcaaacgtatgaccgatatccgccatctctttgaaacctatgggctgctctcctcctctaagcctgatgctctccatcaacccggcctagacccgtgggaaatgcgcgccaaagggcttgaccgccccctttccccacacgaatttgcaattgcgcttggccatatcgccaaaagacgcggttttaaatcctcagcaaaacgcgctgcgaccaactcctctgccgaagaaggcaagatgcttggcgctgtcgaaaagacaaaagaacgattggcacaatatcgcacggttggcgagatattcgcccgtgatcccctctatgggaacaggcgccgaaatcgggatggtctttttgaccgtaccatgagccgggatgatgtgctggcagaaacacgcacgctcttttccgcccaacgccgcctcggaaacactgccacaacgaaggagctggaacattctttcattgcaatcgcttttcggcaaaaacctttgcaagatagcgccgcccgtgttggggagtgtccttttgaaaagggtgaaaaacgtgccgcccgcttcgccccctctttcgagcgctttcgtctcctttgtcgtctcgtcaatttgcgtgtgacagacggccctatagagcgccctctcacgcctgaggaactccgcctctcctatgagcaagccgggaaaacccgtaagctcacggtgaaaaaagtccgcaccctgatcggcttacgtgatgaccagcgttttaccaccatcccaccagagcaagaaaaccacgatatcgccgccagaacaggagaatcttttcctggaacagcgacatttcggtcaattttgggcgagacactctggcagtgtatgctcccccacccagagcctcttgatgaagccgcttgggtgatcagctttcatgaactgaccgatacaatccatgaaaagctcaaaaccattggccttccgctcgaggtgcttaccctcattatacaagccgttgatgaaggtaaatttgcaaaatttaaaggcgcggcctccctttctgacaaagccgcacggcgtctcattccctttctggaagaaggcttaacatatgacaaagcctgccaaaaagctggatataatcacgcagcctcacaattgagccattacgatacgattgatacgaaagaaaaatttaacgcattattagacgatgtacgcgagagcattggcagccctattgctcgcaaagccctaagtgaaggtatgaaacaactctgggctatgcgaaatcgctggggattgcccgacgctatttatattgaactggcgcgcgatgtcagcaatagcgcggaaaaaagacgagacattgaaaaaggcatccagaaaaacacggcacaacgcgcgcgtgagcgtgcagaagcttgtgagctacttggccaggacgttatttcatccgagacactcttgcgcttccgtctctggaaagagcaaggcggtcgatgctgctatactgaccaacctatagcacccgagacactgatcgccagtgataatagtgttcaggtcgaccatatccttccttggtctcgttttggcgatgatagctacctcaataaggggctctgcaccgccaaggcaaatcaggaaaagaaaaatcaaaccccgtatgaatggatccaccaaaagaaaggcccagaggactgggagcgttttaaagcatctgttgaagggcgcaaagaaacacgcgggttaaaaaaacgcaattttcttctcaaaagcagtgccgaaatcgaagaacgttttcgtagccgcaaccttaatgatacacgctatgcaacacgccttatggcagaggctgcccgccttctctacccgcctggccaacgtgcagagaaagggggcatacggcgtgtttttacacgccctggtggcctcactgcagcgcttcgtcatgcatggggcgttgaatccctcaagaaaattgacggtaaacgtatcagagatgaccgccaccatgcacttgatgccgttgtggtggccgcggtgaatgaacgtgaaatccagaaactgacacgttcttttcaagaatgtgagcaaaaagggcttgcacgccccatgcgagacgttgcccctccatgggataatttccggcacgatcttgaagccgccttcaaaaccatcaccgttgtgcggccagaacgccgccgcgccagaggggaaggacatgcggccacgatttaccaagtgcgacaagaaggcacaaaacccgttatttatgaacgccgcgctattgataagttgaaagaaactgacctcactcatattaaagaccccgagcgtaatgccgggcttatttctgttctacgcacctgggttgaggcaggtcgccctgccgataaaccaccccgtgccccaaccgctgaggggaaattaggccctgagatccgtaaagtgcgggttgcttctaccgataagcctgctgtgctcgtccgagaaggaacggccaaccggggcgatatgacacgtgtggatgtgttcaaaaaatatgggaaaacaggcaaggtagaatggtatcttgtgccaatttaccctcatcaaatcatgaaccctacccgttggcctcatccacccgatagagcttcagctcaaaacaaaccagaagaaaaatggccacagatggggccggaccatcatttctgctttagcctttatcgccgcagttatgtccgggtgatcaaacgcgatggcacaattgttgaaggatatttctccgggcttgatcgatatagtgcgtccttcgcgctatctcgcaccgaaaacccaacctcagtgacccgaagtataggcgcaaaaacgcttacatccatccaaaaatacagcatcaaccgctttggagagctctctcccattcaacaggaggcacgaacatggcatggcgcagtgtgcacctctcccgcccctccaaactccgtctgaaggaccatcaactcgcaatctttcaaggctcagacactacgccaaccatcattccccttgaagatctcgcttgcttggtgtttgacacaccacaaatcaatctttccggcgcactcctttccgcctgcgtaaccagggggattaccctcatcatcccagatgaaaaacatcatcctgctgggcttctcctcccttttcatcaacatcatgcgcaagccgaaattctttccacccagatcgatgcctcccaacctctgcgcaaacgcctctggcaacagctcgttatggcaaaaattaaaaaccaagccaccgttctggcagaatgtaaccctcctgacgctataatacttcgccaaatgacccgtcgcgtgatgtcaggagacccagaaaatattgaagcccaagctgcccgcttttattggtcacgtcttttttcaaaattcacacgggcagaccctgacgataaacgaaacggacttcttaattacggctatgctattcttcggtctgccattgcccggagctgtgttgcctcaggccttgtcccagcccttggcgtgcaccattcatcccgtactaatgcctttaatcttgtcgatgaccttatagaacctttccgcccggctgttgatcgcatgatttaccgttacgacccagaaccaaacacggcgcctattactcttgaagagcgccgtttgatggccaacatcctcacggaagaggtttttaattggcacagaatgtatgaccgtccttgcggctagtgaggctatgacaacaagcctcgtgaaggccctttcacaaggtaaagccgaagggctgaaatccccccaactggcagacagaagcacgccatgaaagccgaggaggcccgatttttgtggctcatgattttctttgacctccccgtacgcacaaaaacacagcggcgtcaggcaacgcgctttcgcaacttcctccgccatgacgggtttattatggtgcaatactccgtttacgcccgtatcgggcgggggaaagacagcatagagaagcatctccggcgcgtccgcacagccctcccacgggaagggagtgtccgcgctcttcatatcacagacaaacaatatggacgaatggagattatgcttggatttgctaaaaaaacggaaaaaaccggggaaaaacaaatgatattgctgtgatttttaatccagaaaatgaaagaaataacagcaatatcaataagttatatcatagctaagcctaccatgggcaaatcggtaggtaaaccacggcaggaacttgaggccacgacaacagatcgcaagcctaccatgggcaaatccggtaggtaaatcacggcaaacggctcaataaggctttatatgcatatgctcttacgctcatatttccatcactatgggcaacctgcacgcacgaacaatcacagagcatcaacccgctggaaagccactccttttgcgaccaacctccaaaaatcattcccaccactctttaatccgtgcccataaattttcaacaagatgccggtgtctggaagcccatttggggcaagtaactttaggatcgttctggcgtggcgagaaacgggacgagacccgtgggtccaaagagagtcacggaatttatgtgaggcatagccacggtcgcagaccacataaattaggcggagcggacagatgagaacgtagagcataggcacatgaccattcgtagcctgtccgggtgacagcgtgaaagacagagcctggccacgtccgccagcggctacacagaccttgatgccccccccccacgtgatcgaccacgagcttcacgatctctgtggccgtctttgtacccccttttttagccgccccagccgccttatggtgggcacgtatgacagttccatcaagaaaaaccgcacccaatgcttgatccttgctgctaacccgttcaaagagacgctgccagacaccaagcttcgaccatcgaatgaacaactgggcggcaatccaccagggactaaactcagaaggtagaaaacaccatttcgcaccattttaatgccgacagaaaatcgcagagatggtccgtcgaaggttgtttgttattcaagtcctaacaagacctaaaagatttttattcacataatgcagtttcattatgctgtagaacataaaaaatcacgctacagcataacgtaccaatatagttataaaaccattacaataataatatttaacgaagcaaaccaatagctgctatactttccaataaaagactccctccaaaatcagtatttacatcaaaagagtaagctatattttccaatttgaaatctgttgtataatttttattaatccttttaaatttttcatatgtcatcacaaatgaataagtatttttctcctttggatttccgtaatcatcaagttcaatataatcaattataaacttacatgatcttggtggactttcaacattaaaaacattttccaatatcttataatattcaatttttatcaattgagcaagtaatacatgtggaataatttttgcattattagaatctaattttttattaaatatatttgtgcttacgaaataaggtacattttttatcatttttatttcatcatttgtgacttttgatacacagggattaaacgttacactctgatgaaatccagaatttatttcaaataaatcggtatcgttacttttatttttttcaatttttgcttcgagattttttagactattcttaatatccgatgcataaagtgtcatatatctatcaacgtcattccatttattgtaacaaaatgcagaaccggcacataaaaatattaataagacgtaaatgtatgctttcatagaaaaatccacgcaagaatgccatgttgtaacgatataagaacaaccttctccttatttgcatagtaaggtcaagattttctcatcgttaaatatgattatattagatatgttcatcagaaaatatacttgttctaaatatgttttttatattctttccaactttcctctcctaaacttcaatatatgatggcactctgtaatgaggtatcatgctcagaccacgaggattataatggaaaaaccacctaaaaacgatattccagatgaccacagtaatcatacaaaatcacacaattttctcaaaaaactatatgataagagctcgatactaaaagtcagaaaaaagaaaatctatctaaaccacgatgatatcgtcagtattaatataaaaaacaatattaagaatgacctttatcattattttattcaaatatcttggtggaaattttcatttttatcctttctggtttattgcgttatctgcctttttttcgcgacccttctttaccctgaatgggcagaaatatcgtccatcaaaaaccccagccttcttaccttatttttctttagtatcgaaaccctatccacagttggctttggctttatggcaccaacccaagccatctctcataccattgtttcaatcgaactctttacaggtattttggtcaacgctgtcgtcacaggtcttatttttgctcgtttcacgcgtatcccagcacgtgttaatatcagtgatgatatcgtcgtttatgaggaaggcgggataaaatatctatccgtccaaattattaatgaacgcaaaaactctgttatctcgttaaattcagaaatgacccttttacggatcgtccaatgtgaagacaaaagtgcaaaacctatttttgaacaaataactctcaaagaaaactttattcctattctgcaatattaccatgaattatgtcatgcaattaatgaagaaagtccattttatcagatgagtagtgacgattttcaaaaagagagtttccgtatctttctctatattaacggaattgatgatgttacgcggcaaaatatttttgcacgcaaaacatacaaaataaaaaatatcaaagaaagttaccggttcgaaaatattatgaatattgaagataatggaacaatcatttttgatgccgccaaagcaggcaaaattgttccatcatcccctcaagttgacgctccacctcacgacccaacgccgacataagcttatcctgcttccctattacctgatctttgtctccctcacacattctgccgagtcgggcggtactaactcccgacgatgggtagctaaatccacttttgctgcctttaataatgcctgaaagtgagggtctgtttgctcatgctttatataagcgcgcgccacctcctcccctgccaaaatgtctgaattccaatgaaccccacaaatgacgcggctttccccaaaaagatggccgcgtttcagtaaggcttctcgtcgctctggtaaaagtgaggcaagcgtgagcgctgtggcataaccagctgccgcatgacctgatggataagaccatcctaataaggcacgttccgtctctggaaggcagataggccccggatgatttacataagggcgctctcttttccataaatgcttctcataagagacccctttgcgcacgccgtgcttaacatagtgaatcaatgccacaacggactgcgttgatgctgtgttaatcttaaatccagccgcgcatgaaaaatcatccgctaacgcgtcagatcccttctgggcgtcatgaagggcaagtttccaacgtggtgtgcctcgaaagatgcgcgtggcatagaataacgagacatcacgctgcccctccttagacatttctgttggcggcggtggtaatgacggcctccatttcacgtcattaactgtatgtgaagcccctgtacagccacataacaataagaaaaacgtaaacctatatggcactcttttaaaaaccatcatgccccctaattatgcgattttcatattatgataaaaaattaaaaagacaatattatcattaaatttttactatattttattattttacagtaaaaaataaagaaattttatgtgtgaatattttttgtatttgtaatttttacatatttactgtttttatttttgttgatacttatttgcaattaaaaaatactagatttttgaaatatcttcatgttaaaagcctaaccatagagagatggcgacttaacattctgagtcgtcacattcaacatgacgaggctatcatggcagtaaaagaccccaaggttatcgagtttttaaacatccagttggccaatgagctgacagcgattaaccaatatttccttcattcccgcacgctgaaccactggggcgttacaaagctcggtaagaaagaatatgaggaatccatcgaagaaatgcgccatgccgattggctgattgagcgcatcctcttcttaggtgggcttcctaaccttcagaagctgaacccacttcagatcggccagaatgttcaggaaatcctggagtgcgaccttaaagcagaggctcttgcgcttgagaaccttcgtgaaggcatcgcctattgcgagagcgttcgtgacttcgtatcacgtgaccttctcttccgcattctctctgatgaagaagagcatgaagacttcatcgacacccagcttgatctcatcaagcaggttggcttggagcgttacatcacgctgaactcaacatcagcagacagcaaagaataatcgaactctttgttgcccataaaaaatgcccgcattgtcgggcattttttatgtctgctaaaagcctggctgcccatgagccagtgcagaaaccacccgctcacgcccttgctcactttcaagagcccgtgcttccaactcaagggaagccaatgccgcatcacatgatgagacacaaggggccggctctgcgctttctaccacgcattctctttgtctctttagagcctccttaagacggcacacgatccctggtacacattgaccacattgcacgcgacatttcttcaccgcatagacttctgccgtccgacatacaccactttgaatcgcagcatcgacatctttatccgatagagcattacatgagcagacgatcatgaaagcatccccaacgtccctggtgtaatttcgtcttttggacgttagtgaaattgcgagtagttcgcaaacaaaatcgtgtataaatttcttttctgcgtcattttaatacgtcatcacagcggcacagccacgtattccctcatcattgcgggcagatcatccctcttgtatgacaggccctgcccgcccatttttgccgcaacacacaggattccggatgaaaatccattatatcgttacaagcttagagaccggaggggctgaattcgccattccacaagtcgttaaaactattgagcaattcgggcattcggttgacgtaacagcctgtgaaccacgcgatatgggcgcagcccctcatttagaaaaagcgggcattccttacagaattctcttccaaaaacgtccaagcttcctacagactgtcctcaccttcatcaatatcctccgccaatcacgccctgatgtcatttggacctcactcagccgtgcaaccatcgtcgggcagcttgccggaaagatactgggtattcccgtcgtaagttggaaaaacagcgccaatcttcgcttttcaacgagcgttgggaagaaaattaccaaattatgggttccggattccttttacgtcgggaagttcttgcatgagcgcatgcatatccgcgagagcgatatcatcccctggccgctttatatctgtcaggccaaggagaccgtagcctcttactgggatgggcagacaacccttcagataggcagcacaggacggcttcatgaggttaaaaactaccctcgcctcctcaaagggctcgccctcttctgtgaacgcaatccagataaggcggaccgcgttcatctttccattgcaggagatggcccacaacaacaggaactagagcaactcattaaagactatcacctagagcaacgtgtctcattgctcggttttgtttccgatgtcccacattttctccgccatcttcatctctatacccaaccttcccgttatgaaggaatgtgcctcgcagcgcatgaagcgatgggaatggggcttcccctgatggcaacgcctgttggtgaaatgacctatagcgtccagaatgataaaacaggctttgtcctccaaagagatgacggcattcccgaaagtgtctgcaaaacattggaatatatttttcaaaatccactctccctacaacatttagggaagaatgcacgcgagcatgtggccgatatctttagtctagaaaactatcaaaaaagatgtaaaacgatactcgatagaattgagaaatttatgtagcatttactttaaaataaaacgcttaactcaataaatttattacagataaaaccattattttttgaatgctgctttaccccttaaccaaggggaaagcatattgtttgctttaaataatgatttatgctaccttcccagacactataactggagattctcatttttaacgtctgatcgttattggtttcacaccatcaatgagaatgagtctccacgataatctatgaagtagggccgagcactctcgtagggcctagaaatgctgtgtcccatacgcgctttcagcaatgaggctggaaacaggttcgtgacacgccgatgcacaaagggagagacaacatttatgctcgaaacagcacctgagaaacgcagtttcgccgagaagattggtattcccaaagctctcttctgggcgtttgtcggtcaacttttattcatggtgggtgatggtgtcgaggctggatatctcgacacattcgagacacatcacggccattcacaagatttcgtcaactatcttttcctcttctacggcatcactgtgatgatcgccgcttggctgtctgggccgctctctgatctttttggccctaaaaaggtcatgtggtgggggttgatcctatggtccgtgcttgaggcctgttttcttatttttggattagggcccaataatgcagcaatgaccttgcttttttacacattgcgcggctttgcctaccccctctttgcctatggtttccttgtttggattgccgcagccacacccagctcaatgcttggctctgccgccgggtggttctggttctccttctctgccggtctgccaacgcttgggtctcagtttgcacgctacgccatcccccaaattggtgagcttaataccttttggtgctctttggggttggtcattattggcgggttgattgcgttgctcttcacccatgaaccaacaggaacaaaacgcctccttccagagcatgtgtcagtaaagagcgccttctttgattctttcagcatcgtctggcgtgaaccaaagacgttgattgcaggtattgtccgcacgattgatacatcctctgaatatgcttttctggccatcatgccgtccttctttgtggaccatctcggcttttcacttgggcagtggctcaacctcttatcgctcatcttcttgagcaacattatcgtcaaccttctctcggggatgctggcagaccgtctcggggctcgctttgttgtagcggtctttggcggtattggtgggtttatctctatcccgcttttctattacgtgcctctttacttccctggaagtttcttggctgcggctcttgttggtgtgctctacggggcagcgattgcggccttcgtgccactttccggccttatgccgcaaatttgcccgaaggaaaaagccgccgctctttccattcttggccttggggctggcgcctccacctgggttggtccagcgctcgtctccgcctgtagcgcgatctttggtcagggaatggtctatgtgatctggacattcgccatcgtttacttgctctccgcctttatgacgatgtctctgactatttcacccgaggcacgccgttatacgcaggaaatggaagcgcaacagaaatcagaatcataacccgcttcctctctttttatagctaaagaacaccctcgcttttatcatagcgggggtgtccttgattctgagtagaaagttcctaccctaacgtggtgacgacacataaagggctatacgcatgagatatgtacgcatcaacgatcatctgattgtcgcggaccaacctgacctcaaaaccctcgcttcattaaaagaagaaggatttaaccaggttgttaatctccgccctgatggcgaaaacacatcgtacccttctcatgaacaagccgcccatactgtagcggaaatgggcttacgctatcactatatcccagtcaccattaataccctcacacgcgccgatatacgggcttttcaggcagtattacacgaaaagaacgggccagtttttgctcattgcgcttcgggtaagcgcgtcatgacgctctatgtgctgggccaaatactcgatggccacatgcacgcggatgatatcttaccctttggacgcaattatggcttcgacctaaccgaagccgtaaaatggctcgaaaaagagcaagaacgcaaactccatgtggaaggtttttttgataaaagcacctggagcgtgcagtatattctcattgacccgaagacgaaacattgcgccattattgaccccgtttgggattatgacgaaaaatctggaacaaccagcaccgagaatgccgataaattactccgctatatccacgacaacaaacttcaccttgagtggatccttgacacacatccccacgctgaccacttctcagcggctcattatctgcacgaaaaaacaggagcaccgacagcaattggcgtccatgtacgtgatgttcaaaagctgtggaaaaaactttataatctcccaaacctcaaaacagacggctctcaatggaaccatctcttcaaagaaggcgatcatttcaccataggttccctcaaagggcgtgttctcttctcacctggccatactttggcctctgtgagttacttggtcgatgatgctgtctttgttc

SEQ ID NO: 1501 - DNA, 23147 bp, synthetic construct
  source 1..23147: mol_type = other DNA
  misc_feature 1..23147: note = Synthetic
cccgtcatcatgccctgattggtcgtggatgagcaggcgtcataacccggatcgatgtcattgatcatcgtccagccgccctgaccgtcagagatataggcagaagatttctcttttgtggaagggctctgcgtggtcgcaatcagcttcagaccgttggtctggccggacacgacttccagcgcacccggtgtcgacggaccgtaggtgtcggtgaaagcgttatcgctcatggagaagcgctgagcatagcgccagtaagcggtgacggtgttgccgtcgtaataacccagaacctgacctttggtgccgaacgcgccaacgccgccggacgaaccggaaccggtgtagagcgggaacagatccatggcgccgttgttataggccatctgctcggccgtataagcatggttctgatcggccgtgctggcctgtgtgcgatccagacggaaaggaagggcagcccccgtgccgttggctgtgttggtattggggttctgctgcagcaggttgctggtctgcaggttgttcaccgcaggcgtaccgcgttgggcacggaagctcggctcaccggtcgggttggtcgccttggggtatgttgcgaaataatgatcgaaggagacgttctcctgatagatcacaacaagatgcttgatgggagttcttgtctgggacgtattcccgaaagagctggactgctgctgaccgccagaccagatgttccagtcacttgcgtggccggacacgggggaaaagacagacagagacagcagagttgagagtgcaagccgcgtgcgctttacaaacacgtcacggaacctttcttttcgcacggtatgaccggttatcgaagacatctggctcacctgaataccactccgattgaccggccccggctggggtggtggaaacagggcgttaagtaaatgaaagaattttcatgtagtgttatcattttgtgaaagacactcgtctgaaacaaattgcagtatttcaaagcagaattcaccacgtcaggtgcgaatcaggactgtccgtactcatgatatgaggtgttgctcccttaaccttttcaggaacaggagaagcagcatgttttgaaaacatgattgaaatcctctttgttttctcaccttgagcaagattgaccccggcaggatcaatggacgcaatcgtccagtcattcaccttttcattcccggtcagaacgacacttttaccctcacccttgtccggtttgaaaattgctttccacataccggcatgacccgaaatgccgacaagatggaattcaccattttcctcatgagcaacgcctttgcggcgtcgatctggctcaaaaagaggacgatccagaattttattgacgtcttcgctgatttctccggaatctgagggtgccgatgcaggggtgtcggtctcgacagcctgttgtgcaaaagctggccaacacatcaaccaggccagagcaacacctccagccatcctcaaagacagacctgatctgaccgccacaacagaacctttttcaaagagaaaagaaggagatgttaaactctgcaaactgacctgtgctgctcaggctaactggaattggtccgtcccaactgtttctgccccataacggcgtgccgaaagaaacaacaatgaataaatgatgaccgtttcgtggcgtcccaagaacgctgcccttcctgcctcaacgcgcctccgcaccactgagcaacgggcgaatcatcatcgttggccaacttcttccagcagtcaggaaatgcacctgaactctgaccagtagaggcaaatacggactgttccaggtcgattgccagacatgtcgccctccttgcagaccataataggaaaaatcgaccgcacttataccgcgagccagaatctcttcgtgtaatgcctctggctgctcaggacagtttgcccgtcggtagagctgccagcgaacaacaagttcatggtgcgcatccacgccgaatgccgcttcgacttccttttcatagccgtttttttccggaagccacgctatgacgcgtaaccggtcgccctgtccagagaacctgcccgctcctccattgtccggaatatcggcccgctcaatcagtcgccgcaacgcatcctcaatcccctgcccggccatctcctcatcatgacgatgctcggccatggaccatccatgagtgccgacaccaatgccctcccacaaggcgaccgacagcagaccgaaaaccaccgccacaacaaggatttcgagaagcgtaaagccgtcgtccttcattcctgcaccgatggacgcaccgccctgcttgtcagtgtgacagaacgtccggtcccatcctgatgaatctgcacggaaatggaaaacagcccgatcctgtccccaccatccttggtgggggcatccgcaatctggcgaatttcgacatttgaatgataatgcccttccagatcgtagctttgagagcccggccgcatggaaagagtggacagcacacccgcaagctgcgatctggccagcgaggtcgcataaatatcccgctgggcacgactaccactcgccagccccgcctccagcgagccgagcatcgctgccaaagcaaagccggaaatcatgagggcaatgatgacttccagcagcgtgaagcctttatcctcccgtttcgacaaagccatcagatcagccttcaacggcttcaatacgccccgtgacgggactgaccctgatcagacagagatgttttcccaacgtcacgacaagtgaaggaccggaaacaccgccatccgccgtaaagcggtaatcaccacgtggagaaaaacctccgccgggttttggcagcagaattcttgctggccccgaaatccgacgaacctgcgggacatgatcatgcacagtcacaatctgggaagtcggcgtattcacctccagtatgacggtctcgcctgtggtttccgagagcatctgcgcttcatacagactgtccagcacgcgtgaccgggcggtggcgaaggtgagcgcgtcgctcttcataggcccccgctccagcgccatgcccatcagcagacccgcgatcaccagcaccaccatgatttcaagcaatgtgaaaccggcctctgatgatcgagaggattcatcagtgtgcgaggtcattaaggctcagcatggcaaggagaagcgccgacacgatacccgccaccagaacacccatgatgatggtgatcgcaggaacaagaatggcgagaagacgctggatggtgacgcgactggcttcctcatgaatatcggccgaccgcaaagcgatgggtgccaactgtgccgtttcttctcccaccttgagaaagtgcgtcatcgtttcaggaaagattttggtgcgctcaagcgaaaaagcgaggctgcgtccttcccgcacatcccgtgtggcttctgaaagacaggtcgcgccagcagaattgctgataacaccttccgttatacgaagcgcaccaaccagcggcacgccgttgcgcatcaatgtgccgagtgtccgggtaaactgcgccgccatgatttcactcagcagcgtcccgatcaccggaacgcgtaacagaaacctgtctgtcgccagtctgacagcgggtttccgcagggcaatcctcacacacgccaccagcaccagtcccgccacaagcagcagcataccccacgctgtcagaaaatctcctgcggcaataacaatctttgtcgccagaggcagggacgcgccattttcctcaaacagcggcacgaactgtggcaaaacatgagtcagcagcagagcaatggaaaaaactgatgcaacaataagcacaaccggatagatcatcgctgactgcacggtcgctttcagcttgcgctcgcgctcaagcagatccgagagccgcagcaaagcatcacctaacgcaccgcccgcctcacctgccctcaccagaccgacatagagtttcgagaaaatcgcgggcatcgtttccagcgcatcggcaaacgactcaccgtcacgcacacgatcacgcaaggccccgatgacccgtccattgcgtggtccaaccgccgtttcgcccagaaaacgcagggcccggtcgagatccagtccggctgtcagcatcgtcgccagcttacgggtaaaatccgcgacttcacccgatttgagacgcagatccttcttgcggccgaggagtgaaagaatctcgcccgcaagcgccccaccacgtgtcgccggggctatcttcatgaccatcagattctgacgacgcagacgactggtgacctgcgtctccgaactggccgtcatctcgccatgaacgacgtggccttccgcattgaccgcctgataacgccagacttccggacctgtatcagccagtgtggacgtcattcgtcatgcccgacgatacgactgatttcttcaagcgacgtctcacccttaagagcagcctgcaaaccagcatggaacatggtcttcatgccctccgccacggcggcgcgctcgatttccgaatgatccgcgccagagagaatcagacgcgtcacctcacgcgaaggctggaggaactcagcaacagcgcttcgtcccttgtagcccgtctggcggcaatgcgcgcagccgaccggatgccacaaggtatggcgcgtctgcggatccagccccaatcgcgccgccagttctggagagacctcttccggacgacgacactcctgacaaagtcgccgcacaagacgctgggccagaattccgcgcagaacggcggtcagaagatagtcctccagccccatgtctcgtaggcgggtcacggcggcggcggcggagttggtatgcagcgtcgaaagcacaagatggccagtcagggccgcctgcacggcaatctgtgcggtctcgatatcgcggatttcacccaccatgatgacatccgggtcctgtcgcaaaatggcgcgcaggaagctcgcgaaggtcagcccgatggagggccggatctgaagctggttaatgcccgcgagctggtattcaatcgggtcttccaccgtcatcacattgcgttcggaggaattgagaccagcgagacccgtataaagcgtcgtggtctttcccgaaccggtcggccctgtcaccagaacgatgccgtttggtgtttccagcgcctcgcgaaaagacgagataatttctggcgcaagaccgagacgattgtaatcgaaactgacggtcgtgcgatcgagcacacgcagcaccgcgatttcaccatgcagcgacggcaccgtcgagacacggaaatccacttcgtgtccgcgaaccgccagcttgatacgaccatcctgcggcaggcgacgttccgcaatatcgagccgcgccatgatcttgatacgggaaatgagtgccgccgtcagacgcggactctggctgtccacctcatgtagcacgccgtcatagcggtaacgaaccagcagacggtcctcgaacggctcgatatgtatatcggatgctctggtttccacagcgcggaagatgatctggttcaccagacgaatgatcggcgcttcactggcgagatctttcagtcggtcagtatcgtcctcggcagcctctccctcatcagccagaggttcgccgtcgccctccccgtcctcttcgccctccggatagagacgattgagagtcgcctcgatatctgccgaccgcgccacctcccgtacaaccttacatcctgtcgccagagaagcggctccggcggtgaaggcatccagcgggtccgccatgaccagatgcagcgttctgccctcacaggagagcggcacagcccgggcctgtcgcaaaaaccgtccgccaagctggtccggcatcacgggttcagcgatggcgcccatacgtgccgtgtccagtacctccgtgccaagcatggcggcgtaagtgcgggatagatcggtttcgctgacaagaccaagctggagcagcacctgcgccagcgactgtccggtttcctcggacaccatgcgtgagcgttcaagggcgcgggcatcgcagacaccccggtcgagaagggctgcttccagatccattgcttcagccagcatgatgacgtcccgatttgtcgaacaggaggacattcagcatcggcttgcccaactggaggcaattcgccactgtcgcgccgccatgatgtccctcgctccggttgtcccctttgttatcgcgccttttatcggcagctttctgggcgtgcttgtgcggcgcatcccacgcggcgaatctttcgcaataggacgttcgcactgcgaggactgccagacggtcctgaagccgcatgagatgatcccggtcctgtcctatctgttgcagaaagggaaatgccggacctgcggcagctggattgatccgcatcatctcaggatcgaactcacggcgcttgccgttcccgcctgcgcaatcgtcacgcgcctgctgagtgctcatgaacagggatttccggtggcggaggcagatttctcattaccgcttctgctggccgactgttttctcggctggatgttgctggcgctcgcgtggattgatcccatctgcatgagactgcccgatgtcctgaccttaccgctgttgctcgccggtctggcggaaggatttgtgaatggtggcactgaggcgctgctggaccgcacgctgggcgctgcctgcggctgggccctgttcgcgctggtggcgtacggataccgggctctccgcgggcgttcaggactgggcggtggagatgtgaaacttcttgcggccggtggtgcgtgggttggtctcgccgccctgccgatcgtggtggtgctggcgtccgcgttcggcatcgtgattgcgcttgcaaccatccttcgcgcacaacgcttcagcatgacggtcatgattcccttcggcccctgtctggcagccgccatatggctggcgcggctgatgttgacagcgcaataaacgacgcaccccgcaaacaggctgcgtcaggaaatctgattacatgaggcaggagtatgaaaaccagaccatccgttaacgtgtcataaatctataacactccgcccctgtcctcctttccgaagacaatggtatggcatcacgcattctccgtcggccgcccgaacaggatccttgcgccaggtgctttcaccccacaccatagcttctccgagccgttcatgacgggacagacttcgtcctcgcgactgctgcacgagtgcgtcgggtggtggcgcgatcgtatgacggaaatccttccagcagcgctttcgctcaagccccgaaagactatccggctggaaatcagtccggacggaacgcttgatccgaccgatgtagccgcctgccgtgaagaacttcccgctccccgctcacgctggctgccacaaccgcgcaccccggacattgcgctcgtcctgccacagggcggcatcctctcgcgtgacgtgtctcttccgcgtgccgccgccggcaatgccgcccgcaccatcggttacgatctcgatcgactgactccattccggcaggacgatgttctgtggagtgtccagcgcaaaccgggcgcagagcggggcgagcagattattttcagactgctggttgtcccccgtttccttgtctcctccgcgttggacacgctcagtcacgcaggcatcagcccaacctgtgtcagcatggacacgaccgcagacgcttcactcaccatccctctagggaaaacagcccggaaaagtcacccgatcgggcgtgtcttggccatctgcgccgcaatattcatcgcagcaccgtttatctcccagcagatcacgctgtttcgtctgcaccacgccattgccgcgctgagtgacggacgcacgcaggccgaggatatccgtcgacgcattacagccttcacagctgcgccagccgctctggcgcgtgaggagcatcgcatcggctctcccctgcatatcatcggcacactgacagacgccttgccggacggaaccttcctgaccgccatgcatatccacgaacgccatgtgaccatggagggagagtccacgcaggccacaaagctgatcggcgttctcgagcatgacgcagcgttctcggacgcagccttctccggaccagtcacacgctctgagaacaagcaaatggacgtcttcaccatcaacgccaaagcgccgggttgaggtgccagtgtccgtaaatctctctcacctgcctgcccatttaccggaaggccgatccggacggattctggcgctcgccattacattcctgcttgtgctgatcgcatggtttcttgtctcaggactgctcggcttccatgctcgggaagaagcgagcattgccgaccagaaggaaatcctcctccatacgcaggcgctggtggacaatattcctgccttgaaagagcgctacgaacaggctgcacacaatgccaacggcgactctccgctgctggccgaaagttcccgtgaaacggcgctcgcccgccttcaggaaattgtgcatgacgccgcgcgaggcgtgcaggtggaaccaaccagcatggagcccttgcccatcgtccatagcgggcctttcgagcatctcggtgtgcgtatttctctcaccaccaactggaatgctctgatcaaacttctcgacacgctgtcagccagcacgacgcctcatctgctggtcgatgatgttcaggttcaggcggctggcacatcgtctgccaacgaagccacgcaggggcggacaatcgacgcctctctgaccattctcgccctgcgtgattcccggtctgatgcaaagaacactaccggtcgttccagtacaacagacactacgagccagccatgaacgccgacgacaacgggttttcgctttcatgatgctggtccgttttaccgcatcagtctccattgcatggaacgactgacgtgaaaacgaaacgctccgctcccccttcttccaaccgcagtagcgaagatggcttcgctcttctgatggtgctgtggacactgggcttcctgtcgctgatcggcgcacaggcgcttgtgcttggaaaatctgatctccgtctggaaacttcaacgctccagaaagcacagatggaaaccatcgcagatgcggcgatcacgacggagctgttttcgatcagcacaggacagtcacctccccgtccggcgtggcgctcgggcccggatgatagcgacattacagtcagcgtcagcagccacgctgacaacgatcacatcaaccccaatgtcgcggggcagacgctgatgtcatcactgctgacgacttctggcgtctccagcgaccaagccaattttctagccgccagcatcatggcatggcgcatgcccagctataaaggtgaagctggcacgcccggtcaggctgtctgcacatcttccggacagccttttcatacctttgaggatcttctggccgtgccgggaatgacgcctgtcattcttgcccgcatcaaaccgcatctttccttcgcacagctacatcttcctgatcagacaagtcatgatcccgtcgtcagacaggcgatgctccactctggcgtttccatgggagcggatcaaaaaccggaagagagcggtcttgaagaagaaatgctggttgtcgtggatgctgtcgcttcgaggaaactggcccgtatgaaccgtcatgcggaagtgatcctgatgccggaagcacggcccgttccatggaaagtcgtgcgttgggaaactgtaacgcagtaaatacaaccaattactatcaagcagtttctatactctattgattacgttttatcgaatacttaaatattaccaataacgaaaatacttcaaataattggtgtcatttatgaaaagggaatccctcccgccggtttcccgacgagaggtaatccttcacatggtgaaaccatgttaccgtggtttcccaaccgatttgccgattcaattactataaaacataatacagactgtcaactgcatgggaatgggataagcatggcaaacatcgcagaaaacctcgtgtttggcatagacttgggtattggatcatgcggctgggcagtcctgaaccagaaagctaaagatgaaaatatagtagcgcttggaagttggtgcttcgatgtcccggagacagacaaagagcggattcccaccaaccagatcagacgagcaaaccggcttcttcgccgggtcatccgccgccgtcgcaatcgtatggctgaaatccgtcgcctctttgcgtccaaaggaatgctcgataccgcagatccggatgcgttggccaagatatccgccgatccgtgggaaatgcgcgccaaagggctcgattatcagctcaccccccaggaatttgcagttgcacttggtcatatcgctaaaagacgcggattcaaatctgccgccaagcgtgtttcaacaaatgctccatcagaagacagcaagatgcttgctgctcttgaaaagacaaaagaacaatcagcacaatatcggactattggggaaatgtttgcccgtgatccagcttacgcagacagacgtcgaaatcgggatggatgtttcgatcgcaccatgagccgtgaggacttattcaaagaaacacagatactctttgagagtcagcgtcggctcggaaatttttcagcaacatcagaaacggaacaggcctttatcgatatcgcttttcgtcagaaaccaatgcaggacagtgaaaggctcgttgaaacctgtcttttcgaaccggatgaaaaacgcgcctcccgctttgctccatctttcgagcgcttccgactcctctgccgcctcgttaacctccgggttacagacggccttgaagatcgtccgctcaccccggaagaactacggcttgcttgcgaagatgccggaaaaacccgcaaacttagcgtcaaaaaagtccgtagtctcattggattgcgagatgaccagcgcttcacaacaatccctcctgatcaggagcaacatgatatcgcagcccgtaccggggacgcgttaactggaactgccacattccgtgcgatactcggggaatctttctggcgtcaacttctgcctcatcctgaacaactcgacagagcggcctggatcatcagctttcacgaacttactgacacgatcatctccaaacttgccactatcggcctgccatcagaagttatggaactcatccgtaaagcccttgaggacggtaaattttctaaattcaagggtgctgcttctctttccgataaggctgcacgcaagctgatcccatttttgcaggagggccttacttatgacaaagcctgccaaaaagccgggtataatcatgcggcatcaaaattcattcactatgacagcattgatacaaaagctaaattcaattctttgatggatgatgttcgtgacagtattaccaatcctgttgcccgcaaagccatcagtgaaggtatgaaacaggtttgggctatgcgaaatcaatggggacttcccggcgctatctgcatagaacttgctcgtgatgtcggtaacagtgctgaaaaacgccgtgaaatagaaagcggtatcaaaaaaaatacagcacaacgggaacgtgagcgccaagaagccaaagaacatctcaatcagtccgatatctcgtctgaaacgcttcttcgttatcgtttatggaaagaacagggagggcgctgctgttatacagatcagcctataacaccatcccagcttatcgcatcagacaacagcgttcaggtcgaccatattcttccatggtcccgctttggagacgatagctatctcaataaagctctctgcacggcaaaagccaatcaggaaaagaaaaatcgaactccctgggaatggattcataatcagaagggagtggaagcatggaaccatttcacggccgcagttgaaagccgcaaggagacacgcggactaaaaaaacgaaattttcttttaaaaagcagcaaggaaactgaagagcgttttcgcagccgtaatcttaatgacacacgttatgcagcccgcgtcatggccgaagccgtccgtcttctttatccctctggaaatcgggcggaaaaaggaggtgtcaagcgtgtatttacccgtcccggcgcactaaccgccgccctgcgacatgcctggggtgttgaatctctcaaaaaaatcaatggcaaacgcttgaatgatgatcgtcatcatgcgcttgatgcagcagtcgtcgcagcggtcagtgagaaagaaatccagaaactcacaaagtcatttcagatatgtgagcagaaagggcttgcccgccccatgcgagatgttcccatgccttgggaaggcttccgtcatcagcttgaaacagcatacgcagacattcgtgtagcacgtccagaacgccgtcgcgcaaggggaaaagggcatgatgcaactattcgtcagcttcgagaagaaaaagatggccctgttgtttatgaacgtcgagccatatctgatctgaaattaactgacctcgaaaggatcaaggatccggaacgcaatagcgctatcatctccagcctgcgcacatggatcgaaaaaggaaaaccggctgactatccaccacagtccccaaaaggagacgaaattcgcaagatacgtgtcatgtcacgtaataagccagcagtatctgtgcgtggaggcactgccgaccgtggtgagatgacccgggtggatgtatttacgaaaatggggaaaaaagggaaaccggaatggtttctcgtgccgatctatcgccatcaggtcatagatcgcattcaatggccgcagccccccaaccaagccgctgctaatggcaaatccgagaaaaactggccgacaatggggctggaacacgaattccgcttcagtctgtacccacgtagctatgtgcagatcgtaaaacgggatggcgaaatcattgaaggatatttcgctggccttgaccgtactgttgcagctttttcactgctcagttcatctgacccaacatcaattcaacgaggaatcggcgcaaaaactctggaatcaattaggaaatacaacgtaaatcgtttcggagacatatcaatggtcgagcaggagacacgaacatggcatggcgatgtgtgcatatctcccgaccagccagactctgcctgaaagacagtcaacttgtcgtcacacaggatgagaacaccattactcttcctctggaagatctggcctgcgtcgtgctggacacgccgcaggtcaatctttccggcgcacttctctccgcgcttgcgatgtccggtatcgctctgattataccagatgataaacaccatcctgccggtgtcgttcttccttttcatcaacatcatttacaggccgaagtcataggaattcagatagcggcctctaaacctcttcgcaaacgtctctggcaaactctggttgttgctaaaatcagcaaccaggcagctctgcttgaagaagccggacatcaggatgccagcacgctcagaaacatgatccgccgtgtcacctcaggtgacccggacaacattgaagctcaggctgcccgactttactggtctcgtcttttcccccgttttacccgttccaattgtgcagacagacgaaatggtctgctgaactatggatacgcaattttgcgggcagcaatcgcacgcgcctgtgtcgcttcaggtctcgtcccgtcactcggtctgcatcatgcttcgcgcaccaatgctttcaatctcgccgatgatctcatcgaaccttttcgtccctgtgtggatcgcatggttcgccgcactatcccagaacacgacccactctcatctgtcagtgtggaagagcgacgctttatgacgggcatactttctgaaacggttcttatcgggaaagaacggatgaccattctggccgccacagaaagtgtggcgaccgacaccgtgaagtccctgacacacagcagcgcagccctgttacgaccacctgccctctctgaaaccacgaacataatatcgatatcggaataacatcaaacacgaggacagcatgaaagcagaggaggccagattcttgtggctgatgattttttttgatctgccggtgaaaacaaaaccccagcgacggcaggctacccgctttcgtaattttctccgcgatgatggttttatgatgctgcaatactcggtctatgcccgtgtaggacgtggacaggatagtatcgataaacatcttcgtcgcgttcgcgccgctttacccaaagaggggagcattcgagcgcttcaggtcaccgacaaacaatatggacgaatggagatcatgctcggactcgcacaaaaaacagaacagaccggcacaaaacagttggtgctgctatgatttcagaccacaagactgacaaaaaatcatgcagcaccaactggttaccaagaaggcagcctaccactggcaaatcggtagggaaaccacggccaacaggccacctggctgtcgcacaaggttagcctaccactggcaaatcggtagggaaaccacggcgtgagttctttgctgatacatctgatgggaagcctaccactggcaaatcggtagggaaaccacggcagggttcgcagtccctgtctccccccttccagcctaccactggcaaatcggtagggaaaccacggcttctcgtccggaggggagcagaggcatactagcctaccactggcaaatcggtagggaaaccacggctctattgatcgctccgccaacctgtcttttagcctaccactggcaaatcggtagggaaaccacggcgcctggtgatgactacaggtgcaacggcggagcctaccactggcaaatcggtagggaaaccacggcctatgtcggccgccacgccgaaccgctccaagcctaccactggcaaatcggtagggaaaccacggcggatcggttcagccatgagaccgctccctcagcctaccactggcaaatcggtagggaaaccacggccgggctggccgcgttcgaccagctcggccgagcctaccactggcaaatcggtagggaaaccacggcgctgggcaggtcggcacgcgaccttctgaaagcctaccactggcaaatcggtagggaaaccacggcttctcccttaacaattagacaaaaaaacactcttgctttttcaatctattttatacttcattttacacaaaaatgtaaccaaccctacgaaacaaggtgcatgtccatgatcatgtccctagaatgcagcaatgaacatgctcgccccttcacgaccaaggatgagcgtcgaaatcgttttcgatttcgtctgtccgtggtgctgcatgggcattcgccggttgatcagtgtcttcaaacagcgtcttgatatcgaaacacactacacatggcgtccttttctgctcaatccggcctcacagaacgaaggaatggcgtttaacgcctaccttgaatcccggcatggcagcagggaacgagcggatcgattgctgcaactggtcgaagtgcaagcgcaggaatttgagtgtgccatctacttcgatcgcattcagcatgttccgaatacaatgaatgcgcatcgccttatcgaatgggcctctgcccgtggcgactgcactgcactcgttctcgccattttcgaagcctttttccagaatggcgacgatatcggcaatccgggtgtgctggcggacatcgcagcgcaggaggggttcgatcatgatctggcgctgcattttctctgcggtcggacccttgccggcacagtgactgccggacagattcaggcgcagaaagcgggtatcaacggtgtgccatcttttattatcgaaggactcgccctgacaggcgtccatgacgcccctgccctgaacagacttatggatgcggcagtgtgggtcagcggccgccacgaggatctccgtttcggcaccccccatatgtcgtcgttctctcagcgggcctgaagaccggcatcttcttcgctctgtgcctcgcgggcaaaacgctgggccagaatggcgcagacgaaaagctggatctgatggtacagcatcagcggcagcaccacgagaccaacgcttgaggccggaaacagcacgttggccatcggcacgcctgacgccagtgtcttcttggaaccacagaacacgatggcgacctcatcagcgcgggaatagccaagcagacggcttccgaccatcgtgaagacgagcacaaaagccagcagagcgctgtctacaagtgccacgataccgagctgtgacaacggcagagtatgccagagtccctgcacaatggcctcactgaacgccgaatagaccactacgagaattgaaccgcgatccgagaaggacagcagcttcttgtgccgacgcgcccagtcgccgatccacggctgaagcagttgtccaagtatgaacggcagcagcaactgaaacacgatgtccagcgcgccgcctgattttgagccttccttggcgaggatcaacccgaccagcagcggcgtgatgaagataccgagaatattggaagccgttgctgaacagaccgcagcgggaacattgcccctaccgatggatgtgaaggcgatcgaggactgcacggtcgaaggcaggcagcagagaaacagcacgccggtccacacatcaggatgcagcagacccggcgcgatggcatgaagcgtgagaccaagcaccggaaacagcacgaacgtgcacgccagaatcgtgagatgcagtttccaggccgtcagcccgctgaggactgcggtcctggaaagccttgcgccctgcaggaagaacatcagtgcaatcagcgcgatcgccagatccttgaagaagggaacggcggctccctgggcaggagcgacggtcgcaatgccgagcgtcgccagcaggctgacaagaaatgggtccagcttgaacggcatcggatggtcttccaatgtgaaaagagagaaagattcagctgttgcagcctatgcacagattgcgcatagggatcacttgcgccagttttacgatcacatgaagcacttatccactcactcactcctccgccgtcgcgctgcctggcagatgacggcttccgcactcggatttggcgccctgctttggaccgcatccccagtgcttgccgccagcgttccagccggatgcgccacgatccatcatgaaaatgcggacaacggcgacgatcacgccgtcttcagtcacattacagtgacgttcccgggtgatagcggcacactgaccgccgcaggtcagactctgacaggcacgaccggctccgcaggcgatgtggcggatgcttcttccgtgctgttactggctgcgctgacaggtcatcacaatgccgcctgctcacaatggctggagaccgaaggccaggtggcccagtccagccttgccgcaggtcatacgctgaaactcgcctggacatccgttgccgtgaaacgtggcaccctgcacgtatccatggctggcgcagggttagccatcaatggcgcagggagcgatgccaaggccgacctgactttcagtggtgtcgccaccagcggcacaacagcaacatcgctgctcccctcatccgcacaggcgtccttctccctgcctgtcaatgaactggccagtctgatggcggccacagcaggcaaagcctcccagcttccagcggtgcatgtcaccattcagtccctgtcagccaaacgtgacacggtcgaactgtccggcaacgggcgcgccaccctgaccggtgaacacgagagcgcctctgcaagcggtcatctggaaatcagggacatcggtacacttatccagaaggcgcagcaggattcccagacaaagattgccgctgctctggtgctggcgcggattgtcagccacaagaatggtgacagcaatacatgggacacaaactgggaaggtggaatcctgaccgtaaacagtgttcctcttcctctcagatagagttaagagctttgcgcacccggtaaattgcgtgggggcgcatcctccgccatgcttgcgccatatattccgacgactctgatcgccatcgtcctcgtgacaggagatatcctatgcgggctcgccgcctgacccggctttttctttcctccactgtgatgctgggggcccttggtctttccaccgtcggtcatgccgccgacagcaccaccgagcagacgctggtcgacaaggccacccttgcagtccaggatattttcacaggcgcaaaaaccacagatcgcgtttaccgctatctgggacaggcacgggccgtgatggtctgtccttccgtcttccgcatgtcggtcggcattggcggttccgggggcggatgcctgctcctttcccgagatgcccgaggttcatggtctgaccccgctttctacaggtttgggtcagggtctatcggcttccagtttggtgttcagtcctcagagatgatgttctttgtgatgagcgaccgggggctgcaggcgctgctcgacagtcagttccagttcggcgccaatgcggcagcctcctttgcctcaatgggcagcggcatcgagagcggaaccgctggacgctccaacaccgacatcatggcgcttcagaagtcggaaggtctgtttgcaggtgtagccctcagtggcgccaagctgacggtcgatagtgatgcgaaccgcgcctactataaccagattgtcggtccgaccgagatcgtgatctccatgcgggtcaacaacgccggggctgatccactgcgggcgatcctcacccgctacagtgcatcggcgactgcggccaccacggccaatccggttgtcggcagcggctcttccggagacaccacctccaccggcgatgctcagctcacaccgtataacagcgcccctgtggtcaatagtggcagcggtatccagagccagtctctcgctccgatcaaatcccagtcaaagggttattaaaacgggaaggagtggttcacggcgttgagccaacgaaccacttttcgcgttctgaagtcgtgtttacttgccgtatcacggcgaataaaccggctccgcagtttccctaccctgtgccctgttacgaaacgccgatacattgcggttatgctcgtcaagcgatgacgcaaaatgactgccgcctgaacctgtcgccacaaaatacagctcatcacccgatgccgggtgcgccacggcctgcaatgccgcaagccccggcgaacagatcggccccggtggcaagccaacagtcacataagtattgtaagggctctgaaaagccagatccgaacggaccagaggccgccccaaaggtcctgcgccgccattcagggcataaacagtcgtcggatcagactgaagcttcatgcccttactgagacgattgagaaacacccgtgcaatgcggggccgttcttccggcagccccgtctctttctccaccatggaagcaagtgtcaccatctgtgtcggatcagtgagaccgatggacggatcgcggcctttccagactgcttcgacctgccgctgcatggcctgcttcattctggtgacaagcgcagtacgatctgaatcgcgcagatagctgtaggtctccggaagagcctcgccttcgcctaaagccgcgaccgtccccttcatgaacggagccgcctgaacgagcaccataatctggctggcagtcagaccttccgggacggtcaactgatgcagcaccggctttccatgacgcaacacggacaagatgtcccgcattgacgcatgagccggaaacatcagttccgccgcatgcaactgaccctcatcccgggtcagtgcgatggcggcacgaaaaacatagccatcaagtccgtttgcagacagcgcgtgtccctgctgtagagccgcgatggtgctggcatacccaccgtgaggaatgtccagtgcagccgccacaggcagtggaccgggcgcggtatagcgccaccacccggctccaccaatcgctccacccgtcagcaccacagctgccagcaacccggcccctatccgtagcaagggacgacgcttcctcacaggagcagcccgttttttcttttgagctgccacggttcaggcctgaacagcgctcactgaccaggacgccgaccattcctgaccgggctgaacgatcacaataccgggcttgtcgcggaactctcccttgaagccatgcggtgtcgcgtatccttgccaaggctcaatgcagaggaacggtgcacccggcttggtccagacacccagttcgggaaaaccatgccatgacacacgcagacctagtccgcccggacgaccgaaggtcacggcacgacttctgatccgatcaaagataatggcgtcctcaacaaacagatcatcccgaagaggaagaaccgcaccttcaacaggcgtaggacgtggtgcgggatcaagcagaccgccttcaagacgacggatcggttcaggttcgggttcttcaaacgtcagacggtagtcttcacgcttttcgcctttttccagaggccagcggaaagcaggatgcgctcccagtgaaaagggaagctccctgccctcttcctgattgcgaacggtgtaaagaaccatcagctttccatcgctgatctgataggccagccacagacgaaagcggaacggaaagacagcgagcgtctgatcatccgcttccagcgacagcgtgcaactgtcggctttctgttccacccaccgaaaggcgcaatcccgggcaaagccatgttgcgtcatgcgatagggtttgccgtcgatggtcgcccgatcatcaggaagacgtcccacaatcgggaacagcactggcgagtgccgcttccatgcggggccagcatcccacagcacatccgtgccatccggcagcgtcagggaaaccagttccgccccctgagcggacaccgtcgctgtgagtttttcatcaccgaacacaaaccggtcagtgctcatctggccatctccgaaaatctttccctttttatagaaagatttccggagcttcgcaaagaaggacaacagcctcagtcgtcagccagacgatcccgtggaggctgcgccgaacgcccggtgatctgcgtcgccgccgaccctctgcccgacagggacggatgggtcatgaaccattcatgcgcagaaaacggcttgctgcccggatcaagacgacgccagacaccggtcttttccagaatccaggaattcagattgtccttgagatccgtcaccatgatctgatcaaggatctgcgcgtggacagtcggattggtgatcggcaccagactttccacacgccagtccatgttccgcgtcatccagtctgccgaggagatgaagaccttggcggagcgcgacggcaggcggtgaccgttcccgaacgcatagatacgcgcatgctcgagaaagcgaccgacaatcgacttgatgcggatattctccgacagaccaggcacacccggccgcagacagcacatgccccgcacgacgcccatgatctttaccccggcacaggaggcttcatacagcttgtcgatcagcttcggatcaaccagtgcgttcatcttaagccagatctggcccggacgcccctgacggacatgctcgatctcttcctcgatcaggtggttcaacgtcttgcggcatgtgagcggcgagaaggcaatcgcttccatcttcgccggtctggcgtagccggtgacatagttgaacagacgcgccgaatcacgcaccagttccggattacaggtgaagaatgagagatccgtgtaaatcttggccgtgatcggatgataattgcccgttccgaaatgagcgtaggagcggacggttccgccttccctgcgcacgacaagacttagcttggcatgggtcttgaggtccgagaaaccgaacaccacctgcacgcctgccgcctcaagcgcgcgggaaagacggatgttcgcctcctcgtcaaaccgggcccgcagttccaccatcgccgtcacggacttgcccgcctcggccgcctcgatcaacgccttgacgatcggactgtcgcgcgacgtgcgatacagcgtctgcttgatggcgatcacattcgggtcgagcgccgcctgacgcagaaactgcaccaccacgtcgaaactctcgaacggatgatggacaatcagatccttggcgcggatggcggcaaaacagtcgccgccataatccacgatccgctcaggaaaacgcggcgtgtagggagggaacagcagatcaggccgatcatcaacgatcatctgcttcagatcgaccacgccgatcatgcctgaatggacggacacttcctcaggcggcagatcgagttcatcgacaatcgcatccaccagaccgcgcggcacgctttcttccatgtccacatggatcaccacgccacgacgacgttgtttcagcgccgtctcataggcgcggacaaggtcttccgcctcatcctcgaactcgacatcggtgtcacggatcacgcgcacggtgccgctctccacgatcgccagtcccggatagagccggtcgatgcacagcttgatcaggtcttccagcagcacgaaccgcacggatggcggcttgcccggcagggagggcagccggatgaaacgatccacctgcgcgggcagcaggatcaggccgttcatgacgaacgcgccagtttcctcggacaggaggctcagaccgagcgcaagtcccatgttcgggatgaacggtagcggatgcgccggatcgacagccagcggcgtcagaaccggaaagacgcggtccatgaaaaagtcggacagccagatgcgatcgtcggcgtcgagctgctccagaccacaaagcgtcacgtccgcctcagccagaagaccacgcagatgcacccagatacgctgctgctcgcggaaaagctgcacgcagcgttcccgcaccgccgccagttggagcgacggcgtcagcccatcaggagagagtgaaaccagcccttcccgcacctgccccaccagaccggcgacacgcacggagtagaattcgtcgagattgctggcgctgatggacaggaagcgcagacgttccagcagggggttacgcgggttatcagcttcctcaactacacgctgattgaaggcaagccaggatagttcc

SEQ ID NO: 1502 - DNA, 23141 bp, synthetic construct
  source 1..23141: mol_type = other DNA
  misc_feature 1..23141: note = Synthetic
agggcataggcctcttccagccgcccctcggccgtcatcttcagccagtcgggaatattgttgcccagcgggcaatggatcgagcagaatggaacaccgcattgcgagcaccggctggcctgctgttcggccttgccgacggcgaatgcgcgatagatctcgtcgaaatccgcgttgcgttcggcagccgggcgcttgtccggctggctctgcgccacggagacgaatttcagcatgcgctcggccatcggcttccccctgcgacatcgcgcgctcctgccgaagcgggcgcacgtttccggcggaagacctacgatagacatcaccgtcaaaaaagacagggtgactgtcctttttgacaaaaaacacggcgataccccaaatcgacccgatgaccagatcgcaaaattggtccgtatcggaccaatcagccagataatgcgttgactttgatcgtttatgtaattttgtatcggctgagataggacggcgcgatcatttccatcggcacggcatcgatccccaacaggcgcaggccgggggtgccttccgacgccacattgtccaccgacagcatcgtcaactggtcgcgggtcagcatccggcccggcagatgctccagccacatcgcctgccaccaggccagcgcgccaggcatggggaagatcagccggctgcggccgagcgtggccacgatccagcgcatgacaccctccatcgtccagatcgcggggccgccgaattcatagatctcgccgctgtgcccctcgccggccaggatgcggcggatgccctcggccacgtcggcggcatagaccggctggatgcgcgtcgcagcaccatagaccggcatgaccgggctgtatcgcgccagtgcggcgaacaggttggtgaaccggtcctccggcccgaacaggatcgacggacgcacgatcgtcgcctcgggcatgttgcgcagcaccgcctcctcgccggccgccttgctgcggccgtaggccgagcggctgtccggcgacgcgccgatggccgagacgtgcagcagccgcccgacccccgccgacgccgccagccgggccacgcgcgccgcgccatcgacatgcacggcctggaacgtcgcccggccgcgttcggccaggatgcccaccaggttcacgaccacctgcgcgctctcgaccaccggcaccagcgagtcctcgtccaggatcgacgccccgagcggcacgatctgcccgacatcgcccagcggacgcagcgccgccgccaggtcggcacgccgcgcggccacccggacgacatatccgtcctcggccaggcgccggaccacgtagcggccgagaaaacccgaacccccgatgaccgccgccactttacgagtcgccatgtccgtcccccttttgcgcccgccccacgccgcatccgcgtgccaggccgttgtttaaagcgacgatatcatacgggccgccgcccgccacgccgtcgccgcatcccagccctcaccccccggcccggcctgtcgccagccccggaggcgacgacgcaacaaaaacgacgcaaatcgtcgaagccatgttgaccgccccccagcggcggagtaaacgccctccaccaccccggaaacgggggcctctctgagcccagatggcggaattggtagacgcgcaggtttcaggtacctgtggccgcaaggtcgtggaagttcgagtcttcttctgggcaccatctttctgaaaatgatgatcggccgacaggcgccccgcttcagcggtgcgccttttttccgttcggcccgtgacttagcggaattttattgcgtatgcggaatattgcgcagcacccgttgaccgcccccgcgttccagcgtaaacgcccttcaccaccccggaaacgggggcctctgagcccagatggcggaattggtagacgcgcaggtttcaggtacctgtggccgcaaggtcgtggaagttcgagtcttcttctgggcaccatccaacatacagcagcgtgtatctcgcggccctggcctgcccggccgggcaggccgcgtgggcgtcccccctcgcgtattgccggcaccgctattatatgtccgacactgtattcgccccggggccgcgcgtgacgcggtcgtcatggggccatgtgtttctggatcgaaggtcatgggctgctccaccatcctgcatcgcaacgccggcatcggggaaacccaggcatgaccgcacccgcgactccctccatcctgctgcatcgcggcgacctggcggacgacgtggtcttccacggttcgatcgcggtggacaccgaggcgatgggcctgaacccgcatcgcgaccggctgtgcctggtgcagatctcggccggggacggcagcgcgcacctggtgcagatcctgcccggcacgcccagccccaacctggcgcggctgatggccgacccgtcgatcaccaagctgatgcatttcgcgcgattcgacgtcgcgatcctgcagcattcgctgggggtgacggtcgcccccgtcatctgcaccaagatcgcgtccaagctggtccggaccttcaccgagcgtcacgggctggcgcagctctgccgggaactgctgggtgtcgatctgagcaagcagcagcagacctcggactggggcgcgcccgaactgacgcccgaacagaaggcctatgcggcgtcggacgtgctgcacctgcatgccctatggacgaagctggaggcactgctgcatcgcgagggacgacgcgacctggcgcaggcctgctacgatttcctgcccacgcgggcccggctggaccttctgggatacgaagatccggatatcttcgcccaccgggcatgacgcggcacgccgcccctccgcgccgggtccggtttgaccgcgacccccatcatggcgatacacgggcggcatgacccaacccgccttccatgacgatgccggcgcacccgcggacgaggcccggatccagtccgacatcaccgccgcgtgccgcgttctggcgcgcgagagcgacggactggcccggctggcggccgccctgcgcgccccggcggtatccgacgagccggaaggcatcacgccgctgggcacggccttcgcacgggcggtcgatgcgttttcgacgctggcgggccgggtcatcgtgacgggtatcggcaagtccggccatgtcgggcgcaagatccagtccaccctggcatcgaccggaacgccctcggtcttcgtgcatccgtccgaagcgtcgcacggcgacctgggcatgatccagcggggcgatgcggtgctggccctgtccaattccggcgaaacggcggaactggccgacatcgtggcgcacgcccgccgctacggcctgctgctggccgccattaccgccgcacccgattcgaccctggcccgggccgccgacatcgccctgatcgtgccgaaggcgccggaggcctgcccgatgggcctggcccccaccacgtcgacgaccatgcagatggcgctgggcgacgcgctggccgttgtgctgctggagcggcgaaatttctccgccaccgatttcggcgtcttccatcccggcggccggctgggcacgcggctgcgccgcgtcagcgacctgatgcatcggggcgccgccatgccgctgggcacgccggacatcgcgatgcgccaggtcatcatggaaatgacgcgcaaggccttcggctgcatcggtgtcgtctccccggacgggcggctgcgcgggctgatcaccgacggcgacctgcgccgggcgctggaccgcgacctggacagcacgctggccgccgacatcatgaaccccaccccgctgaccaccggccccgacgtgctggcggccgaggccctgcgcctgatgaacgcgcgggcgcggccgatcaccagcctgttcgtggtggacgcggccgggctcccggtcggcatcctgcatatccacgaccttctgcgggcgggcgtcgcatgagcgcgtctcctcccccgccctccagggaccccacggcaccgcgtcgcgaggatttcgcccgttcggcggacgacgtcgcccgccagcgcaccgtcctgcaccatcggacgacccgcgcccggcaccttcccaatcccgacgacatcgcgcgccggcggatgctggtccgctgggccaaatgggtgctgccggcggcggcgctggccctgctggggtcgatcgccgcctggccggccatcgaccggctggtgaacgcccagcgcaacgcgctgcacgagatggaaaacctgcgcatcgaaagcggcaacatgctgggcgcgacctatcgcgggctggacgaccacaaccgcccgtacatgatcaccgccgaccaggcccagcaggtgacgccggaccgcatcaacctgaccggccccgtggccgacacctttacccagggcaatgactggctgaccatccgttcggaccagggcgtgtacatgcagcacgagcaattgctggacctgacgcgcaacgtggtgctctaccgcgccgacggcgtgatcatgaccggggtcacggccgacatggacctgaagcagggaatcgtcgcctccgaccagtgggtgcatgccgaaggcccgttcggcgtactggatgcccagggcttcatcctgtcgcagcacgagggcatcggcctgttccgcggccccgggcggctgatcctgaatgacgacagccacgcccatccgcccgccgccacgccatcttccgcggcgccgcccgcgtcgtccaccccacccgcccgtacggagcccacccgatgaccgccttccccaaggtcgctaccgcgttgctgcttggcggcgtcgcggcctgcgtggcgcccatgggcgcacgcggccaggcgctggacctgtcccatggcggccagatcacggtgacggcggccggcggcttcgactgggaccagaaatcccagaccgtcacggcctatgaccaggcacaggcagtgcggggcaacgtgaccgtgaccggcgaccggctgatcgccttctaccgcaagaaggcggcggcgggagcggcccagggcggcgccccgaacaacggtgccgccgcaccggcgtccccgccaccggccgcccaggccccggcgccccaggcaccagccacccagtcgacgggcaatggcaccgattccgggtccaacgaggtctatcgcctgaacgccatcgggcatgtccatatcttcaccgacacggaccaggcctggggcgacaaggcgatctatgatatcgaccagtcggtcatgatcatgaccggcaaggcgatgaagatggtcacgccccaggacgtgctgaccgcccgggattcgatggaatattattcgcagacccggatctcgatcgggcgcggaaacgcgaccgtcacgaccaatgacgggcggcagatccgcgccgacgtgctggtcggatacagcgccccggcccagccggccacccagtccccggctcagcctccgcccagcccgccccccggaacgcagcctggggccgcgcccggaaccggcaaggacccattgaccagttcggggaagctggaaaaagtaaacgccttcggccacgtcttcgtccgcacgcagaccgagaccgtgaccggggaccggggcgtgtatgtacctgacaccgggattgcgcggatcgtcggcaacgtccacatcacgcggggccagaaccagatcaacggagccgcggcgatcgtgaacatgcacaccggaatcgcgacgatgaccgaacgcgcgggcagccgggtcagcggcctgatcgtccccaacgaggccaacagcagccccggcggggccaggcccacccaggccgggacgaaacccggccccgcagggaagacaccatgaacgaaatcccctacgaactggcgggcgacatgcagggcaccgcgatcgcgcacggcctgccggccgccgacggcctgatcgccaacgggatcggcaagacctacaagaagcggccggtggtgcggaacgtctcgatccaggtccatcggggcgaggccgtgggcctgctgggccccaacggggccggcaagacgaccagcttctacatgatcgtggggctggtgcagcccgataccggggcgatcacgctggacggaaccgacatcacccagttgccgatgtatcgccgcgcccggctgggcatcggctacctgccgcaggaagccagcattttccgtggcctgaatgtcgagcagaacatcatggcggcgctggaagtcgtggaagccgatcccgagcggcgcgaggcgatgctggatggattgctgggcgaattcggtatctcgcacctgcggcgcgcgccgtcgctggccctgtcgggcggcgagcgccgccgcctggaaattgcccgcgccctggccagccagccgcattacatcctgctggacgaaccgctggccggcatcgacccgatcgcggtgggcgaaatccgcgatctcgtctcgcacctcaaggatcgcgggatcggcgtgctgatcaccgaccacaatgtccgcgagacgctggaggtgatcgaccgcgcctatatcatgcacagcggccaggtgctgatggaaggccgccccgaggaaatcgtcgccaacgaggacgtccgacgggtgtaccttggggagaatttctccctctgaccgtctgtccatgacgatcggccccaggctcgcgctccggcaggcccagaccctcgtcatgacgccgcaattgcggcaggcgatccaccttctgcaattgtccaacctcgacgcctgttcgttcatcgaacaggaactggaacgcaatccgctgctggagcgcgcgaacctggcggggctcgaggaactccggcccaaggtcgtggcccacggtgcgcgccatgaccctcgcctggaacgggtccccgaccaggactgggccgccacaacggggaccctgcccggcccggccccctcgctgcacgaacggctggcgcagcaggtgcggctgtcgtggcgcgatgccggcgaccggctggtaggggcgtatctgatcaccctgctggacgccgacgggcggctcgtccccccgacggcggtcatcgcccagtccctgggcaccacgttcgaccatgtcgagcgtgtgcgccagaccatgatgcagttcgagccgacgggcctgttcgcccacgatctgggcgaatgcctggccgcccagttgcgcgaacgcgaccggctggacccggcgatggccgtcctgctgcggcacctggacctgctggcccggcgcgacctgcgccggctgcagggtctgtgcggcgtcgatgccgaggacttggcggacatgattgccgaggtccgcaccctgtcgccccgcccggcccgggatttcggcgatccggcggcctgttccgtcatcccggacgtcctgttgcagcccgcgccggacggggactggatgctggaactcaaccccgagaccatgccgagcgtggtggtgaattccgcactgagcacccgggtggcgctgcgggcccggcgcgaggacaggccgttcctgaacgagcgcctggccagcgccaactggctggtgcgcgccctgcagcagcgggccgacacgatcatccgcgtcgcaaccgcgatcatgcgccggcaacgcggcttcctggatcacgggatcggccacctgcgcccgctggtgctgcgcgatatcgccgaaacggtcgggctgcacgaaagcaccgtcagccgggtgacggcgaacaagtacatcgccaccccgcgcggcctgttcgagctgaaatatttcttcaccaccgcgatcccgggccgcgcgggcggcgccgaccacagcgccgaggccatccgccatcggatcaagaccttgatttcacaggaatctgatggaaaaatcctgtccgacgatgcaatcgtgacccggttacgcaaggaaggaatagacatttctcgccgaaccgtggccaaataccgggatgcgttgaggatacccaactcggcgcagagaaaacgggacaaggccctcatcggcctgaaaccggaagcttgaggcccgaatcccgacgccatgaccggcagtttggagcgccggcatgcatcgtccggtttcggacgctcctcctccatgcaaggggtgatgtcacatgcagatcagtgtcgctggcaagcagatcgacctctccgacgctttgaagcaccgggttacggcccatctcgatcgtcttgccgacaaattcttcgaccgtgccctggatgcgcaggtcaccttcagccgcgcccgatccttctttacctgcgatatcaaccttcatgccgcgcggggcctgaccctgcggggtgaaggcgaggccgccgacgcccatggcgccttcgacgacgcggccgaacatatcgcccgtcgcctgcgccgctatcgcgagcgggtgaacgaccatatccgcaccctgccccgtcgcaagacgcccgaggtgggtcgcagctacatccttcgcccggcggaaagcgacgggcgggtccggggtgaagcgatgcacgacacgggtccgtacgcgaccatcgtcgccgagcgcgccgccgaaatcgcgacactcagcgtcagcgaggccgtgatgcgcctcgatctggcggcctcgaccctgctgatgttccgcaacagcaccagcgaccagatcaacgtcatctaccgccgacaggacggcaatatcggctggctggaccccagcccggcctgaccggccagccggggcgatccatgatcgccccggcacgtctttccccggggacttcttcccgggggcttcatcaatgcaccagggccggcaccatctcgtgctgcaggatcgcctcgatggcggtcgcctcgtcctcggtcagggccatcggggtgccgtccgccgcatggatggcgaagacgtcctgcccctcgatcaccaccgccttgatataggccatccgcgacacacccagtgacagaagctgggtgtcggtcagatgatgcacgtcggcgggcagcgacgtctggtccgcctgaagaaccacccgtccgttctgggtcgtaattctcatgatctggtcctccgggccgggatgtcccatgatgcggcgacatccggtccactgggccctccctggcgggacggccatgtcgatgggggcgcgggcggcacgtgggcggcccgctagtcttcctcgataacccgcaccacgcgctgggcgcggaccttgggcaggtcgatttcggccgggggggccgatgcgcgcccctgcgtgatctcgatccgccggacccggacctcgggttgcgggcgcagcaggtcgatatggagcaaaccgttgtccagccacgcgttgccgacctcgatcccctccgccaggacgaacgccttctggaactgccgtgcggcgataccccgatgcaggaacacgcgtccctgggaatcgtcggtctgccgcccgcgaatgaccagttggttgtcttcctgcgtgatctgcaggtcttccatcacgaacccggccaccgccagggtgatacgcagcgccgtggggctgatctgctctatattataagggggatagccgtcggccgttcccttggatgcgcgttccagcatctgttccagatggtcgaaccccagaaacatgggggatgcgaaaagtcttcccgacacacaggcctcctcaaccgagcgagacaatcatgcgaacccgacatcggcgcccgcatgcgtcatgatatgggacgccatgccgcttccgcaagggagcggtcaatctgactcttgtccgggacaaacttgctgtacgccgggacggtcgaatatggaaatgaagggctgattggcccgaacgaggaatttcccccgcctggttgcccaagcgagggatgatccttcacagaaaaaaccttacggtaattctgttaccgtggtttccctaccgaattgccaagaacagatgaccttattgacttgaagaagtcaagaggcttgaaatcgcttggggaaaatatgatcgacgaaagcctgacattcgggatcgacttgggcatcggttcatgcggctgggccgtactgcggcggccgtctgccttcggaagaaaaggcgtgatagaaggaatggggagttggtgcttcgatgttcccgaaaccagcaaggaacggacgcccaccaaccagattcggcgttccaaccgactgctacggcgggtaatccgccgccgccgcaaccgtatggccgcaatcaggcgattactccacgccgccgggctgcttccctcgaccgacagcgatgcgttgaaacgccctggccacgatccatgggagttgcgcgcgcgcggcctcgacaaaccgttgaaacccgtcgagttcgcggtcgtgcttggccatatcgccaaaaggcggggcttcaaatccgccgccaagcgcaaggcgacaaacatcagcagcgacgacaagaagatgctgaccgcactggaagccactcgcgagcggctggggcgctaccgcacggtcggcgaaatgtttgcgcgtgatcctgattttgccagccgccgccgcaaccgcgaaggcaaatatgaccgcactactgcccgtgacgacctggagcatgaggtccacgccctgttcgccgcgcagcgccggctgggacagggtttcgcctcgccagaactggaagaagcgttcaccgccagtgccttccaccagcggccgatgcaggacagcgaaaggctggtaggtttctgcccattcgaaaggacggagaagcgcgcagcgaaattgactccgtcctttgagcgattccgcctgctggcccggctcctcaacctgcgcattacgacgcccgatggcgaacgcccgttgaccgtcgatgaaatcgctctcgttacccgcgatctcggcaagactgcaaagctgtcgatcaagcgcgtgcggaccctgatcggtctggaggacaatcaacgttttaccacgatcaggccggaggatgaggatcgcgatatcgttgcccggaccggtggggcgatgacgggaaccgcgaccctccgcaaggctctcggcgaggcgctttggaccgacatgcaagagaggccggagcagcttgacgcgattgtccaggtactcagtttcttcgaggcgaacgaaacaataacggagaaattgcgtgagatcggtctgacgcttgcggtcctcgacgttttactgacggcgctggatgctggcgtattcgcgaaattcaagggcgctgcccatatttcgacgaaagcggcgcgcaacctgctgccccatctcgaacaaggccgacgctatgacgaagcttgcacgatggccggctatgaccatgctgcctcccgcctttcccatcacggtcagatcgtcgcaaagacccagttcaacgcactggtcacggaaatcggggaaagcattgccaaccctatcgcccgcaaagccctgatcgaagggctcaagcagatctgggcgatgcgtaatcactggggcttgcccggttcgatccatgtcgaacttgcccgcgatgtcggcaacagtatcgaaaagcgacgggaaattgaaaaacatattgaaaaaaataccgccctgcgcgcgcgcgaacgtcgggaggtccatgatcttcttgatctggaagatgtgaacggcgacacattgctgcgttaccgactatggaaagaacagggaggcaaatgcctgtataccggcaaggctatccacattcgtcagatagcagccaccgacaacagcgtccaggtggatcatatcctgccttggtcccgcttcggcgatgacagcttcaacaacaagacgctgtgtcttgccagtgccaaccagcaaaaaaagcgatcgacgccctatgaatggctctccggacagactggcgatgcgtggaacgcttttgtacagcggatcgagaccaacaaggaactgcgcggcttcaagaagcgcaattatctgctgaaaaacgccaaagaggctgaagagaaattccgcagccgcaatctcaatgacacgcgctatgccgcacgcctgttcgcggaagcagtgaaactgctttatgcttttggcgagcggcaggaaaagggcggtaatcgtcgcgtcttcacccggcccggcgctcttacggcggctttgcgtcaggcatggggggtggaatcactcaagaaacaggatggcaagcgcatcaatgatgaccgccatcacgcgctggatgcgctgacagtggcggcagttgacgaagccgagatccagcggctgaccaaatcttttcacgaatgggaacagcagggactgggccgaccactgcgacgtgtcgaaccgccgtgggaaagctttcgtgcggatgttgaggcaacctatccggaagtattcgttgcccgccccgaacgccgccgcgcgcgtggcgagggccatgccgcgacaatccggcaggtgaaagagcgcgaatgtacgcccatcgtctttgaacggaaggccgtttccagcctcaaggaagccgaccttgaacggattaaggatggcgaacgcaatgaggccatcgtggaggctatacgctcctggatcgcaaccggccggcccgccgacgccccaccccgttcgccacgcggcgatattatcaccaagatccgtctggcgaccacgatcaaggccgccgttcccgtccgcgggggcactgccggtcgaggagaaatggtacgggcggacgtgtttagcaagcccaaccgcaggggcaaggacgaatggtatctggtgcccgtttatccacatcagatcatgaatcggaaggcttggccaaagccaccgatgcggtcgatagttgccaataaggatgaggatgaatggaccgaagtcggtcccgagcatcaatttcgctttagtctttatcctcgctccaatatagagatcataagaccgagtggagaagtgatcgaaggatatttcgtgggccttcatcggaacacgggggcactaacaatatcagcacataatgatcccaagtcgatacattcgggaattggcacaaaaaccttgctggccataagtaagtatcaagtggaccgctttggtagaaaatcccctgtccgcaaagaggtgcgcacatggcatggcgaggcgtgcatatctcccacccctcccggttgacgcatcggaatcggcagctcgttgttgctcaggatggtggcgaggtatcattggcggtggaggacatcgcgtgccttatcctcgatacgcgacaagtgagcatcaccgggtctcttctctctgcgcttgcagaaaatggcgttgccatgatcgtgcccgatgccaggcatcatcctgccggtatcctgctgccttttcaccagcatcatgcccaggcgcacatagcacatgcccagatctcgatcagccaaccattgaagaagcgcctgtggcagacattggtcgtcgccaagatacgtaatcaggctgcactactggaccaactcggccggccgcaaggacaaacgattgcagcaatggctggacgggtcgcttccggcgatccgggcaatgtggaagcacaggcggcccgagcttactgggcgagcctgttttcggattttacacgcgcaaacgagaatgatcgtcgtaatgcgttgcttaactatggttatgcgatcatgcgagccgcgattgcacgcgcatgcgtggcgctgggattgctcccagctttcggggtacatcacgcatcgaaaaccaatgcgttcaatctcgtcgacgatctgatcgagccgttccgcccctttgtggaccgcatggcgcatgaccgggctttggaacatgtaggggacacgctgtctatcgaggatcgccgtcaaatgtcgacgatcctcaatgacaatgcggccatcggtcgcgagcgaatgaccgtcctggccgcaaccgaagcggtagccatgtccgtggtgcgcgccatcgagcatggcagtgccgcgcttctctcgactccaactctgaaagcccgggattgacggtgcgcgatgaaagccgaggacatccggttcatgtggcttctcgtatttttcgaccttccggttcgcaccaaagagcagcgacgacgcgccagtcgctttcgccatttcctcaaggatgacggcttcttgatgttgcaattttcggtttacgcacgcatctgccgaggacaggacgctgtggaaaagcatgttcggcgggtgcggtcgaatcttccaaaggaaggtagcgttcggacactacaaatcacggacaggcaatacggacggatggaattgatgctgggccttgcgccaaaaaccgagcgaatcggaccttctcagatggtgctgttgtgatttcggcgtcaaaaaacgcggaaatcacaacagttccaattacttccctgcaaggtagcctaccatcggcaaatcggtagggaaaccacggctcagccggctgggcattgccctacgagaggagcctaccatcggcaaatcggtagggaaaccacggcaggggagcgcgtcaccttcgacaagggcctagcctaccatcggcaaatcggtagggaaaccacggccctcgttgctcgcgcgcgggtgcagggctgagcctaccatcggcaaatcggtagggaaaccacggctccgcacgttcacgcgtaccagcatcgcggagcctaccatcggcaaatcggtagggaaaccacggctgctcttagctgtgccggtggattttgtgggcacgaagaactcatgattttcatccaattcttccgggttttccacgctgctgggcgggttccctctggcgcggcggggccggtgtcgctacatcgccctgcatgatcgaccgtgacgccatcgccgccgccattcccatgcccatcctggtcgcgccgcaggccatcctgcggcagaaggcgcgccccgtccggcccgaggatgcggcgggcgtgcgcgatgccctgccgcgcatgttcgccgccatgtaccaggccccggggatcggcctggcggccccgcaggtcgggatgggcctgcgatttgccatcgtggatttgggcgaggaaggcgagcgccagccgctgatcctgatcaacccggacgtgatcgcggaatcggacagcctggcctcgcgcgaggaagggtgcctgtccctgcccaaccaatatgccgaggtgatccgccccgaccgtgtccgcgtgcgctaccgcaccctggacggcacagaggaggaactggaggccgacggcctgctggccacctgcatccagcatgagatcgatcatctggaaggcatcctgttcgtcgatcacctctcgacgctgaagcgcaacatgatcatgcggcgcctggccaaggaacagcgccagaaacgctgagtcttttcagcgctgatcattctcgggaaacaggatcggatcgtcatgcgcctggccttcatgggaacacccgatttcgcggttcccgccctgcacgccctgcacgaagcggggcacgagatcgccgtggtctacagccagccgccccgtcccgccgggcgcggccaggcggtgcgtccccagcccgtccacctggcggccgaggcgctgggcattccggtgcgcgtgcccacccggctgcgcgccaatcacgacgaacatgcgttcttccgcgcgctggacctggatgcggcggtggtcgcggcctacgggctgatcctgcccggcgcgatgctggacgccccgcgccggggctgcctgaacgtccatgccagcctgctgccccgctggcggggggccgcgccgatccaggccgcgatcctggccggcgacgacgagagcggcgtgaccatcatgcagatggacgaagggctggataccggcgcgatgctgctgaccggccgcgtcgccctgacgccggcaaccaccgccagcacgctgcatgacgacctggcggccatggggggccggctgatcgtggcggccctggcgaattcggagaccgccgcgattccccagcccgccgagggcgcgacctatgccgcccgcctgacccgcgaggacggacgcatcgactggacccgcgatgccgtggatatcgaccggcaggtccgcgccctgacgccctggccgggcaccttcaccacgctggacggcacggtcctgaagatcggcgccgcgaccccgatcgacgggccgcgggacgcggtacccggcacggtgctggacgaccggctgacggtcgcctgcggccaggggaccctgcgcctgacccgcatccagcgcccgggacgcggcatgatggaggccgacgccttcctgcgcggccagccggtccccgtcggcacgcggctgggatcgtgaccgcgccgtcgctccagcgctgggccgtacgcatcgaatatgacggacgccccttcgtcggctggcagcgccagatcaccggcctgtcggtccagcaggtactggaggaagcagcgagccggctggcgtccggacgcgtcgtgcccagcattaccgccgggcgcaccgatgccggcgtgcatgccaccggccaggcggcgcacctggattttcccggcgacgtgcgcctgaacgattcgaccgtgcgcgatgcgctgaatttccacatgaagccttatccggtggcggtgctgcgggcctgtccggtcgataccgaatggagcgcgcggttttccgccatccgccggtcctatcgctatcggatcctgaaccgccgcagccggccgaccctggatgacggacgggtctggctggtcaagcgcaccctggacgaagcggccatggcgcgggccgcccgccttctgctgggacggcatgatttcacttcgttccgcgccagcgcatgccaggccaggagcccgctgcggacgctggaccggctgggcgtcgtccgccagggcgaggaaatcgtgatcgaggccgaggcccggtcgttcctgcatcaccaggtgcgcaacatggtcggcacattgaagctggtgggggaaggactgtgggcgcccgaccgggtggcggcggcactggccgcctgcgaccggcgggcggcgggcccgacagcccccccggacgggttgtacctgacgggggtgggctacgaccccgatccgttctaaatccccttactgcggagcgtgcgccgatggcagggccaggaaatcctgccagggcgcataatggggcggcagcaccgccgccgcctcgcccaggaccaggatcgccgccgcgaccgccagaacgaccagaatcgcccgccacacgccaagcgccagccccacccgtgcgatgaaccaggtcagccacaggttataggcgaagacgatcccgttcaggatcagcgcggaatgcacggcattgagaccggccggcaggaccatcgccaccacggccacggcgatcagcatgacgaacagcaccagccagtcgcaccacagcgccgcggtcatgtagcggggccacagggcctcgcgcccccacaggcgtgccaactgatgggtcacgatgatcggcgtcaggaccaggcagagcgagaacaggatcttggtcccgctcagtcccgtgggggcctggaccagggtcagcaacgcaccgaccagccacagcgccacgcgcggggccagcgcggtcaacaccgaatcctgggtcgcaccgaaacagttcagcccctcgcgccggccacggcccagcagcatcatgccgcgaaagataccgccggcgctgttcggcaacggtccctgcggcacgccgcgtccctgcatcatcccatcagcctttcaagaaacgccgcatagatgtcggtcagcgcgagaaggtcggcaacgggcacgtgctcgtccaccttgtgcatgctggccccgaccaggccgaattcggcaaccgggcaatagcggctgatgaaccgtgcatcggacgtgccgcccccggtatccagccgcggcgcccgccccgtcaccgcctggatggacgcggccagcatgtccagctccggcgtgggttcggtacggaaggcttcaccgctgatctggaccgtgacctccgcccccggggcgtggacatgcgcgacgccgcggatccagtcggccaggccctggccggtatgcaggtcgttgaagcggatgttcagccgtgccgtggcccggccgggaatgacattggtcgcctcgttgccgacatcgaccgtggtgacctgcaggctggacggttcgaaccactccgttccctggtccaacgggcgggccgtcaggtccgacaggatggccagcaggcgatggaccggattgtcggcccgatggggataggccacgtgaccctggattcccggcacgacgatccgggcattcaggctgccgcgacgcccgatcttgatgacatcgcccagatggtcgggattggtcggttcgcccaccacgcagaaatcgggaacctgcccgtgcgccgccatccattccagcaccttgacggtgccgaaggtggccggtccttcctcgtcgccggtaatcagcaggctgaccgaaccccgcagcgtccggcccgattccagtatccgtgccacggcgccgacgaaggcggcgatcccgcccttcatgtcacatgcgccgcgcccgtacaggcggccgtcccgcagcgcggcctcgaacgggcccgaggtccagccgccatcgccgggcggcaccacgtcggtatgtccggcgaaacagagatgcggccccgaccggcccagccgcgcgaacaggttcggggtgcgggcaggtccctcgccaaacggcaggtcggtgacgtcgaaccccagcccgcgcagggcagccgtcagcaccccgatcgcgccgccatcgtccggcgtgaccgacggcgcgcggatcaggtcccgcgccagggtgagcgcgggggtggatgccggggtcagggcaccggtcaatcgcgcagcaattcgttgatcgaggtcttggagcgggtgcgttcgtcgacgcgcttcacgatcacggcgcaggccagcgcgggcagcggcgtgccgtcggcggcatgcggcgtacgcggcggcagcgtgcccggcaccacgaccgaataggccggcacgcggccgacgaagacctcgcccgtcgtgcggtcgacgatcttggtcgacgcgctcaggaacacgcccatcgacagcacgctaccgcgctcgacgatcacgccctcggcgacttccgagcgcgcgccgatgaagcagtcatcctcgatgatgaccggcgcggcctgcaacggttccagcacgccaccgatgccgacaccgccgctgatatggcagttgcggccgatctgcgcgcagcttccgatcgtgacccaggtatcgaccatcgtgccgctttcgacgcgggcgccggcattgacgaagctgggcatcagcaccacgccgggcgcgatataggccgaccgccggacgatggcgcccggaacggcgcggaaggccgcctggccgaactgtgcctcgtcccaaccctggaacttcagcggcaccttgtcgaagaacggcgccggtgcggcaggcatcacgtggctgtcgttcaggcggaaggacagcagcaccgccttcttcagccactcattgacgacccacccggcatcggtgggcgtggcaacgcgcagcgcgcccgaatccagcccggccagcgcatgctcgacggcctcgcggtccgcgcctttcgtggcagaggacagcgtgtcgcgccgctcccatgctgcctcgatatgggtccggagggcgtgctcgtcgttcatggtcctgcaatcctgtctcggcgatggccatggcggcccatcgcattccgtcttcatgtcgcgggaccatgcgaaggaaggccccggcctgtcaacgcatctcgcccccgtggcgtcgcgcggtccctattcgccgcggatcagcgttccgggaccggcctcggtgaacagttccagcaggcaggcatggggcacccggccgtccaggatcaccgccgccctggcgccgctgcgcacggcctccaggcaggtttccaccttggggatcatgccgccgctgatcatgccgctggcaatgccgcgccgggcttcctcggccgtcagttcggggatcagcgcgccggtctcgtccagcacgccgggcacgtcggtcagcatcagcagccgcgtggcatgcaccgcgcccgcgatcgcgccggcggcggtatcggcattgatattgtacgtctcaccggcctcgccgatgcccacgggggccacgacggggatcaggcccgatccggacagggcgtagagcacgcgcggatcgatatgcgtgggttcgccgacgaagcccaggtccagcgcccgctcctggccgctggcatcgcgggtggtgcgctgcaggcgccgcgcggtgatcagcccgccatccttgccggaaatcccgaccgccagcgcgccggcctggttgatcaggccggcgacctgcttgttcaccttccccgccaggaccatttcgatcacgtcgaccatggcggcatcggtgacccgcagcccgtccacgaaggtcgaggggatctgcaaccgggtcagcatggcgctgatctgcgggccgccgccatgaacgatgacgggattgacccccaccagcttcagcagcgcgatgtcgtgcccgaacgcgttggacagcgaatcgtccaccatggcgtggccgccatatttgaccacgatcgtatccccggcatagcgacgcaggaacggcagcgcctgggccaggacggcggcccgttcctgcgcttcctgcatcgtccgcacgatatcgccggtcgtgccgccgcctgggaattcgctctgggattcgctcatcgggtcgtgccctgtcgtcttggtcatgatgggaaccggttcagcccgcttggggcagggccagggccgccagttcggcgcgcagttcggggatgcccagcccggtgtcgctgctggtggcgaaggttccgggataggcggccggatgctgccgggccaggtcggccgcctggctgcgcttggcttccagcgcgccggggcgcggcgcgtcgcacttcgtcagcacgatctggaacgtcacggccgcacggtccagcagcgtcatgatctcgcggtccgacgccttgagttcgatccgcgaatccagcagcaggatcacgcgctgcagggtcggacgtccgcgcagataggcgaacatcatgccctgccagtcttccttcacatccttcgcggcgcgggcgtagccgtagcccggcatgtccaccagggtcagccgcccccccaggtcgaagaaattcagctgcttggtccgccccggttccgacgatgcgcgcgccagtgcgcggcgtccggtcagggcgttgatcaggctggatttcccgacattcgaccgtccggcgaacgcgatttccggcgcaccggggggcggaagctgctccagcttctgcgccccgaagaagaaatcacacggaccggcaaacagcaggcggccggcttcgagcagccgttcttcctcgtccggggtgcggggggtggcgttgaagtcggacatcaggccctgccgctcacttgcgcccggcggcggccgggatcgcaccgaccttgtcgacggcggatttcatgcgacgctggatcaccatctgctgcgcgaccgtcagcaggttgttccagcaataatagatcaccagaccggcgggctgccgcgccatgaagaaggtgaacagcaccggcatcatctggaacatgcgctgctgcgccgggtccgtcggcgccgggttcagcttctgctgcaggaacatcgtggccccgaacaggatcggccacacgcccaactgcaggtacggcgacagcacgttcgggtcccacgggatcagcccgaacaggttgaacaggttggtcaggtccggcgcggacaggtcgtgaatccagccgaagaagggcgcgtggcgcatttcgatggtgatatacaagtccttgtacaggctccagaacaccgggatctgcaccaccatcggcaggcacccggcagccgggttcacgccctcggccttgtacagcgccatcatgttctggttcagcgccatctggtcgctcttgtaccgctcgcgcagttcctgaaccttgggctgcaattgccgcatcttggccatcgagcggaactggcgcgtcgccagcgggaagaacagcgccttgaccagcagggtgaacgccatcagcgccagaccgaaattgcccagcagcgtgttcagccaatccagcacgtagaagatcggacgggtcaggaaggcgaaccagccgaaatcgacggccttccagaaatcgggaatgtgcaggctggactggtactgttccagcaggttcacttccttggcgcccgcgaagacgtggctgacggtcgcgcccgtggtccccggagcaaccacggtggcggcctgggcgatgaagccgacctgatagacccctgccccgccattggcctgatagccatagctgccggtcaccgccgtgccctgctgcggaatgacggcggtcagccagtatttgtcggtgatcccggcccatccgccctgtccgcccttggtccaggacaggttgcccggcggcgtggcgccggtgcgcaggcttttgtacgaactttcgtccagccggccgtcgatgacggaaatcggcccctcatgcaccaggtagccgccggtttccgtcggcgtataggcccggtcgacgcgggcataggggtagagcgacaccggctgcgcggagcggttcacgatccgctgctcgattccgaacatgtaatgggcgtcgatcgacaccacgatctggaacgtgacgcccgcgccgttgtcccaggacagcgtgaccggccggtcggaagtcagcttgggcgcgtccgcgctccataccgtggtggcgtcgggcacgcgtacctggccgccgggcaggttcatccagccgatttcgacgtaattgggctgctggtcgtggccgggttccaggatgcggacctgcgggctgcccttggcgaccgtctcgtgatagtcgcgcagcaccatgtcatccagccgcgcgcccagcaggtcgatcgatccggccaccttgggcgcgtcgatcgcaagccgcgtctcggcctgcggcgcgggcgtggatacgggctgggaactggcacccgcgacgggg

SEQ ID NO: 1503 - DNA, 17349 bp, synthetic construct
  misc_feature 1..17349: note = Synthetic
  source 1..17349: mol_type = other DNA
gtgtcgtgcgcgatgccgacaattatcagcacagcgacatgcccgatgatcgccgtttcatcgcgccatcgctgacctggcagccgaacgaagacacgaagctgacgattcttggtgatttcctcgaagaggaggtgggctggaatttcttctacaccaagcccgacggaacgccgacgcatatctttaccggcgagccctcctatgaccgctacaatcagaagcaatattcgatcggctatgagcttgaacatcgtttcaacgaggtctggcagggcaagcagaaactgcggtgggcgagcctcgatctggatgcggaatatgtctatcagtatgggtcggtgacggacgggcggacccttaatcgtgtgtgggaaggccgtgatgacaggttggactcctttgccgtcgacaatcaggcaattgccgagttcgatgcgggtgcgacggaccacaaggttctgttcggcctcgattaccaggatatgaacaccagaacacatgtgaccaacggcttcgcgccgtcgctggatctggagaacccgatttatggccagccgatcgacatggcgggattcgtcatggagacggcgaacacgaggcaaaaggtcagccagaccggcatctatatccaggaccagatcaaatataatgaccgctggctgctaatgctcggcgggcgctacgactgggccaatatggaaacccgcaatctgctggcgggcacgacgaccgatacggacgattccgcctttaccggacgcattggcctgacttatctctccgacatcggcattgcgccctatatcagctacgccacgtcatttcagccgacacccggcacgacttccgccgccagaggcagcgagccattcaaaccgacagaaggcgagcaatacgagatcggcgtcaaatatgagccgacggcaaacagccttgtcacactgtcaatattcgacctgacgcagaccaacatgctgacggcggatcccgatagcacccagaactttattcagacaggcgaggttcgttcgcgcgggctggaacttgaaggcacagccgacctgacggacaatctgaggctccgggcgtcctatacctatcaggacatggaagtcacgaagagcaacagtggcgatgtcggcaagcgcccggtcagcgtacccgagcatcaggcatcgatctggggcgactatacgatcagggaaggtgcgcttgacggcgtagggttcggcgccggcgtgcgcttcaccggctcgacctttgcagacgagcgaaacaccaaaaagaacgattcatcgagctttgtcgatgcatcgatccattatgaacgggacggaacacggttcgctatcaatgcaaccaatctgttcgacaaggaagttgcaacctgcgcgtccggcagttgctattggcagcaaggccgcaccatcacgggcacgctgacccggcgctggtagtccggtgcatagccatgaactcgtgagaggaagtgtaacccgccgcgccgcgctggctggcctgattgccgccccttgctttttggccggcggccaaagggccagcgctgccctagccttcagaccacgggtcgccgccctggactggggccttgcggaatcgcttgttgcgctggatgtgacgcccgttgccttgccggaaataaataactaccgacggctcgtcgatgcgcgcctgccggagacggtgctcgacatcgggcttcgcatcgagccgaatttcgaagcgatccagagatcggctcccgacctcatcgtcgtcaatcccggctatgtcgcctttgccgaaaagctcgggcgtgtcgcgccggtgaagagctatgccgtctttgacgcaaacgatacgcctttcgacaatgccagccgtgtgctgacggaactggggcgggcgacgggccgggaaaccgaggcaaaggcctatctcggtcaggcggaggccaccctgaaaggacttgcaggcgtgtcgggccgcatgcggggcagaccggtctatcttgttaccatcatcgatgaacggcatgtcatggttcacggctcgaacagtcttttccagcatccgctgcaagcggcgggcctgagaaacgcctgggacaggcccggcaatttgtggggttatgccaatatcggttttgatgggataaacggcgaagcagaggccttggtcatcaatctgggacccattccacctcgcgtagcgcaaggcctcgccgacagtcagctttggaacagccttccattcgtcagggccggccggttccacgcgatccctgcgttgtggacattcggcggcctgccatcggcgatgcgttttactgcggcgctgaccgaaatcatccggaccataggccaatgaaagcggaacgcggtaatttcattgcgggtccagcgctgttgctcctgctgttgggcgggcttgcaattgggttcaccagcataactctccccacattgccgcgctggccggcgctgatcgcggctgaaggcacgacagaacatatcctgttcgtctacagcgacttgccgcgtctcgcggtcagccttctggccggtgcctgccttgcgttggccggtacgatcttccagctcgtgctccgcaacccgctggcgtctccgacgacccttgggacggctgcgggcgcgcaacttgccctgacgatctccatcgccatcgcgccctccgcattggcatacagccgtgagctgatcgcagtcgtcggggccgcgacagcgaccatgctcgtcttcacgatcgccatgcgccgccatttctcgcccgtcgtgctcattctggcgggcctgctcatcagtctctattgcggggcagttcaatatggcatcagcctgtttcatcaggaacaactggcgagtgttttcatctggagcgccggttccctgcttcagaacggctggtcgggcgttatcgtgctggcgccggcgctgtgcgtcatcggcttcggcatggcctttctggtacgacccctgacgctgatggcccttggcgatggtcaggcacaaagcctcggcctgccgatagtgcaggtgagattgatagctttgcttgctgcggttgtcctgagcgcactggtggttagcaatgttggcgacatgggatttgtcggacttgtcgcgccgtggctggcgcgcctttgcggggcgcgaacggcctccgcgcaaatcgtctggtcgccgccgataggcgctgtcctgttgtggattgccgaccagcttgcccagatcgccggtggcggtttctatgaagtgccgaccggaatcgtcacggcagcgatcggcgcgccgatattgctcctgcttttgcggcgcgtgcgcacgcaatccgtgccgtcagcgggaacatttgaggcgaacgctcctgaccgttcctggctgtggattgccagttcgatggtggcccttgtgcctgccatcgccctcggcctttccgcgagctggacgggccagggaatgcaactcgccctcgatcccgtcttcggtgcttttctcgaatggcgcggaccgcgcgtgttcgccgccgttctggccggctgcatgctgtcgctggccggggcgatgctgcaacgccttctgaacaatccaatggcaagcccggaagtactgggcgtctcatcgggtgcaatgctgggaatgatcctgacggtgatttttctgcccgccaccggaaaccagtggcatctcgcaggggcagcgggcggcgcatttcttacgcttgcatcgatgctctggcttggcaggcgaaccggtttcgcccccgaacgcatgcttcttgcgggtgtcgccgtcacgaccttttgcggagcgctgttcacagcgcttctggcggctggcgatccgcgcctgctggacatgatgggcctgctggctggctctacctatggggttggctgggatcgcgtgtcgatagcggcgatgattgcattgccctgcgtgctgggcgtttttatgtccaggcgctggctggacattctcatgctcggtcccttgacggcgtcggcgctgggaatgggcgtggcaaaagggcggctggcgctgcttttgctgtcgtccgttatggtggcgggatcgactttgctggtggggccgatcagcttcgtcggactgatggctccccatatcgcgcgtctgctcggtttccggacaacgctcatgcatctcgcggcatcggcactcacgggaacgctgatcatgatactggccgattggatcgggcgaaatgccatgtttccctatcagctgcctgtcgggttggtctcgaccctcatcggtggtccttacatcatctggctcctctggaagaaccgctgaccggcagcctgatctgcccattcattcagggcatctcgccccgctctgttgacgatctggtcaaggcgatgggcatgagcggcatttcgaagagccaggtcagccgcttgtgcgaggaaatcgatggcaaggtaaagccttcctcacccggcctatcgaaggtgactggccgtacctttggatcgatgccaccttgcgcgaccgggctttggaagcctcgaccgaggaccgcatcacgtttacctcggcgatcctgccgaggtgggcacggcggacgaaaagcctcgatgcgctgcttccggtcctttacctgcgcggtatctcgaccggcaatttccaggaggcgctggccgccctgatgggcaaggatgcaccgaacctgtcgccatcggtgatcggacggctgaaggaggagtggcaggttgactatgatcgctggcaacgccgcgacctgtcggcgcgccgctatgtcagcgctgctggcagcacaagggcctcaacgtgctcaacaaggttcccaaatcggtgcagccgaacatgaaggccgacctgagggaaatccgcgatgcgccggaccgggcgagcgccgaggccgccatggccgccttcgtcgacaaatacgcggccaagtattcaaaggccgtcgactgcctgacgaaggaccgcgaggcgctgctgaccttctttgacttcccggccgagcattgggaccatctgcgcacatcgaatccgatcgaaagcgtcttcgccaccgtccggcatcggaccgtccgcgccaagggggcgctgtcgcataagacggcccgcctcatggtcttcaagctcgtcatgagcgccgcgacaacctggcggcggctgaagggcgaaaatcagttgccaaaggttatcgcaggcgtcaaattcaccgatggtgtcgcagagtcggcaacaccagataaccgcgccgcctgatcggccccatcacccaattcccatcatagctcgttgccgaccagatcaggccgaaggttcccaaactggcacacctcatggatagcgccgaagaagatgtgctcgcctacatgaccttccctaggcagcattgggccaagctcccagggacgtcatccaaccgccgaacgagccattccttcgatggtacgctctttcctgtctgactacctaaactgaagcgggtctgtcacaaggcggttaatggcggaattggccgctcacgatgttgttaaaagccttctctgccggccggcccctggagggtggccggtcacacgcttataggcacggctaaaggcggcttgagacgtatagccgagcctatgcgcgacagtgtctatggtaagtctgtcgcgggtcaaccattgatccgcaagcctcattcgaagttccgcagcatatcgtagcggcgggataccaatcgtagactgaaaacgccccgcaaagaccgaacgggaaatattgcattccgccgccagttcttccaccgaccagtcacggccggggtgccgatgtagcgctagaatggcccgggccagtcgcggatcgcgcaaggctgcaactaggccggaggcgtcgtcgcagccgcattctatccagcctcgcacgatcatggcggccatcacctcagccagtcgcgcgagtatgcctgcaaacccgatccggcccgagcagatttcattcttcatgctggtaaaaatgggcaccagccccggatagcggctgttctgggcgtcagccagcatgaagggtggcatcagcttaccaagtccctgcatcccgccgagatcgaactccatgcagccataaaacaggatggcgcttggtatcgtgctggtgctggggcaggtgtccaccccactgacagtgtcgccaagggcggcggtagcaaagctatcgataggctgcactgagacgttattgtccgacagcaacgcatggttttcaccttggggcacaagaacggcgctgcctgccgatagcctgtgcaacgtgccgtccgcgctccgcaagagcgcgttccccacggcaaggtagtggaaataggcatgaccaggttgggcgtcaaagctgataccaaactccggccccgtctgtatgcgacggtattggacaccgcgcaggcgcatgccggacagcaactcgctaacgaggtcagaggagagcgcgaacgaatcttgcaaggctatgtcaggagtttctatcaaacaatcaggttgatagatcatagatcgtcctgcattcgatgtctaggttccggtcaacctgattgattatggaaggaacctggatgactgatatcgctggcaactctgcactagacacagagcgcgatgacacaacgcatgaagcacctgtatccgccgtatggcttgcggtgctctcgctgacaatgggcgtattcggcctgctgacggcagagtatcttcctgccagcctcctgacccccatggccgttgaacttggcgtgtctgaggctttggccgggcaagccgtcaccataaccgcggtggtcgccctgttttccggtctgttcgtgccggttttgacaagagcgcttgaccggcgggtcgtgctcctggcctttaccacgttgatgatcgcctccaacttactggtggcggtctcctccagcatgacgatcctgttggtgatgcgtgtctttctcggcattgcccttggtggcttctgggccatggctgcggccgtcacgatgcggctggtgcccaccgtactttttccacgagcgctgtcgattgtcttcagcggtatcgctgtggggaccgtcgtctccgttccgcttggcagttatctgggagagttgttcgggtggcgtagcgccttttatgcagcagcggctatcgggctggtgacactggtctttcagcttttcactttgccgcggctggcccctcgcaaaaccacggccggactggggacggtgctgcacattgtgctgcgtccgggcattgccattggcatgctgggctgcattctggcacataccggtcattatgcgctgttcacatatatccggccatttctggaaagcactgctggcgttaattccgatgtgctggcgctgatgttgcttggtttcggcgtggcgaacttcgccggcactctccttggtggacggttgatggaacggagtctgcattcaacgctcgtgctgatgccggcactggttggtgtagctggtctgacgctcgtcttcctgcctgtctcgggccttgggctggcacttctggtagcgttctggggtttggcattcggtggcgtaccggtcgcctggtcgacctgggtggcgcgttcggttcccgatcaggcagagagcgctggtggaatggtggttgcctcggtgcagggagctatcgccgccggagctgcaaccgggggcctcatgttcggcctgagcggcattgtcggggtgttcatcgcaggcagcgtcgtgatgcttgttgctgcattgttcatagcgctgttcgtaaaaacagcaccttagtgactggcgacagcaaaagcgcaccgtgcatgatcgcaacaagtcagggttcggcttccgaaccgataattgacttgcgccgtacggatgagggcggttgccggtactttgatcggaaagctttgctgaaatgcgagacgtccttacgtccttgaatccgcagatcatcgcaacgggcggtgtcgcctgcaagccgcttcttgcccgcttcaaggaattccttcgaccagctataatacaggctctcggcgatcccttcgcggcggcaaatcgcggcaatgctgtcttcaccgcgcagtccttccagcacgatgcggattttatcctccgccgaatggtgcttgcgcgtggcgcggcggatgtctttgatcgtcttctcggccgtcgatgtctgcggcccggttttccgtctcatcttcgcttcctttgattagctacgatgagccgaaaatcctttaagccagttctgtctcatgggcgctgccatggatacccgaaacaatcttcaagaggacgcagaaatttcgaaagaacgatagacaggtcagatgcggcggactgagagggggcagggaagagacttccttaaccgtttgaggagttcgaggaagtcatcgacgaatgtgaagatgacggggatgaccaggaggctgaggaacgtcgaggtcagcaggccaccgatgacgacgattgccatgggttggcggaaactcgaatcgccgccgctgaggctaaaggccacgggcagcatgccgcatcccatggcgatcgtggtcatcacgatgggacgtgcccgcttgtggcaggcgtcgacgagagcatcgaatcgcgccatgccgccgcgccatgatggcgtattcgaccagcaggatcgagttcttcgtcacaacgcccatgagcatgagcaagccgttcacggcgggcatggagaaactcctaccggtgataaccagcggcaacagagccccaccgaatgacagcggtagcgccatgaggatcgtcagcggttgaaggaaatcgtgaaagagcaaaaccagcacggcatagatgcagaagacaccgattgccatggcaatgccgaagctttggaacaattcggaactgcgctgcaattctccctgttcgaccagccgaacgccctgcggcaggttcttgagcgcgggcagcgcctgagcctcgccattgacatcgttgagaattcggccgttgagctcgagaaaggcacgccggcctaccagccgccttacaacaagctcaagggcggcgaggcgcagttcccggtcccatggagaggctgaaggtcgacgaatgggaccagatgatcgacgtgaatgtcaagggcgtcctttacggcatcgctgcagcgcgccctcatatgaaggagcagaagtcgggccacatcatcaatgtatcctccgtagccggtcacaagctctttggcgggtccgccgtatattcggcgacgaagttcgcagtgagggtattgtcggaggggctacggcaggagatggcgccttataacatccgcactacgatcatctcgccgggagccgtcaagacggagctgctcgagcacatcagcgagaaggacgtgcagcagacgaaccaggattacgtaggtcaggtcggggtgccagccgacacgtttgccaggatgatcgcttttgcgatcaacgaacccgaggatgtcgcagtgaatgaaatcctcttccgtccgacggcgcaggaactctaactctggcgtgcgacgccacctgccggtcgtccttcgactggaccaaagacggccgggggacagcccttcggccgtcttcatcgttgcagtatcgtcgaagtttaatgtcgagatcggataggtcctatcagaaacaggatcctaatcgggcattcgctaaattctatctcaaggtggtcggagcaccaaagaaagacgagcaatatttggctaggtagattgccgggagtagatcccgaagaccagcccttctgatttttcgtaatcttattcaaggaatctcccccgccggtttcccgacgagggatgatccttcacagagaaaacctttcggtaattctgttaccgtggcttccctaccgatttgccaaggtcgagatgatcttgctaaacagaataagtcaaggggaaattgtgggggatgatatgattgacgaaagtctggcgttcgggatcgatctgggtatcggctcggagggctgggcggtgttgcgccgtccgataatggatgcgcctggtgtcatcgagggccttggcagctggtgtttcgatgtgccggaaaccgacaaggaacgcacgcccaccaatcaaatccgccgtggaaatcgcctgttgcgccgtgtcactcgccgccgccgcaagcgcatgacggagattcgtcaggtgttccacgcgcatgggctgctgtcatccttgaaacccgaaatgctgaaagggcagaagcctggtctcaatccatgggaactcagggctcgcggcctcgacaaaccattgaagccagtggagttcgccgtcgcgcttgcccacatcgccaaacggcgcggctttaaatccgccgccaagcgcaaggcagccaataccagcggcgacgacaagaagatgcttgcagcgctggaggccacccaggagcggttggcgcgataccggaccgtaggtgagatgttcgcccgtgatccggactttgccgcgcggcggcgtaatcgcgatggcgtcttcgaccgcaccgcgagccgggacgatctgtttcatgaagtgggcagcttgtttgctgcacaaaggcggcttggacaggatttcgcctcaccggagcttgaggaggcgtacaaggtcatcgccttccggcaaaagccgatgcaggacagcgagaagctcgtgggtgcatgcattttcgagcccgatgagaagcgggcggcgaaactggcgccgtccttcgagcgcttccgcctgctgacccggctgatcaacctgcgggtcaggagagcggatggccgtgaagagccgctgtcgccggacgaactcgcgcgggcgacttccgacctcggcaagacggccaagctaacggccaagaaagtgcgcagcctgatcgggcttgcgggtgatgagcgcttcaccacgatcaagccggaggacgaaggccgggatatcgccactcgcaccggagaagccctgccgggcaccgccgcgcttcgcaaggcgttgggcgaaacgctctgggcgcaaatgcgcgatcgccccgaccaactggatgacgtggcgcatgtgttgagcttcttcgagactaacgacacgattgctgcaaagctcgcggaacttgggctggaagcggcggtgctcgatgcgttgctggccgcgctggatgacgaaaaggctctattcgccaaattcaagggggcaggacatatatccgccaaggcatgccgcgccctgctgcctcatctggaacagggcaagcgctacgacgaggcatgtgccttggcgggttataatcacgccgtgtccggcctgtcggaccgggatgccgtgacgaccaaggcgcaattcaacgatctggtgaaggaagtcggcgaaagcatcgccaatcctatcgcccgcaaggcgctgaccgaaggattgaaacagctttgggccatgcgcaacagatggggcctgcccggctccatccatatcgagcttgcccgtgacgtcggcaacagcatcgaaaagcgccgtgaaatcgaaagcgagatcgacaagatcaccgcccagcgcgagcgcgagcgcaaggaagtggccgagcttctgaacctgacccacgtgaatggcgatacgctgctgcgctaccgcctgtggaaagagcagggcggcaaatgcctttatacgggcaaggatatccacatcacccaagtgatcgccacggacaacagcgtgcaggtggatcatatcctgccatggtcccgtttcggcgatgacagcttcaacaacaagaccctctgccttgccggcgccaaccagcagaagaagcgcgccacaccctatgagtggcttgcggggcaaggcgcagatgcgtgggaggcttttgtcgaacgtgtcgagacgaacaagcaattgcgcggcttcaagaaacgcaattatctgctgaagaacgccgaggaggccgcgaagaaattccgcgagcgtaatctcaacgacacgcgctatgcggcgcgcttgctggcggaagcggtgaaactcttctaccccgtgggcgaacgggccgggaagggcgagcgccgccgtgtgtacacccgcccgggcgcgctgacagcggcgttgcggcaggcctggggcctggaatcgctcaagaaaatcaatggtgaacgcgtgagggacgaccggcatcacgcgctcgacgccttgactgtcgccgccatcggggagggggaggtgcagcgcctgacccggtcattccaggaatgggagcagcagggtctcgggcgtccgctccggcgcgtcactccgccgtgggacggcttccggaacgatgttcttgcggcgtacgaaaaggcgttcgttgcccggcccgaacgccgccgcgcccggggggaaggccatgcggcgacgatcaggcaggtcgcaatgcgcgatggcgaaaccattgtcttcgagcggaaggccgttaccgccttgaaggaagccgatctcgaccggatcaaggatcccgagcgcaatcatttgatcgtcgcggccgtccgcgcctggatcgccgaaggccgacctgccgacaagctacctaaatcaaagcaggggcatatgatcgccaaggtccggctggcggctaaaaacaaggccgccgtcatggtccgtggggggacggccgatcgcggcgagatggtgcgtgtggatgttttcaccaagccgaaccgcaagggtaaggatgagtggtatctcgtgccgatatacccgcatcaggtgatgaacagacaagcatggcctcatccgccgatgcggtcggtagtcgcctataaggacgagagcgaatggacgcagatcgatgcaggacacacattccgcttcagcctttatccgaggagttatgtcgaagtggccaagtccacaggggaggtattcgaaggttatttttccggcctcgacagatcgacgggcgcgattagtcttgattcctggaatgatccgacgaccgcaatcagaggtataggagcaaagactcttttaagtattcgcaaatatactgttgaccggtttggcgcccgcttcgaggtgaaaaacgaggtccgcacatggcatggcgaggagtgcatatctcacaaccctcccggttgacctttcgtgaccggcaactcgtcgtcgcgcaggacgacggcgaggtttctctcgccatcgaagacattgcctggctcgtcctcgacacgccgcaggtgagcgtcagtggcagcctcctctccgccttcgccgaagggggcatcgccatgatcgtgccggacagcaagcatcatccggcaggcgttcttctgccttttcaccagcatcatgtgcaggctcatatcgcccacctccaaattggcatcagccagcccttgaagaagcgcctgtggcaggcgctggtcgtcgccaagatccgcaatcaggctacgctcctcgcccatctcgggcgtccgcgggaaaagacgcttctggccatggccgagcgggtaggctccggtgatcctgataatatcgaggcgcaggcggcacgcagctattggcctgatcttttctccggcttcacgcgaggaaatgagacagaccgccgcaacgccctgctgaactacggatatgcagtcatacgcgctgcgctcgcccgagcctgcaccgcgtcagggctgctgccggcattcggtgtccatcacgcgtcacgatccaatgcgttcaatctggtcgatgacctgatcgagccgtttcgtcccttcgtcgatctggcggtgcatgagcgggcgcaggaatgcgagaataaagaactgactgtcgaggatcgccgtttcatggctgccatcctcaatcgctctgcagccatcggcccggagcgcatgaccatactggcagccaccgaggcagtcgccatgtccatggtccgcgccatggagcacaacagcgcggcgcttctgcaaaccccaggctgggccggcgaggattgatgtcgagcaatgaaagccgaggatgtccgtttcatgtggctcatggtctttttcgatcttcccgtcggaacgaaggagcagcggcggcgggcgacccgcttccgcaacgcgctgagggacgacggcttcatcatgctgcaattttctgtttacgcccgcatttgccgcgggcaagatgcggtggataaacacatccgccgcgtccgctcggcgctgcccaaggaaggaagcgtacggacgttgcaggtaacggacaagcagtatgggcgcatggaacttatgctggggcttgctccaaaaaccgagcgattcgcctcgactcaaatggtcctgctgtgatttccgcctcgtcaaaaaggcaaaaatcacagcagtttcagccggttgtcgcaaaggtaacctaccatgggcaaatcggtagggaaaccacggcgctgaagacggtctccagcgaggcgagtagaacctaccatgggcaaatcggtagggaaaccacggctcgttaagcgagcgctgcgagccctgcaggaacctaccatgggcaaatcggtagggaaaccacggccgccaccggccatgacggttcgcgtcggctaacctaccatgggcaaatcggtagggaaaccacggcccaaatcaaagccggtcgcatccgcaatgaaacctaccatgggcaaatcggtagggaaaccacggcacatgccgggcgcatccgccacccaggcgaaacctaccatgggcaaatcggtagggaaaccacggcacacaagtcggccttagcggccttagagacaacctaccatgggcaaatcggtagggaaaccacggcgtgtttcaggacattgaaagtccttgaaccaacctaccatgggcaaatcggtagggaaaccacggctttcgtgtgtagcggctcccatatgactaaaacctaccatgggcaaatcggtagggaaaccacggccaggttgctcgctgcggtggcccgactggtaacctaccatgggcaaatcggtagggaaaccacggcatccggttgccgttgctgtcggtgctgactaacctaccatgggcaaatcggtagggaaaccacggctacgtcatcatattcaatggagaggatcacaacctaccatgggcaaatcggtagggaaaccacggcgagaatttcgatctcgccggtttgcgcgtcaacctaccatgggcaaatcggtagggaaaccacggcttcaactggcgccgggaaacgggttacaccaacctaccatgggcaaatcggtagggaaaccacggctacggcgttgcgctcttccttgcccgaggcaacctaccatgggcaaatcggtagggaaaccacggcgattctgattggtttaaccgcggtgattgtaacctaccatgggcaaatcggtagggaaaccacggcccagttcgtgatttccgacccatcgggcaaaacctaccatgggcaaatcggtagggaaaccacggccttggtattcagtttgcaccgactacaaacaacctaccatgggcaaatcggtagggaaaccacggcggtgaagtccaatccattgatacaacactaaacctaccatgggcaaatcggtagggaaaccacggccggatgaaacaggtgccgctcgcggtatcgaacctaccatgggcaaatcggtagggaaaccacggcaaacgccgtgctggacctgttctgacggctaacctaccatgggcaaatcggtagggaaaccacggctgaagggctgtcttcgatcacgccaccgcaaacctaccatgggcaaatcggtagggaaaccacggcgatgctggaaagcaagccttcgagagaggaaacctaccatgggcaaatcggtagggaaaccacggcaggaaaaaagcaacggcgaaggcaccaagcaacctaccatgggcaaatcggtagggaaaccacggccaaagcgagcattcgggcatcgcgcgtcccaacctaccatgggcaaatcggtagggaaaccacggccggtctttgacgcctgagccttgggcttctaacctaccatgggcaaatcggtagggaaaccacggcgccgggcacccccgcgacggtcgctgcataaacctaccatgggcaaatcggtagggaaaccacggcggggttttcagattgcgtcggccaactgcgaacctaccatgggcaaatcggtagggaaaccacggcatcggtttggtccggcccgctcgatctggtaacctaccatgggcaaatcggtagggaaaccacggctcctgccatagccgccgcacggcgcgggagaacctaccatgggcaaatcggtagggaaaccacggccaccgaacgatgcccggtcaaccgccatccaacctaccatgggcaaatcggtagggaaaccacggcggcggcgacacgatgccgccgcccgatgcgaacctaccatgggcaaatcggtagggaaaccacggcgattatgaccgcatcgaaaactccgaaaacaacctaccatgggcaaatcggtagggaaaccacggctggccgcctccagccagagccgccggttcgcaacctaccatgggcaaatcggtagggaaaccacggctgcaaagacgatatcgtcacggagttgaggaacctaccatgggcaaatcggtagggaaaccacggccgccgccgtcttcacggcgacgagatggttaacctaccatgggcaaatcggtagggaaaccacggcgttattttcagtgggggcaaatcacgatggaacctaccatgggcaaatcggtagggaaaccacggccgcgtccgcaaccggctgaaatagagggttaacctaccatgggcaaatcggtagggaaaccacggcggtgcgctgcgaggtgcggatccaggctgcaacctaccatgggcaaatcggtagggaaaccacggccagatgaaggatacggattaccggcaggctaacctaccatgggcaaatcggtagggaaaccacggccctttcgggcacatccgcaacggagtgaagaacctaccatgggcaaatcgtagggaaaccacggcacatctcgcagcagacgacgcagcgggcaaccaccatgtgcaatttatttccagccggccgaggaggggcttggtggggcccgcctgatggtagaggaagggcttgttcgagcgtttccggccgacgccgtctatggcatgtataacgagccgggacggccttagagctggctcgggaaatttgaacagcggggataagtggaatttctggtgcgccaggcgaagctggcgcgttccagccggtgaaagtccggcccgggtaaggggtagcg

SEQ ID NO: 1504 - DNA, 17319 bp, synthetic construct
  misc_feature 1..17319: note = Synthetic
  source 1..17319: mol_type = other DNA
cgctgcgatcggctgcatccgtgccagcgccttggcgcgcgactgcgcctgtttggcggtcgaggcacgggcggaattgcgcgcgatatagtcggcgagtttcttgcgctgcgcctcctgattggcgcgcgcggcctcgatctgcgccacgcgttcggcgcgctgccgctcgaaggcgtcatagccgccgggatagagtgtcagcttgccgcgttcgagatgcaggatgtgatcgacgacattgttgaggaagtcgcgctcgtggctgacgaccagaatcgtcgcccgatagcttttgaggaaatcctccagccacatcaccgcttcgaggtcgaggtggttcgacggttcgtcgagcagcagcacatcgggttgcgaaaagagcagggaggcaagcgcgacacgcatccgccagccgcccgaatagctgtcgaggctgcgatgctgcattgcctcgtcaaagcccagtccgaccagaatcttggccgcgcgcgcaggtgctgcatgggcgtcgatggtgttcagccgttcgtgcagctcgcccagccggtcgggatcgacgcaatgttcggcttcttccatcagcgccgcgcgctcggcatcggcggcgagcacggtttcgaacggcgtcgcgctgcccgccggtgcttcctgcgcgatatagcccagccgtgcgcccttcggcatgtcgaccgaaccggcatccgcctccagatgcccggcgatgacgcgcaccagtgtcgatttgcccgcgccgttacgcccgatcaggccgacccgcgaacgcggcggcaatgcggcggtcgcaccgtccaggatcgtgcgtccgccaaggcgcacctgaatgccgttgaggttgagcatggcgcgcgcctagcaccggatgcgcgcgatcccaagtggcgacttgcagatgcgctgatgaccgggcagggaagttgtcatggcaaagatgcgcgcggaccagatgcttgtcgatcgcggactggtggaaagccggacgcgcgcgcaggcgctcatcatggcggggctggtgttcgcgggcgaccgcaaggtggaaaaggcggggcagcaactgcctgaggacaccctgctcgatgtgcgcgggcgcgatcatccctgggtgtcgcgcggcggcatcaagctggcgcacgcgctggaggaattcgggatcgacccgaccggcaaggttgccatcgatgtcggctcctcgaccggcggctttaccgatgtgctgctgagcaagggtgcggcgcgggtctatgcggtggacagcggcaccaaccagcttgcgtggaagctgcggcaggacgaccgcgtgatcgtgcatgaaaagacgagcgcgcgtatcctgacgcccgaccatattcccgaaccggccgacctgatcgtgtgcgatgccagctttatcgggctggccaaggtgctggaggtgccgctgcgctttaccgcgcccggcgcgacgctggccgctcttatcaaaccgcagttcgaggcggggcgggacgaagtggggaagggcggcgtcgtgcgcgacccggccgtgcatgaacgcgtatgcgcagaggtgcgcgactggctgaccggaatcggctggcaagtgcgcggaatcacacaaagcccgatcaccgggccggaaggaaatgtcgaattcctgatttgcgccgaccttcccgatacgccccgttgagggacgctcgtcctgcctttgcctcgtttgggcgcttgcatccttgttcagcatcggcaacatgcccgtccgccatatcgggccggaaagggagctgggcttgagcgagatcgcgtcgaaggggcagttgtggggggcgtatttccgctgggccgtggtgacggtgccgctgatcctgttgctgggattcgcatcggcaaggctttttcccggcggcagtgaaaatgcctggtacatggcgcttgccaaaccgtcggttacgccgcccggatgggtgttcggcgcggtctggacggtgctctatatcctgatggggctggcgctcgcgatgatcctgaatgcgcgcgggtcgcgctggcgcggtccggcgattctgctcttcgggttgcagttcatcgccaacctcgcctggacgccggtatttttcggctatcacgccgttatcgccgcgctgatactgattgtggtggtgttcgtgcttgctttgctcacgaccttgtggttcgggcgcattcgctcggtcgcggcgtggctgatggtgccctatctggcgtggatcgtctttgccggaattctgctgtatcaggtgcatgcgatgaacccggatgcggcaacccttgtcccgcatgcggcgagtacccaaatcgccttgtgaacggagatacgtacatgcagtccgaaaaccgccttttcgacgatttcgtcaagatgatgaacggggccgccggcaccatcgccggcatggcgcgtgaaggcgaaagcgccgcgcgggagcgtgcgcgcgagtggatcggcgggatggatttcgtcagccgagacgaatttgaagccgtcaaggccatggccgctgccgcacgggacgaggctgatgcgctgaaggcacgaatcgaagcactggaagcggcagcgaaaccggcggtcaaagccaaatcgaaaccggacactgccaagtcctgaccggcttatccacagctttttggattgaatcggcgggctttgcttgtgccgaccttcccgaattggcagcatcgcccggtatttgatggcgaaagggaaaggacttcatgctcgacgaaacggcgtttgaccgggacgagagtgccgcgcccatcgatatgctggaaagctatttcgcggcgcatgactggacctatagccgcgaagatgaagaaatcgtcgcgaaggtaaagggtagctgggccgaatatgaactccgcgccatctggcgggaggaagacagcgttctgcagtttctggctttccccgatgtccgcgtggcgcaggggcagcgcagtgcgatttacgagacgctgggccggatcaacgaacaattgtggatcggccatttcgagctgtggtcgtcgagcggcatcctgctgtttcgccatgccgcgatgatgggagcgggcgacagtgcgggcatgacgctggaggaggcggaactgctggtcgaatcggccattgatgaatgcgaacgctattacccggtgttccagttcgttttgtggggcggaaaaagcccgaccgaagcgattgaatccgcattaatcgacacgcagggagaagcataatttctgatatccccgaaaaaatctggctgatcggctgtggcaacatggcgggcgcgatgctgcgccaatgggtcgcaagcggcgatgtgtcgcccgatcaggtgacggtcatcgaccccggtacgccaaaaattcctgaaggtgtgcgtcatttgcagtcgccgccggaggacggtctgcccgatgcgctgatgctgggggtgaagccacagatgctcgatggtgtggcggaaagcctggcgccgcgcgtacagggcgtgccgctgctgctgtccatccttgccggggttgaggttgcggcgctggcgaagcggttcgatgcgggcgcggtggtacgcgttatgcccaacctgccggtcggtctgggcaagggcgtggtggcgctgcatggcgttccaccgggcagtgcgcagggcaaggccgcgagtgcgctgatggactcgctgggcctggtcgaatggatcgacaaggaagaattgttcgattccgtcaccgcgctttcggggtgcgggccgggtttcgtgttccgctttatcgacgcgctggccgatgcgggcgttgcggtcgggctggagccggatcaggcgctgcggcttgccaccgcgaccgtcaacggctcctcggcgatggcggcggatgccgatgacaatccgggtgtgctggccgaccgcgtcgccagtccgggcggttcgacacgcgaaggcatgaacgtgctcgaccgcgacgaagcgctgaagaacctgctgatcgagacgctgaccgcggcgcgcgaccgtaaccacgaactggccgccgccgcgcgcggctgaggcgtcgcgttcaggacggatcgccactcagaagacgatgtgacggagtcgtagacgttcgtagaacaatatggaggatttgcgtgacccggcgcgcagcgtactttcggtacgtgagcaccggaatcgcggaaagccgccatttgcaggccatcagggctgaatggcgatccgccctagcgttgcccggtggatcgggcgttgcttgcatcggtttcgggaagcagcgcgcgctcgctttccgggatcaggtcctctagcactgcccagaatccgccgaccgcttcctgcccggcgctggaataggccgccgacagcttacggcgcagcgcctcgaacaactgcgcctccagcgcgcgaccgctatcggtcaggcgcagcagcttctgccgccggtcgcgtgttcccgcccgcgtctccataaggtcgcgatcggcaaggtcgttcagaacgcggcccagcgactgtttggtaatcgccagcagacgcagcagctcgcccacggtcaggtcgggttggcgcgcgatgaaataaagcgcgcggtgatgggcgcggcccagaccttcctctgccagtcgttcatccagcgtgcggccgagatggctgtagccgaaaaacagcagttcaatcccgcgccggatttcgggttcacgcaggaacagcggagaagcgccgcgcgacggttcggaaggagtggaagcaggcatgttgacgggttttgccatcggctctaccccacggcaaccattgccgcgcattatgtttccgcacggcagtttcgatgcgaaaaggtacgaaatgagcagttcggataccccggttttcgatattcagcccaacgccgccccggttccaggaagcgagcgggaggcacgaatcgccgatccggggttcggcaaggtgttcaccgatcacatggcggtgatccgctatagcgaggacaggggctggcacgatgcgcggattcaggcgcgcgcgccggtcgagctcgatccggctgccgcggtgctccattacgcgcaggaaatttttgaaggcatgaaggcctatcgcctgaccgacggtgccaccgcactgttccgcccggatgccaatgccgcgcgcttcaaacgttcggcgcagcgcatggcgatgcccgaactgcccgaagagctgttcctcgaatcgattgcgaagctggtcgagatcgacaaggactggattccgacgatggaaggcggctcgctctatctgcgccccttcatgttcgccagcgagacctttctgggcgtgcgcccggccagggaatatctctacatggtcatcgcctcttcagtcggtgcctatttcaagggcggaacgcccgcgatcaccatctgggtgtcggatgattacagccgcgccgcgcccggcggcacgggcgctgccaagtgcggcggcaactatgcggccagtctggtcgcgcaggcggaggcgatccgtcagggatgcgatcaggtcgtgttcctcgacgctgccgaacatcgctgggtggaggaactgggcggcatgaacctgttcttcgtgatggatgacggctccatggtgacgccgccgctcaagggtacgatcctgcccggcatcactcgcgattcgatcctgaaactagcgcaggacgaagggattgcggtgcgagaggaagcctatgccatcgatcagtggcgcagcgatgccgaaagcggccgcctgcgcgaaaccttcgcgtgcggtacggccgcagtagtaacggcagtcggtaccgttaaatcgaccaacggcgatttcaccatcggcgggggcgggccggggcagatgacccagcggatgcgccagcggctggtcgcgatccagcgcggcgaagcggaagatccgcatggctgggtaaagcgtctcttctgatcgggtaattttcctgcaaagggccttttcattttcgcacaagcgatgctaaggcccgcagcccatgctggggcgtcgccaagtggtaaggcagcggcttttggtgccgccatgcgcaggttcgaatcctgccgccccagccagacctaacaggtcttctaagtaactgatcgataacaaaaatttctacgattcaaaatcagtggccctatgccttggcattacggcttggccacctcaatcaggtatgattcggcggctgcgaaaacgcaatggtgtcgcgttaacccgccccagaaatttcgcgaaataagccgataccgaaatcccggatcggaatcggtgcgaactgcttgggaatgtttccgctcgccgctataatgatggcgtgaatgaagacgccgtctctagcgctcacgctgatcctgccgcgggcccggcggatgaagcgcgtgcgtggatggcgctgcgcgagatagcgctttacctgaagcggctgctggcttcggagttcgagcggctaactcctggcccgcgaacggcgcagcgacttgcgtcgatcctgatcagctttttgctattctcgctgatagcggcagtacggaaccggcaacaatcggcgcagcggtcttgcgcgcgcctcttgatgctagtgcgcagatatatcactaatccgcctgaggcttgggtagccccgtaacaatcgcatcgttggccagaatacgcgcgtccgctcatcagcggtttgcgcgccagctacaatgcgtgcgcggatgatcccccgaaagccgcgacacccgcgatatcgcgggtgtcgcaggatcattcggttcgcgaaatgcgagactgatcatgaaggacagcagtgaatgggttcgccaagagatggtggacaaagcagcaaatgaagtcagggaagatcgcgattgcaccatcggtgaggtaaagccgaattgggtcgccaagaagcttggggtgcatgccggcggcgagatctatgacaaagtttatgactggcaacgtcgcgcggaggccgaaggcgcggtcttcgaaatcgaggttcccgcagaggtcttagccgcgcgccgcgcagccctcgagcgctttgttgacgaagacatcgccgacttcactcgtgcagttaggttggcaggcggggtgatcgatcatgccgccgggctccgcgttgccgacgcggaactcagggccaaccgcgcgacatccgcgcgtgctgacctgctgacgttatgccgagaagtggaagccgagcgcgatacggcgcgcgcgcaggttgccgagctgagcaaggcgcttgcggcagcagagcgtcgagaggagcgactgcttggtcggctggaacagcgcgaaatcgacgaagctagcacgggcggcacgaccgacatcccggttctgcccgccgcgcacgagatgaatgcggctcgttgcaggggtgagcccggaatcagcaggggcagtccgacggccacggcaggtgccatggtgggtaagccgccagtcgccaaagccaatggctcgatagacgagccggccaaaccggggggcggtggcaaaagcgaacaaaacgagatgccgctgggcgagcacccttcggaggcgggcggtgtcgatgggatatgatatgactgtcgagagccgccgccgctatggcggtggctctcttttccctttgcgcccttccttcttcggcttccccatggcggagaagccacggcacgcagcgctttcgcgtagtgccgttccgggggttcaggggtactcccctggcacgcctttttttccgcagggaaaaaagcagagcgtgttctgctttttctgtcgcgcttgcgcgcggtcttcgaggaacatatgaaaaaggatgtaaccggcgtcgctggcgcggcgcgagtcgaccagctatcgatgggcgagctgacccacgccgaacgtcacggcaagcgcctcgataagaccagcaagtcacgcgcgatcagtaaggacccaccggttaccacgaccggcctggacctcaacatgctataccacgcgcacgtcgctggtgccttcatacctaagtgccgggcgagagagatgcaggtgatagtccaattccccaaggacttggtggatggcgaagacgctgcgttgatgctccggcatgcgcgagccttcgtcgaaggtgttttcgggccggactcgatcttcgcggatcgggtcgaccgcgacgagaaaagccgccacgtcgtcgatctcttcatcgcgccgaagtacgtcaagacgacgaagcaccaggagaaagtggcggttacgatgagccgtcatcagaaagaattggctcggcaatacaattgtccgccgacgccagtcggcacgggacgggcacttcaggacgcattgttcgattatcttcgcagccagatgggcctaaatggcgtgaagcgtggtgagcccaaaatgatccctgggccggattggaagctgcccgagcagctgcgggaagaagaattggctcacctcaaggccgaaaccgagcgggcgcgcgctgatgcgaaacgcgaacgagcgaaggcaattgctgcccgcgcggctatggaggcgacgttcgatcggttcgaggctgaacatgaggaggcgatcgcggctgcaatagcccgcgagcaggctgcttcacagaaaatggaagaggcacgggccatccgcgccttagccgaccgcgcaaatgaacaggcgcgcgaagagcggctgcagatcgaccgcgaccgtcagttgcatattgaccagcttgctctccttcaacgcgcgctcgatgaagattcagggcctgatcttcgtcttgcacaacaccccgccggcgatgtgggcttcgtgatgaacgagcggaagatgacttcgcgcgaacggcttgtgtatggtcagccatggcagtcgatgatcgccaacattgcgcggcgcttcgctcgctttcttgaaaaggcccgcggtgccgcagccaggctgttggatcgcgagcttgcggttgaaaggcaagaggcagagctggcagaagctaaggcggcagccgctcgagcgatagcgagcgagcgcgaaacgcagatgaaggagcatgaggccgcgctggcagtgctcgatgaacgtgaagcgttggttgatgctcgtcgtgccgatgcagagcgcctggctgacgaggccagaacgctgttcgatcaagcagaagctttgggcgaggcagtcattgaagatgtggccaatagtgctcgatggaaccgcgcgctggagcaaatcgccgaacgcccgagcgtgattaccgtcgatgcagaggggaaggcggcattcgtcccagccatcgcagagcaacttggcgacgagtttctcgacaccatcgcgtctatggcttccgccgacgccaaagtccccgattgggcgttcgtagcgcttgagcgggaattggaaatggccgaaaaacgtcacgccgtgctgaagaaggccgatccgattatgaacccggcacaggaattggtcgcgcgtgaagcgcggagcgtcatgcggaacgtcgctgccgtatatcaacgcggccagggcgtttaggccatgaacgtgtgaataatggcctttcgacatcgaatgccgggctattggggggcggcgaacgtctgcttttcggcgcggaggttttggaagcagactttctgtatgtggggcgtcgttagacgtaaatgcgccccacattctgccattcgaccgctctcgccgaattccgaaagcagtcgtttcaattgatcccgcaggcagaggaaattcggtcacatatgtgctcgaaaaagaaatcccccgccagcaggctggcgggggattcttgatatgagaaacctcaatatcagcgcttcaattaagaaatttccggggcccgccgaagcgattgatcattcttcacagtgaagctctgttaccgtggcttccctaccgatttgccagatacgtcaatcgcctattgacgcttccgggtcaagcggcttgtctgggaggaagggggtaaggtaatgaacagccgtatatccaatggtttagtcttcggaattgatctcggaattgcgtcttgtggttgggccgtcttgcgtcacccgacccaagctgattcaactggcgaaatcgaagccatgggcagttggatgttcgatgtgcccgaaaccgataaggaacggacaccgaccaaccaaataaggcgtggtaatcgcctgctgcgccgcgtggttaggcgcagggcgcagcgcatggcgacaatccggcgactgttcaagaaacatggtctgctgcctagcgatgatcgtgactcgctgaagcgagccgataccgatccatgggagctgcgggcaaggggcctggatcagcccctgaaacctgctgagctggccgttgcgctgggccacatcgccaaacggcgcgggttcaaatccgccgctaaacggaaggaagcgaacacctcgggcgacgaccagaagatgcttaaggcgttggaagtcacaaaggaaaagcttgggcgataccggaccatgggcgagatgttcgcacgcgatccggagtttaaagatcgcaagcgcaatacggatggccaatttaaccggacccaaagccgcgatgaccttctccatgaggttcgcaaacttttcgaagcacagcgacagcttggcaatgaactggcaagcgacgccttggaagcagcatttgttaacaccgccttctttcagcgaccgcttcaggatagcgaacggcttgtcggtttatgcctgttcgaaccgacggagaaacgagctgcgaaacactcaccgtcctttgaaaagttccggctactaacccgccttgtcaatctgcgtatcgccaccgatgacggcgagcgctcgctgacaccggaagaactcgtggctgctaccagcgatctgggatcaactgccaagctgtcggtgaagacaatccgcaagcgcatcggtttgcccgacggccaacactttacggccatcaagcccgacgatgaaggccatgacatcgctgcccgaactggcgaggctatgcacggcacgaagaagctgcgcgatgcgctgggtgaggagatatgggccagcttgctggaacaacccgaaacgctggacaaaatcgcgcatgttctcagtttctttgaaacagccgaggcaatcggtgacgaattgaagaggatcaacctgccagcagcggcgtccgaccgactgctggaagccttgccatcattcgcgcgcttcaaaggtgccggccacatctccgccaaggctgcccgcgcgctgattccgcgtcttgaagcgggtctacgttacgatcaggcgtgtgaggcagtgggctacgatcacgccgcctcgcgctggtcgaggcgagaacaggtggttgacaagaaatcctttaaccagctcgtgaaagacatgggggcggagatcgccaaccccatcgcgcggaaatccctggccgaagggttgaagcaactttgggcaatgcgcaatcgctggggtctgcccgatgccgtacatatcgagttggcccgcgatgtcggcaacagccttgaagaacgcaacaaaatcaagaagcgtctcgatgatacgacagcgcagcgcgagcgggagcgaaaggaagctgcagagcaacttggcattgatcccggcgatgtcggcggagatacgttgctgcgctatcggctctggaaagaacaagctggcgaatgtccctatacaggtgagcacattccgcccagtgcgattgctgcgaccgacaacagctttcaggtcgatcacatccttccctggtcccgcttcggcgacgacagtttcaacaacaaggtcctgtgcgttgcacgcgccaaccaagacaagcggcgggatacgccttttgaatggatcatgcgcaccgagggcgaggatggctgggaattattcgccaccaggatcgagacgaacaagcagtaccgtggtttcaagaagcgcaattacaccttgaagaacgccaaggaggccgaagaacgcttccgcagccgcaaccttaacgacacacgctatgccgcccgccttctcgctgaggccgtgaagttgtttttcccggaagggcaaaggcaggatcgcggaggcacgcgccgggtgttcactcgtcctggctcacttacctcagccttgcgtcacgcttggggcattgaatcgctcaaaaaggtcgatggcaagagggtcgaggacgcgcgccatcatgcgctagatgcgctggtcgtggcagccgttggcgaatgggaagtccagcgattgacgaagagctttcaggaatgggaacagcgcggccttgcccgaccgttacggcgtgtcgaaccgccttggggagatttccacagtttccggcgggaagtgcaggaagcctatgatacgattttcgtcgcacgcccagagcgtcgccgcgcacggggagaaggccatgctgcgaccattcggcaggtgaaggagcgcgatggcgtgcccgtagtgttcgagcgcaaggccgttgctgatctcaaagaaaaggaccttgagcgaataaaggatcccgaacgcaacaaggcggtgattgaggcaatccggcaatggattgccgatggacgcccggttggtgctttgccgcgttcccccgcaggagccgaaatccgaaaggttcgcctcagcactaaaggcaagccttctgtgcctgttcgcggaggcactgccgatcgaggggacattgttcgagtcgacatcttcagtaaacccaacacgcgcggcaaagacgagttctacgtcgtgcctgtgtatccgcaccaggtcatggacaagaagcagtggtcccgtccgccttccagggccgtggttgcttacaaggatgaggccgactggattgaaattgagagttcattccggttcaggaccagcatctatccacgaagctttctggaagtcaccaagccagatggggagatactttcagggtatttccaaggaatgaatcgttctacgggcgcgatcaacctcacaaaccaccgtaattctcgtttaatgctcactgacaatggatcgaagacagagagtatcggggtaaagagactgttaactataaagaagtacagtgtggaccgcttcggcaatcgttccgaagtgaagtcggaggttcgcacatggcgtggcgcggtctgcacatctccaaccccgcccgactgacacatcgcaggcgacagatcgtcgtcgcgccggatgatggggacgaagaactgacctttccggtcgaggacgtagcctggatcatcctcgacacaccccaagtgtcgctttccggttctctgcttagcgcattggcggaaaacggcgtcgcgatgattgtgcccgacgccaagcatcacccagccggtgtgctgatctcattccatcagcatcatgctcaatcggcaatcgcccacgcccagatcggaatgaccgccccgctccagaaacgactttggcagcggatcgtaaaggcgaagatcgaaaaccaggcggcagtcctccgcgctatcggcaatgaccacgcgcaggctctatcagcaatggcgtctcgtgttggctcgggcgatcccggtaatctggaagcgcaggcggctcgtgcttactggcctcggctgttcgaagattttcgccgacacgacgagacacgagagaatggcctcctcaactatggctacgccgttgttcgggcagctatcgcccgagcctgtgctgcatcaggcttgcttccggcattcggcattcatcacaaatcccgcaccaacccgttcaatctcgtcgatgatctgatcgagccttttcgaccttccgtcgatcgcctggcgcaaaagcgtgcgaatgaaacggcagggacacaactagatgtggatgaccgccgccacatggcgggcatcctcggcgaatctgtctcaattggggaagagcgactgaccattcttgccgccacagaagcggtagcggcgggtcttgtgcgggccattgaaggtcgtgatgctggcctgctcagcacgccagccttgccgctggcccggcgggcctagtcatggaagcagaggaggtccgcttcatgtggctgatggtgttcttcgatttgccgacaaagaccaagccgcagcggcgtcgagccaatcgctttcgcgaatccctcaaaaaggacggcttcatgatgctgcaactttcagtttacgcgcgcgtctgtagggggcaagatgctgtggataagcatgttcgcagggtgcgttcgagcttgcccaaggagggaagcgtcagaacacttcaggtgacggacaagcagtatggcaggatggaattgatgctcggaaacgcaccaaaaaccgagtcggtcggcgcctctcagatggtcctgctgtgatttcggcggcgagttgcccgcgaaaatcacaacagttccaatccgttacatcgcagctgtcctaccatcggcaaatcggtagggaaaccacggccctaatgacattgaaacgctcatgaactatgtcctaccatcggcaaatcggtagggaaaccacggcaacggtcgccgcgctccggtagccggtgttgtcctaccatcggcaaatcggtagggaaaccacggcacgttcgactggcgcgccctccccgccgccgtcctaccatcggcaaatcggtagggaaaccacggccggtatcgccatggaccagtcactaccggagtcctaccatcggcaaatcggtagggaaaccacggcgacactgcggcggccattcagggcgtgcttgtcctaccatcggcaaatcggtagggaaaccacggcgcgcttgtcacacagatgcatgatgcactggtcctaccatcggcaaatcggtagggaaaccacggctagaggcacgtcgcctctccaacgcgccccgtcctaccatcggcaaatcggtagggaaaccacggcccatattctcatgcgttgcacatcgcggtggtcctaccatcggcaaatcggtagggaaaccacggcaacgaaatcgaagataacattatcggtcgtgtcctaccatcggcaaatcggtagggaaaccacggcatgacgcacctgcttactcgccctctgatggtcctaccatcggcaaatcggtagggaaaccacggctcccggtcgcatccggatcgcccagcgcctgtcctaccatcggcaaatcggtagggaaaccacggcggatatgtagcagggtcaatcaccacaacggtcctaccatcggcaaatcggtagggaaaccacggccaacagatacagcggtagcaggtgacgtaggtcctaccatcggcaaatcggtagggaaaccacggcgcactaagccttggggcatatatccgttcagtcctaccatcggcaaatcggtagggaaaccacggcgaaaaccgtcggtcgggttctgttgccatcgtcctaccatcggcaaatcggtagggaaaccacggcgccggggaacacgtaagggttgccttcaatgtcctaccatcggcaaatcggtagggaaaccacggctcggccgcatatggtgccttcgacacactagtcctaccatcggcaaatcggtagggaaaccacggccgagcagggcgggaaggcaccattgccccagtcctaccatcggcaaatcggtagggaaaccacggctacaagcagcaggtggccgcgatcgcgaaggtcctaccatcggcaaatcggtagggaaaccacggcctacccgtcacctcaccgcagtcaggacaggtcctaccatcggcaaatcggtagggaaaccacggccaccggtcaggccgaaagcgttgatggcgggtcctaccatcggcaaatcggtagggaaaccacggcgcatttcgtccgaaggtgttagattaaccagcggcgaatgacacagaggaaatcaaaggctggacacatggccgcgtcgaccagcggaatgcggaacttcaatttaccccttgccaacggagggctgtccacacacggcccagaagaagccctgagtcactgcgtgaaagagcggcagctatcagggagcagaagcccgccgggaaactgccactttttcggggggcgattggcgaacgacagctgaggaagcggcggcaaatctgatccggttgacgggcaccagctatggtagtgcccgtcagaagcttaagcgacgtcgctgtcgagccaaggcgcgagcacggcggcatcattggcggcctctgttagtttgcccgcaaaccgccgttgacgatgcgcttcaagcgcggcgatgtagccgcgcccggcgcgcaactcgatcacacggcgcagtatgcgatcttcgacggcgtccgcctgcgctctgccatcggtcagcctgcgccaacgtgccaagaggagtgaggtcgacaccgtgtccatctcacacgcgctttgcacgtcttcccagcggccggcatagatcaagcccgtcacggcgaatggcgggcatgtgatcttgcccggaatgtccatcgcagccagcacctcggcgagatggatcggcttcatcttcatatttgcggtcttgatccgggcgaggtcgagatgtcgctgccgatcggtgccgccgaacgcgagccacgcccatccacgcggcaaggtcaggccatagcgttcgcagccgctgatcaagataggcaagtcgtgggccatacccatccaggtcacgatttcagcatcgctcggtgcatcggcgagcacctgcaataccccttcgagcacttgccgctcgctgtgatccggcgctgacaaggtgacgaagcgctggacgtccatcccgccctgcggggattcgaccaataacattagcgccgcggttgtgatggtctgagaggtggcctgggaaatttggacagggggataagtggattttctgccttgcggcggccatgaaggcggcctgacaggagtagagatgagcagacgaccacgccggaatcacagtccggcattcaaggcgaaggtggcactggccgccgtgaagggagagaagacgctggccgaactggcgcagcagttcgacgtgcatcccaaccagatcacgacctggcgcacccagttgctggagggcgctgcgggcgtattcggttctgagagcccttcagaatcagccgaacctgcggtcgatgtgaagacgttgcatgccaagatcggtgaattgacgctggcgaatgattttttagccggcgcgctcgggaaggccggtctgttgccgagcgcaaagcgatgattgatcgttcgcatagcttgccgttggcgcgacaggcgcgggaactgaggatcagccggggcagcgtc

SEQ ID NO: 1505 - DNA, 16111 bp, synthetic construct
  misc_feature 1..16111: note = Synthetic
  source 1..16111: mol_type = other DNA
caaggagaccggacacccgacccgacacgagcccactacggctgctcccttccgggcctgaccgggttcgcaggtcagccgcccggggccgatctcccaagcgggcttctagcacaggaacagggggggcaggcaagcccttactttccaccacaccccatgccctttcagggggcgacagccgcaccaccgggatgccgggggtccgccacgccatagaacgggccgatcctcttccgggccgggtcctgaccatccagccggggccccccgaccagaatcgcctccgtgatgccccacggacgatgggggatgaaatggtacccttcctgttccagcgtcttctgcacgtccggactcagggcgcccgtctccatctccacatcatcgggcttccactgctcatgcaggcggggcagatcgaccgcctgtgccaggtccagcccataatccaccacgcccaggaggctggacagcacgatggtaggaatgcgggagccaccggggctgcctgtgaccatcacgacatgcccgttccggctcacgatcgtcggggacatggatgacaggggcgtcttgcccggcgcaatggcattggccacagaaccgacaatgccgaacatgttcggctctcccggcttgatggagaaatcgtccatctcgtcattcatccagatgccggtgcgcccccccatgacgcccgctccaaaccagccattgagcgtataggtggtggacaccgccatgccatgggaatcgatcgtggaaaaatgggtcgtctcgtgcttctccacggccaggccggaagtcggcacgctcctgccgggggccggacgcccgacctgaagcgtatcggatggcacggccctgtccctgggcagggcggcccgtatctgcccggcgtaagtggggttgaggaaataggaaaccggattgacgacaaaggccggatcaccaaggtcccgcctgtcggaataggcatgacgcatggcctccagctccagctggacggcaggcgcactgtgcaggccaaggcgacccatgtcatacccggacagaatgttcagcacctcgcacagggccacgccaccaccgcttggcggaggtgccgtctcgatctgatagccacgatactggcaggtgaccggctccatgaagcgtggcttataggcacgaaaatccgcttccgtcaggaacccgccacccagacgggaggcccggaggatttccgaggctatgggaccacgataaaaggcgtccctgccatcattggcgatcagttccagcgaccgggccagaccgggctggaccagcctgtcccccacggccagctccgtcccgtcaggccgcaggaaaatgctacgggcatactcatcctgccggaaatagtcggtggacgtgtgcagaagctccacgtcaccttcctccagaacgaaaccgtcccgggccagggcgatggccggggccatgtccttcgcccggctcagccgtccccagcgtttccgcacggcctccagcccggcgaccgtccccggtacggccacggccttccagcccaccgtggaaagacccggtttcacccggccttcttcatccagatacatggcaggctgggaacgcaggggtgcatgttcccggaagtcgatgaataccgcaggaccatgcggggggcgcagtgtcatgaagccgccaccgcccagattgcccgccgctggatagaccacggccagcgcataaccgacggccacggcagcatcggcggcattgccgccctcacgcagaatccgtgcccctgcctcggaggccagatgctgggcagagacgaccatgcccgcctcccccttcaccagcgtgccggggcgggtggtgtccggcccataggccagcgggtcatgtgctgcactcagcgtctcggcctgggacagggccacgctgcccagcaccatgctccccagagccagccgggcagccagtttacgcaatgccatcatgacgggcttccttgtccacgaaacagatttcagagggcgtaaggcggtttcgtataaccacggggcgacagggtgaagatttcatacccgtcttccgtcacacccagctgatgctcgaactgggcggacagggagcggtcccgtgtcacggccgtccagtcatcagccagcaccttcacgtccgggcggccaagattgagcatcggctcgatggtgaagaccatacccgctttcagtatcgtaccctggccgggccggccataatgcaggacgcttggcgcctcatggaagttgcggccaatcccatgcccgcagaaatcccgcaccacgccaaggcggtgcttctccgcaaagctctggatggcatgaccgatatcgcccagcgtggccccaggccgcacctgctcaatccccagcatgagagcctgataggtcaggtcgatgagcttctcggccttgcggggcggcttgcccacgacatacatgcgggacgtgtcgccataccagccattcaggatggaagtgacgtcaatattgaggatgtccccctcctgaaggcgtctgtcaccgggaatcccgtggcagacaacatgattgagggaaatgcagcaggatttcgggaaaccgtgatagttgagcggggctggcgttgcgccatgctccagcgtgtattcatgtacaatcctgtccagctcacctgtcgtgatgccgggacgtacatgctcggtgatcatgtccagcgtggcggcggccagctgcccggctgccttgagatgcctgaaatcgtccgtcgtgtaatgctggatgctgcgcccgtcctgagaagacatgaagtatcgtaatccctgttcttgttctgtgatgtgctgtcggctcgaccatgatgtcggaactgcccgcagaatgcgccctgccctgccccagtgcaagaccctctcagacacggccaagtgaccgcccctcaactgccggaagcggaacagcctgccagacagaaaaaagcccctccggccatgggggcggaggggcttccggctgtagcctcaggagcgatgatgcccccggcgtgaggcccatgaatgatgcagcccccgtggagcgccgtgagaccggtaagtgaccagcacaactccccgccgcagatgggaacggtgcgccacccggctgccgccatgccgggccagggcgtaataatgacccggctgcttgagcagcggcagcggagcctgcccggaagcggaaaaaccatcatccagcagggaaatcattgtctggttccggctttcattgctggaagcccccagcacgacgccaatcagccgcacctgcccctgctgggcagagctgacaagattgtgccctgccagatcggtataaccggtcttgaagccatctgccccctgatacaccccaaggagcgggtcgtggttggggatcatgtgacggcggaacgggaattcacgcacgccgaaataatggtaatactgggggaaatcccgcatcagggcccgtgccagcacggacaggtcccgggccgtggtgacctgatccgggtcgggcaggccggaggcattgcgaaatgtcgtatgggccatgccgagccgccgggcctgataggtcatcagtgcggcgaagcgggtctcatccccaccccccaggtactcgcccagcacgcaggccgcatcattggcagacttggtgacaagggccagaatggcctgctccaccgccagatgcgtccccgggcgcatacccagtttcgatggggcctgcatggaggcatggatggaaaccggcatgctgtcctgaagggtgatgctgccccgctccagtgcctggaaggtcatgtacagcgtcatcatctttgtcagggaagcgggataacgctggaggtcggcatccgactcggacaggacggctcctgtccgggcatcaatgaccagggacgatacatgtccggcaaactgcgcccgtgccgtaccggagaaagcagccagggcgaccacacacgaaaacagggtacgactgaaaaacgggcgcatcagaaggaatcatccccagtttgtctggaatccataaaaaccgtgcaactctagtcttcagtacctgagaatgtccagatttttccaccagacatgccagatatcctcccggcccataaagttgaaaaaacgttttcaccacaaccctgttatgaaccagaaaggcagcaggcagcatgaccggcagaaaaacgccatatgcctctgtatcatgatggggccaacgccatcccgtcagagcatcacaccatgcccttcgtgcattttcctgatacaagaaaataagtcatatttaccaaccagttcaggagcgtcccccatgcagcacaggccacatgccatgacatatgggcttcccatggcctctgccatagacgataccggcatggccctgcctgtccacgctgcccgggaagacacactgacatcccgcaagacggatatcgcctacccctccatgtacaatgtcatcctgctgaatgatgactacacccccatggatttcgtggtgtacgtgctggaacagttctttgacaaatcccccgcagaagcacaggctatcatgctggaagtccacaaccggggcagcggagtctgcgggattttcacctatgaaattgcagaaacgaaggtcggacaggtcatggaccttgcccagaagaaccagcaccctctccagtgcacccttgagaaagcctgaggccatcgccacttgatatcctgacagatttctgtaccgccgcttcatcattctgacattccttcatggcacaaggagcgcctatgttgtcctccacacttgaacagacgcttcagcgtgcgctcctccttgcgggtcagaatcaccacgaattcatcacactggaacatctcctctttgctctctgtgatgaccgtgatgccatggcgatcttttcagcatgccggatcgaccttgagctgctccggcaggatgtcgaccattttctcctgcatgagcagcaggccatcatccgccccgagctggacgatgccccccagccgacagccgccttccagagggtgatccagcgggcggcagtccatatccagagtgcaggccaggccatcatgacaggagcccatgtactggtctccatgttcgccgagaaagaaagtcacgccgttttcttcctccagcagcggggcctgacacggctgaatgccatccatgccatgcggcatgacgacgtggcagacatcccgccgcagactggccagaccggccgcaggaccagggcctcccgcaaggatggtggggaaaacagcgaacctgccgaggccgaccagaaagaggccctccagacctactgcacggacctcaacgagcgggcccgccgtgatggaatcgacccgctcatcggtcgggaaaaggaagtggagcgggttgtccagatcctctgccgccggacaaagaacaaccccctgctggttggtgatcccggtgttggcaagaccgccattgccgaagggctggcccagagaatcgtgaaaggccaggtgcccgccatcctggctgatgcccgcctgtacagcctggacctcggtgccctgctggccggtacacgctaccgtggcgattttgaagaacgcctgaagaccatcatgagcgaactggagcagaagccgggcagcctcctcttcattgatgaaatccacatgctcatcggggcgggcgccacgaccaatggctccatggatgcctccaacctgctaaaaccggctctggcaaccgggaagctgcattgcatcggctccaccacctatcaggaataccggcagcatttcgagaaggaccacgccctgacacggcgtttccagaagattgatgtcaccgaaccctcacagaccgacacgatccgcatcctgcggggcctgaaggaacggtatgaggagcatcacgacatccgtttcaccgacccggccatccgcagtgctgtggagctgtcggtccgatacatccatgaccggaaactgcctgacaaagccatcgacatcatcgatgaggccggcgccgcctgccgcctcctgcccagcagccgcagacggcgcacggttggtgttcgagacatcgaagcaactgtggcacgcatcgcccatatcccgccccgtcatctctccgcagatgacaggacttccatccgccatctgcccgccgacctccgcaaggccgtcttcggccaggatgaagcactggatgccctctcctcagccgtcatgctctcccgggccgggctgcgggatacggaaaaaaccattggcagctatctcttctccggtccaacaggtgttggcaagacggaggcagcacggcagctcgcccaatccctggggatcaggctgatccgtttcgacatgtcagaatatatggaggcccattccatttcccggctgatcggtacgccgcccggctatgtaggctttgaacagggaggcctcctgaccagcgccatagaccagacaccccatgccgtcctgcttctggatgaaattgaaaaagcccacccagaccttttcaacatcctgcttcaggtcatggatcatggcaagctgacagacaataccggcaagacggtggatttccgcaatgtcatcctcatcatgaccagcaatgccggagccagtgatctttccaaagaagccatcggctttgcacgcactgcccgctccggtgatgacgaggaagccatcaagcggcttttctcacccgaattccgtaaccggctggatgccatcatccccttcgccccgctgacacccgctgtggtggcccacgtcgtagagaaattccttgcccagctgaccaccatgctggcggccaaaaacgtctccctgcacctcaccgccggtgcccgggcatggctggctgaacggggttacgaccggacgaatggagcccgcccgctgggccgcctgatccagaaccacatcaagaaaccattggccgaggaaattctctttggcaggctgacagatgggggaaccgtcaaaatcggggcacgtgatggccagctgaccttcaccatctccgctgcgcctgcggcaccatcagacagaaagggccgcaaacaggcaggaacactcaccccggcctgacaccggggtgggtcggtcttcaatcgtaacgctgaccgttcacgctgacatagcccggccacggccagtgacggcccgtgccatgatgggtccagtccaacccctgacggccaggcccatcataataataccgcccctgcacctcgacctggtctccggtcttcacccatggccatgacggggccttcatctcatccagattggacaccacacggatgggctggccgcccgcaacggacatcagaaaataaccatgcatcccgcttcggctgcgacgggcccggaagaccttcacaacggttccgcagacatgctctggcaggtccagatgctgcccatagggcacctgccgatgggcaaactgctgggcgtatcctgcctgatcctttacaaaccgggcattgtcacactgtgccggcatggtggcttctgcctttgccggatggctcagggccatcacaccagccagagccgcaagcatgcctgccctcatcatgacgggatgaaaaaaccgcatatcttctccttttcctcccccttcccccacgggcgaggcaggagtatccttggaatgtttcatcattactggaacaattgccagacatgatgcccattcattaccggatgaccccttaacggctcaaccatattcgtggccgggcgttccaccaccaccttaccgtcagggagggaaaaccatgcctctacatcacctgaaaacgctccgtgaccgactgaaaaccagccgggctggagctggggaaacgcctgtcacctttgctgacagcaacccggttttcgagatcgtggccctcggtgtgcggagtggtgttgcagatggcaatctgtcctcctacctgatccgccctctgggcacgaatgaggccgtcatctgcgatgcaggcactctggggcacgggctgaaacgggccgaggcccgaggtgtcctgaatgacattcccatcatgcccgattccgcccttggccgggccggtcatgtgctgaaacagacggtccgggcctatctcatcagtcatacccatctggaccacgtggctgggctggttctttcctctcccgaggacacagcaaaacccatctatgctttgccagaaacaaacgcccttctagctgaacatcttttcaatggccgtatttggggtgccatgggggataaagggccagaaccccgcatcggaaaatacagctataaagatatggaagcaggggaaagccagaacattgaaggcagcgggctggaaatcacggcttggcctctcagccatgccagcacgacttccacggccttcctcattcagcaccatggacgggccattctctatctgggtgatacgcaagcagatcaaccagatggcccacagaacctccaaaaactttggaaggctattgcgcctctgctacgagagaaaaagctgcacaccatcatcatgggcgtaacctatccggatgcacagccagaaaacgccctctgtggccagcttcgccctaaagacctgctacaaactctgcgggacctgggacatatttgcggcgggcgtcaccatatccgggggctacgtgttcttgttagccatgtaaaagaaacctttcatgaaggcggcaaccccgtccagcatctctaccgggaactgcaagacggcaatgatattggtatccatttcatgatggcagagcagagcgcacgctatcttgtctgacgggtatcgttccaacaaccaaatgaaaagacggaccttcctcaccggccttggtgtgggaggcctgactttttcaggcccggctctggcgaagataaccgggccccatcatacacgacatgagcaccggtcccatcactgcgagaccgcccctaccgtcatgccttctgacgcaccacctctcagcgctctgtcagatacgacccgccaacagatttcccggctcatccatatcgctccgcacagatcacggcaggagcgcatcgtcctgatctcacaggccatgaagggcacgccctatctggcccagccgctcattggctctgccaccacaccagaagagcttgttctttcgtggcggggtgtaaactgcatgacattcgtggaaattgttctggctgccagcatgagccttactgtggaacagttcatccatgcactgatcgccacacgatacagccaccatcatgtcagctttagggaacggcggcacttcctgagtgactggctacatggggcgcctgttctctgccgtgatcttggcccctgttttccctatgcgcgaacagtagagaaaacactgaacctgaaacttccttcgccggataacgggcatgatacatccagtccgactacggatcgttatgtgccgggtcttcctgtgaaaagacgccacattacctatctgcccacacgcccttttcttgacgatctacaggccggtggtgttcgcaggattgtaaaaacaggcgatgttatcggtatttacagcccattggcagggctggatgtcttccacataggcttggcaatctggcagaaccacagcctgtacttccgcaacgcctcatccctgccggaacatcgttatgttgtggatacacccctagatcactacatcaggcagagacggggcctcatcgcctaccaaggcattccctgaccaaacctcaattttcaacgaaaaaaagaccctgaaatattcataagagggaatccctcttcccacgaaaacgcaggaagaggtaatccttcacatggaaaaccatgttaccgtggtttcccaaccgatttgtctgctcccttcctacggaacatgctgaaccctgtcaatctgaacgggaggaaacatttcatgagccatcagatttcagaatcactcctttttggcattgatctcggtattggatcatgtggatgggccgtgctggaacgatcaggaacagacggtgccatcaaagcccttggcagctggtgtttcgatgctcccgaaacggacaaggagaggacacccaccaaccagatcagacgcaccaaccgtctcctacgccgcgttctccgccgccgtcgcaacagaatggccgatatccgccgccttttcaccgaacatgggctgatcggcacgtcacatccggacgccctgcgccagcctgccattgacccctgggagatgagagcacagggacttgaccgcctgctgacccctcaggaattcgctattgcactagcccatattgccaaacgtcggggcttcaggtcagcagccaaacgtgtcggcggcaatgctccatctgacgacagcaagatgctggcagccctggcagaaaccagggagaggtcagcccaataccggacggtcggtgagatgtttgcccgtgatcctgcctatgttcaacggcgacgcaaccgggctggcctctttgaccgtacgatgagccgggataatctggaacatgaaacagagctcctcttcagcaggcaacgtgccttgggcaattccgtcgccagtgccgaccttgaaaaggctttcgccctcatagccttccagcagcgtcccatgcaggacagcggcacgctcgtggctgcctgcccttttgaacctgatgaaaaacggtcatcccgtttttccccctcattcgaacggttccgccttctttgccggctcgtgaacctgcgtgtcacggacggtccgacagagcggcccctgacttcagaagagctgcgccttgcctgcgagactgccgggacaacacgcaggctgacaggagataccgtacgaaagctcatcggcctgcgtgatgaccagcgtttcgtcaccatctcgccagaccaggaaaaacaggacatcaccagcaggacaggcgaagctctggccggtacggccacattccgcaagattctgggagaaacgctgtggcggcagcttctgccacagcctgaactgctcgaccaggccgcatggatcataagttttcatgagctggccgacaccatcattgagaaactgggccagatcggcctgcccgctgaagcccatgccctgctcagtcaaaccctgctgagtgacaggaacccctttgcaaaattcaggggtgcctcctctctctcagacaaagccgcacgagcactcatcccttttctccagcaggggctgacatatgacaaagcctgcgaaaaggtcgggtacgatcatgccgcttcaaaactcagaagccgggagactgtggataccagagccagattccagaccctcatgaacgacgttcgtgacagcatcgccaatccggttgccagaaaggccctgaacgaaggcatgaaacagctctgggccatgcgcaaccgctggggcctgcccggagcgatctgcatcgagctggcccgtgatgtcggcaacagtctcgaaaaaagacgggagattgagaagaatctcgaagccacgaccagacagcgtgagagggaacgtcaggaaatccgtgaccttctgaaaatcgatgatgttccttcagaccttctgctccgataccgcctctggaaggagcaggaagggcactgctgctactccgggaagtccattccaccggacctgctcatggcacgggacaaccgcctccaggtcgatcatatcctcccctggtcacgttttggcgatgacagctacaacaacaagggcctctgctttgcgaaagaaaaccaggccaagaaggggctgacacctcatgaatggattcatggcacacgggggcaggaagcctgggacaggtttgtggctaccgtggaaaccaacagaaacctgaaggggctgaaaaaacgtaatttccttctgaaaagcagcaaggaaacagaagagcgtttccgcacccgcaatctcaacgacccccgccatgcggcacgcctcatggccgaggcggcacgcctgctttacccccctggccaacgggccgaaaaaggaggaaagcggcgggtcttcacccgtcccggtgccctgacagccgccctgcgccatgcctggggggttgaatccctcaagaaagtcgatggaaagcgtctccgtggcgaccgccatcatgcactggatgccgccatcgttgccgccatcagtgaagcagaaatccagaaactcacgaaatccttccaggaaaatgaacagcaaggtctcccccgccccatgcgggacattgccccaccctgggccggtttccgggaacagctggaggggaaatacggatccattctggttgcccgtcccgaacggcaacgtgcccgtggggaaggtcacgccgccaccatacggcaggtgcggaatgaagacaccggacctgtcatctatgaacgcaaacccgttgaaaaactgaccctgactgacctgtccaacatcaaggacccggaccggaatgccggtctcatcacctctctccgtacctggatagaggcaggaaagccaacggacgccctgccaagaacgccatgcgccacagcagatgaaggccatgtgatccacaaggtccgtcttgccacaagaaaaaaaccggctgttcccgttcggggcggcatggcggacagaagcgagatgacacgggtcgacgtcttcagggttaccgggaaaaaaggcaaagtggcatggtatctggtgcccatctatcgtcatcaggtgatgaaccgttcccactggccgaatccacccgacagggccatggcctccggcaaggcggaagaacactggcctgtcatggggcctgaagcccagttccagttcagtctctatccccgcagctatgtacgtcttatcaagaaggataataccgtcaccgagggatactttgccggctgtgaccgttccacggccgccattgccttggccgaccctgccaacaaaaagccaccccagaaaggtatcggcacaaagacgctggataacatccagaaactgaccatcaaccgttttggagaactgtcacctgtcaggaaggagacacgaacatggcatggcgttgtgtgcacatctcccgtccggcccgactgagcctgaaggaccgacagatcgtcatcacgcagggcgacgataccatcgccctgccactggaggatgtagcctgctgcatacttgatacgccacaggccaccttctctggagccctgctctccgttttcgccaccaacggcctcatcctgaccgtaccggatgacaaacatcacccggcagggcttcttcttccctttcaccagcattatgctcaggcggacatcatacagtcccagatttccgcctcacagccactccagaaacgtctctggcagcggatcgtcatcagcaagataaacaatcaggcagccgttttggcagcgcgtgggtgccctaaagcccgacaactgcaaaacatgataggacgggtcacatcgggcgaccgggacaatattgaagcacaggcggcacgtttttactggtcccatctttttcctgattttacccggggcgacagggctgacagacgcaatggcttactgaattatggctatgctgtccttcgtgcagccatcgcccgcgcctgcgtggcagtaggcttggtaccgtcgttggggctccatcatgcgtcccgcctgaatgctttcaatcttgcggatgaccttatcgaacctttccgcccctatgtggaccagatggtggcacgtcatcagctggaacctgacgaaggcgacattaccctcgaagatcgccatttcatgactggtgttctgtcacaatctgctctgataggtcaggagactgtgagcattctgacagccacagaaaagattgccaccagtctggtacaggctcttgagcatagcagtgcggccctgctccagttgcccgtcctcccgacaggaggaacaaccccatgaaagcggaggaggcccgattcttgtggctgatgatttttttcgatctccctgtccggacaaaaagccaacgtcgacaggccacccgtttccgcaattttttgcgggatgatggtttcatcatgctacaatattctgtctatgtccgtgtcggacgtggtcaggacagtctggacaaacatatgcgtcgtgtacgctcagtcctacccagagaaggcagtgtccgggcacttcaggtcacggacaaacaatacggacggatggaaataatgcttggtcttgcaaaaaaagccgaacaagcaggcgcaaaacagatgatactgctatgattttcggccgcaaaacagcgaaaaatcatgcagtatcagtccgttacgctcaagctaaggctaccatagacaaatcggtagggaaaccacggcgatggccccacggcatggcaaaggctcttcaaggctaccatagacaaatcggtagggaaaccacggctgagcggggaatggatatggaagtcaatgcaaggctaccatagacaaatcggtagggaaaccacggcggaatgagctatgggcctgtcggcaaggttaggctaccatagacaaatcggtagggaaaccacggcatttgataccctatgaattggaactcgcctaggctaccatagacaaatcggtagggaaaccacggcttgcgatagtcttatccgacagcctccctcagaaaagcttacacttctctcaaatggcgttgaatggcccttatatgcgcatgatagcaagcgccactgctgccaatagggtaacctggaacccaaatccaaacgtaatctgggatatcaccttcctggccaacactcccgggtcaggcattgagagcgcttgctgggcagaaaattgcccgaacaatccacccaaaccattcatgagcctatttgtagagctctgcaggcacgcttccccacaacatagctctactgttaacaagcaatatgccgatggttccgtatcaacttgtttgggagtattcgtgggtatggatgcgggggtaggatttgaacctacgaccttcaggttatgagcctgacgagctaccgggctgctccaccccgcgttagtgggtggtttttatgggggtgggtgagcgaggggacctggcggcgaccgacttttccgctccttaaggagcagtatcataggcgctggaggctttaacggccgagttcgggatgggatcgggtatggatcctccgccatggccaccaggtcttcccgctcacccatgtgggtgtttgggggtgttttggttggtgttttctggagtgtgactgactactgtgcatgtgttttggtgtgtgagagatatgggcgattaggatcagtcagctacacatgttgccatgctttcacacctgacctatcgacgtcctggtcttggacggccctgtgagacctggttttgaggctggtttcccgcttagatgctttcagcggttatccattccgaacttagctacccggctgtgccgctggcgcgacaaccggtgcaccagaggttcgttcatcccggtcctctcgtactagggacaaatcctctcaagtctcttacacccacggcagatagggaccgaactgtctcacgacgttctaaacccagctcacgtaccactttaatcggcgaacagccgaacccttgggacctgctccagccccaggatgtgatgagccgacatcgaggtgccaaacctccccgtcgatgtggactcttgggggagatcagcctgttatccctagagtaccttttatccgttgagcgatggcccatccacgcgggaccaccggatcactatggccgactttcgtctctgctcgagctgtcactctcgcagtcaggcgggcttatgccattgcactcgacagccggtttccgaccggcctgagcccaccatcgcgcgcctccgttattctttgggaggcgaccgccccagtcaaactgcccaccatacagggtcccggaccaggctgactggtctcggttagatatcagaaaagttcagggtggtatttcaaggatggctccacctgagctggcg

SEQ ID NO: 1506 - DNA, 15484 bp, synthetic construct
  source 1..15484: mol_type = other DNA
  misc_feature 1..15484: note = Synthetic
ggacacccgacccgacacgagcccactacggctgctcccttccgggcctgaccgggttcgcaggtcagccgcccggggccgatctcccaagcgggcttctagcacaggaacagggggggcaggcaagcccttactttccaccacaccccatgccctttcagggggcgacagccgcaccaccgggatgccgggggtccgccacgccatagaacgggccgatcctcttccgggccgggtcctgaccatccagccggggccccccgaccagaatcgcctccgtgatgccccacggacgatgggggatgaaatggtacccttcctgttccagcgtcttctgcacgtccggactcaaggcacccgtctccatctccacatcatcgggcttccactgctcatgcaggcggggcagatcgaccgcctgtgccaggtccagcccataatccaccacgcccagcaggctggacagcacgatggtaggaatgcgggagccaccggggctgcctgtgaccatcacgacatgcccgttccggctcacgatcgtcggggacatggatgacaggggcgtcttgcccggcgcaatggcattggccacagaaccgacaatgccgaacatgttcggctctcccggcttgatggagaaatcgtccatctcgtcattcatccagatgccggtgcgcccccccatgacgcccgctccaaaccagccattgagcgtataggtggtggacaccgccatgccatgggaatcgatcgtggaaaaatgggtcgtctcgtgcttctccacggccgggccggaagtcggcacgctcctgccgggggccggacgcccgacctgaagcgtatcggatggcacggccctgtccctgggcagggcggcccggatctgcccggcgtaagtggagttcaggaaataggaaaccggattgacgacaaaggccggatcaccaaggtcccgcctgtcggaataggcatgacgcatggcctccagctccagctggacggcaggcgcactgtgcaggccaaggcgacccatgtcatacccggacagaatgttcagcacctcgcacagggccacgccaccaccgcttggcggaggtgccgtctcgatctgatagccacgatactggcaggtgaccggctccatgaagcgtggcttataggcacgaaaatccgcttccgtcaggaacccgccacccagacgggaggcccggaggatttccgaggctatggggccacgataaaaggcgtccctgccatccttggcgatcagttccagcgaccgggccagaccgggctggaccagcctatcccccacggccagctccgtcccgtcaggccgcaggaaaatgctacgggcatactcatcctgccggaaatagtcggtggacgtgtgcagaagctccacgtcaccttcctccagaacgaaaccgtcccgggccagggcgatggccggggccatgtccttcacccggctcagccgtccccagcgtttccgcacggcctccagcccggcgaccgtccccggtacggccacggctttccagcccaccgtggaaagacccggtttcacccggccttcttcatccagatacatggcaggctgggaacgcaggggtgcatgttcccggaagtcgatgaataccgcaggaccatgcggggggcgcagggtcatgaagccaccaccgcccagattgcccgccgctggatagaccacggccagcgcatagccgacggccacggcagcatcggcggcattgccgccctcacgcagaatccgtgcccctgcctcggaggccagatgctgggcagagacgaccatgcccgtctcccccttcaccagcgtgccggggcgggtggtgtccggcccataggccagcgggtcatgtgctgcactcagcgtctcggcctgagacagggccacgctgcccagcaccatgctccccagagccagccgggcagccagtttacgcaatgccatcatgacgggcttccttgtccacgaaacagatttcagagggcgtaaggcggtttcgtataaccacggggcgacagggtgaagatttcatacccgtcttccgtcacacccagctgatgctcgaactgggcggacagggagcggtcccgtgtcacggccgtccagtcatcggccagcactttcacgtccgggcggccaagattgagcatcggctcgatggtgaagaccatgcccgctttcagtatcgtaccctggccgggccgaccataatgcaggacgcttggcgcctcatggaagttgcggccaatgccatgcccgcagaaatcccgcaccacgccaaggcggtgcttctccgcaaagctctggatggcatgaccgatatcgcccagcgtggccccgggccgcacctgctcgatccccagcatgagcgcctgataggtcaggtcgatgagcttctcggccttgcggggcggcttgcccacgacatacatgcgggacgtgtcgccataccagccattcaggatggaagtgacgtcaatattgaggatgtccccctcctgaagacgtctgtcaccgggaatcccgtggcagacaacatgattgagggaaatgcagcaggatttcggaaaaccgtgatagttgagcggggctggcgttgcgccatgctccagcgtgtattcatgtacaatcctgtccagctcacctgtcgtgatgccgggacgtacatgctcggtgatcatgtccagcgtggcggcggccagctgcccggctgccttgagatgcctgaaatcgtccgtcgtgtaatgctggatgctgcgcccgtcctgagaagacatgaagtatcgtaatccctgttcttgttctgtgatgtgctatcggctcgaccatgatgtcggaactgcccgcagaatgcgccctgccctgccccagtgcaagaccctctcagacacggccaagtgaccgcccctcaactgccggaagcggaacagcctgccagacagaaaaaagcccctccggccatggggtcggaggggcttccggctgtagcctcaggagcgatgatgcccccggcgtgaggcccatgaatgatgcagcccccgtggagcgccgtgagaccggtaagtgaccagcacgactccccgccgcagatgggaacggtgcgccacccggctgccaccatgccgggccagggcgtaataatgacccggctgcttgagcagcggcagcggggcctgcccggaagcggaaaaaccatcatccagcagggaaatcattgtctggttccggctttcattgctggaagcccccagcacgacgccaatcagccgcacctgcccctgctgggcagagctgacaagattgtgccctgccagatcggtataaccggtcttgaaaccatctgccccctgatacaccccaaggagcgggtcgtggttggggatcatgtgacggcggaacgggaattcacgcacgccgaaataatggtaatactgggggaaatcccgcatcagggcccgtgccagcacggacaggtcccgggccgtggtgacctgatccgggtcgggcaggccggaggcattgcgaaatgtcgtatgggccatgccgagccgccgggcctgataggtcatcagtgcggcgaagcgggtctcatccccaccccccaggtactcgcccagcacgcaggccgcatcattggcagacttggtgacaagggccagaatggcctgctccaccgccagatgcgtccccgggcgcatacccagtttcgatggggcctgcatggaggcatggatggaaaccggcatgctgtcctgaagggtgatgctgccccgctccagtgcctggaaggtcatgtacagcgtcatcatctttgtcagggaagcgggataacgctggaggtcggcatccgactcggacaggacggctcctgtccgggcatcaatgaccagggacgatacatgtccggcaaactgcgcccgtgccgtaccggagaaagcagccagggcgaccacacacaaaaacagggtacgactgaaaaacgggcgcatcagaaggaatcatccccagtttgtctggaatccataaaaaccgtgcaactctagtcttcagtacctgagaatgtccagatttttccaccagacatgccagatatcctcccggcccataaagttgaaaaaacgttttcaccacaaccctgttatgaaccagaaaggcagcaggcagcatgaccggcagaaaaacgccatatgcctctgtatcatgatggggccaacgccatcccgtcagagcatcacaccatgcccttcgtgcattttcctgatacaagaaataagtcatatttaccaaccagttcaggagcgtcccccatgcagcacaggccacatgccatgacatatgggcttcccatggcctctgccatagacgataccggcatggccctgcctgtccacgctgcccgggaagacacactgacatcccgcaagacggatatcgcctacccctccatgtacaatgtcatcctgctgaatgatgactacacccccatggatttcgtggtgttcgtgctggaacagttctttgacaaatcccccgcagaagcacaggctatcatgctggaggtccacaaccggggcagcggagtctgcgggattttcacctatgaaattgcagaaacgaaggtcggacaggtcatggaccttgcccagaagaaccagcaccctctccagtgcacccttgagaaagcctgaggccatcgccacttgatatcctgacagatttctgtaccgccgcttcatcattctgacattccttcatggcacaaggagcgcctatgttgtcctccacacttgaacagacgcttcagcgtgcgctcctccttgcgggtcagaatcaccacgaattcatcacactggaacatctcctctttgctctctgtgatgaccgtgatgccatggcgatcttttcagcatgccggatcgaccttgagctgctccggcaggatgtcgaccattttctcctgcatgagcagcaggccatcatccgccccgagctggacgatgccccccagccgacagccgccttccagagggtgatccagcgggcggcagtccatatccagagtgcaggccaggccatcatgacaggagcccatgtactggtctccatgttcgccgagaaagaaagtcacgccgttttcttcctccagcagcggggcctgacacggctgaatgccatccatgccatgcggcatgacgacgtggcagacatcccgccgcagactggccagaccggccgcaggaccagggcctcccgcaaggatggtggggaaaacagcgaacctgccgaggccgaccagaaagaggccctccagacctactgcacggacctcaacgagcgggcccgccgtgatggaatcgacccgctcatcggtcgggaaaaggaagtggagcgggttgtccaaatcctctgccgccggacaaagaacaaccccctgctggttggtgatcccggtgttggcaagaccgccattgccgaagggctggcccagagaatcgtgaaaggccaggtgcccgccatcctggctgatgcccgcctgtacagcctggacctcggtgccctgctggccggtacacgctaccgtggcgattttgaagaacgcctgaagaccatcatgagcgaactggagcagaagccgggcagcctgctcttcattgatgaaatccacatgctcatcggggcgggcgccacgaccaatggctccatggatgcctccaacctgctaaaaccggctctggcaaccgggaagctgcattgcatcggctccaccacctatcaggaatatcggcagcatttcgagaaggaccacgccctgacacggcgtttccagaagattgatgtcaccgaaccctcacagaccgacacgatccgcatcctgcggggcctgaaggaacggtatgaggagcatcacgacatccgtttcacagacccggctatccgcagtgctgtggagctgtcggtccgatacatccatgaccggaaactgcctgacaaagccatcgacatcatcgatgaggccggcgccgcctgccgcctcctgcccagcagccgcagacggcgcacggttggtgttcgagacatcgaagcaactgtggcacgcattgcccatatccctccccgtcatctctccgcagatgacaggacttccatccgccatctgcctgccgacctccgcaaggccgtcttcggccaggatgaagcactggatgccctctcctcagccgtcatgctctcccgggccgggctgcgggatacggaaaaaaccattggcagctatctcttctccggtccaacaggtgttggcaagacggaggcagcacggcagctcgcccaatccttggggatcaggctgatccgtttcgacatgtcagaatatatggaggcccattccatttcccggctgatcggtacgccgcccggctatgtaggctttgaacagggaggcctcctgaccagcgccatagaccagacaccccatgccgtcctactactggatgagattgagaaagcccatccagaccttttcaacatcctgcttcaggtcatggatcatggcaagctgacggacaataccggcaaaacggtggatttccgcaatgtcattctcatcatgaccagcaatgccggagccagtgatctttccaaagaagccatcggctttgcacgcactgcccgctccggtgatgacgaggaagccatcaagcggcttttctcacccgaattccgtaaccggctggatgccatcatccccttcgccccgctgacacccgctgtggtggcccacgtcgtagagaaattccttgcccagctgaccaccatgctggcggccaaaaacgtctccctgcacctcaccgccggtgcccgggcatggctggctgaacggggttacgaccggacgaatggagcccgcccgctgggccgcctgatccagaaccacatcaagaaaccattggccgaggaaattctctttggcaggctgacagatgggggaaccgtcaaaatcggggcacgtgatggccagctgaccttcaccatctccgctgcgcctgcggcaccatcagacagaaagggccgcaaacgggcaggaacactcaccccggcctgacaccggggtgggccggtcttcaatcgtaacgctgaccgttcacgctgacatagcccggccacggccagtgacggcccgtgccgtgatgggtccaatctagcccctgccgactggggccatcataataataccgcccctgtacttcgacctggtctccggtcttcacccatggccatgacggggccttcatctcatccagattggacaccacacggatgggctggccgcccgcaacggacatcagaaaatagccatgcataccgctccggctacggcgggcccgatagactttcaccacattcccgcaaacatgttccggcaagtccagatgctggccatagggcacctgccgatgggcaaactgctgggcgtatcctgcctgatcctttacaaaccgggcattgtcacactgtgccggcatggtggcttctgcctttgccggatggctcagggccatcacaccagccagagccgcaagcatgcctgccctcatcatgacgggatgaaaaaaccgcatatcttctccttttcctcccccttcccccacgggcgaggcaggagtatccttggaatgtttcatcattactggaacaattgccagacatgatgcccattcattaccggatgaccccttaacggctcaaccatattcgtggccgggcgttccaccaccaccttaccgtcagggagggaaaaaccatgcctctacatcacctgaaaacgctccgtgaccgactgaaaaccagccgggctggagctggggaaacgcctgtcacctttgctgacagcaacccggttttcgagatcgtggccctcggtgtgcggagtggtgttgcagatggcaatctgtcctcctacctgatccgccctctgggcacgaatgaggccgtcatctgcgatgcaggcactctggggcacgggctgaaacgggccgaggcccgaggtgtcctgaatgacattcccatcatgcccgattccgcccttggccgggccggtcatgtgctgaaacagacggtccgggcctatctcatcagtcatacccatctggaccatgtagccggattggtcctctcctctcccgaggacacagcaaaacccatctacgccctgccgcagaccaatgccatcctgtcaggccatctcttcaatggccgtgtctggggagccatgggggatagagggccggagccccatattggaaaatatacctacaaagacatgcaccctggcaaaagccaaaccattgaaggcagtgggctgaccatcacagcgtggccgctcagccatgccagtacaacatccacggcttttctgatccagcatcacgggcgggctatcctctatatgggcgacacacaggccgatcagcctgacggaccacaaaacctgcacgagctctgggaggccatcgcaccactggttcgggataaaaaactccataccatcatcatgggtgtgacctatccagatgagcagccagataacgccctgtgcggccagctccgcccgaaagaccttctgcagagcctgcgtgacctcggccatgtctgtggaggacgccatcatatccgtggattgcgggtcctcgtcggccatgtgaaggaaacctttcatgaaggcggcaaccccgtccagcatctctaccgggagctacaggatggcaatgacattggcatccacttcatgatggcagaacagagcgcacgctatcttgtctgacgggtatcgttccaacaaccaaatgaaaagacgggccttcctcaccggcctcggtttgggaggtctcgctttttccggtccatctctcgcaagaggagatggacatcatcatgcacggactaaacaacggcctctgcctcatggtcatgagcacgcacctgctgccgccccgccatctgatgcgcccgctctcagtacgctctcagacacaacacgtcagcagattacccaacttgtcagcatagctcctcataaatcacggcaagagcgcatcatgctgatctcacaattcatgaagggcacgccctatctggcgcagccacttattggctcagcgaatacagctgaagaacttattctttcatggcggggtgtaaattgcatgaccttcgtggaaatcattctagccgctagccaaagctttaatgtggagcaattcatacacgcactaatcgccacacgatacagtcatcatcatgtcagctttacagaacgacgacattttctgagtgactggttacatggctcacccgttctctgtcgtgatctgagcccgaaattttcgtatgcacagcgggttgagaaaacactgaacctgaaactctcttcttccaacaatccagataacgggcatgaaaagacccaagaccgttatgtgccgggtattccactgaagaaacgcctcatcacctacctgccaacacgaccattacttgatgatttacaaaccggtggtgttcgcaagattgtaaaaacgggcgatgttatcggtatttatagcccattggcagggttagatgtcttccatatcgggctagcaatttggcacggtagaaccctgctcttccgcaacgcctcttcccttcccgaacatcgctatgtcgtcgacaccccccttgaccactacttacaagagcgccgaggggccatcatatatcgcccccgctaggcaatagcgagacacaacacaatcataatatattgataaatatagctaataagggaatccctccccctcgtaaacgaggaggaggtaatccttcgcatagaaaaccatgttaccgtggtttcccaaccgatttgcctagactcgatattaaaaataatacttaaatgatgtcaatagacatgaaggaaaacattttatgacacctatctccgaatccctcctattcggtcttgatgttggaatcagctcatgtggctgggccgtactcaagcactcagacacaacaggacacatagaagcccttggaagctggtgctttgatgcccccgaaacaaagaaagaacgcacacccaccaatcagatcagacgctccagccgccttctccgccgtgtcgtccgccgtcgccgcaaccggatgactgagatacgccgtctctttgctcggcatggcctgattgataatgaccgaccagatgctctccaccaacctgccattgacccatgggaaatgaggagacggggccttgatcacaaactgacccccgaagaatttgccgtagccttggctcatattgccaaacatcgaggcttcaaatcctctgcgaaacgtgtcggaagcaatgcctcgcctgacgacagtaaaatgttggccgcgcttgaaaaaaccaaaaagctatcagaccaatatcgcacaatcggcgaaatgttcgtccatgagtccgcctatgtacagcggcggcgcaaccgggatggtctctttgaccgtacaataagccgggatgacctctctaaggaggtcaaaaccctcttcaataggcaagatgcgctaggcaaccccgttgccagtaccgaaattgaggaagcttttacccgcatcgccttttggcagaaccccatgcaggacagcggcgtacttgtagcctcctgccctttcgagccgaaagaaaaacgttcatcccggttctcaccgtccttcgagcggtttcgtcttctctgccgccttatcaatctccgtgtcaccgatggcccagaagaacgccctctgacagaagaagagctacgccttgcctacgagcacgcaggtaaaacacgcaaactgacagccgccgccatccgtaagctcatcggtctacgggatgatcaacacttcaccaccataccaccagagcaagaaaaacaagacatcacaagccggacgggagagacatttgcaggcacggcaacgttccgttccgtactgggagaatcgttatggcggcagttactgccacatcctgaatggcttgataacgctgcatggatcatcagtttccatgaactaacggaaactatcataaagaaactgggcgaaatcggccttcctgtcgaagcctacgaactcatctgcgatgctctgaaaagtgacaaaagtccatttgcaaaattcaaaggggcctcctccctctccgacaaagccgtacgggctcttatcccctaccttcagcagggtctaacgtacgacaaagcctgccagaaggcgggatatgatcacgctgcatcccgattcagcggccgtgcaacaatcgatacaaaagccaaatttaacgctctcatggctgaggtccgggacagtattgccaaccccatcgccagaaaagccttgagtgaagggatgaaacagctctgggccatgcgaaaccgctggggcctaccgggggccatctgtattgaactggctcgtgatgtaggtaacagccttgaaaaacgtaaggagattgagcgtaatctcaaaaccacggccaaacagcgtgccagagagcgtgaagaagcctgtgaactactgaacttgaaggaggtttcttcagatatcctcctacggtaccgcctctggaaagaacagggaggccgctgctgttattcgggcaagtccattacaccggacatgctcatggcacaggataatcggattcagattgatcatatcctgccttggtctcgttttggggatgacagttacagcaataaagggctttgtctcgcaaaagaaaatcaagccaagaaaaaccagacaccctatgagtggattcatggccagggaaccacggcccagaaggaacaatgggacaaatttgtcgccgatgtggaaagccgtaaaaacaccaagggcctgaaaaagcgcaatttccttcttaaaggcagcaaagagatagaggaacgtttccgtagccgcaatctcaatgatacacgctatgcggcccgcctgatggtcgaggcggcacgcctgctatatcccgccggacagcgcggcgaaaaagggggaacaaggcgggtattcacccgtcctggggctctaacagctgctctccgtcatgcttggggtgttgaatccctcaaaaagatcggtggggaacgcctccatgataaccgtcatcatgcactggatgccgccattgtggctgctgtcagcgaagcggaaatccagaaactcacgaagtcttttcaggaatgtgagcagaaaggcctatcccgccccatgcgggatgttgccccaccatgggacggattccgggatcagttaaaagaaaaatacgagaccattttcgtcgcccgtcccgaacgccagcgggcccgtggtcaaggccacgaagccacgatccgacaggtccggaaagaagaaacaggcccggtcatctatgaacgcaaagccgtcagcgccctaaccttagctgatcttgccaaaatcaaagacccagaccgcaatgccggtcttatcgcctccctccgccagtggattgaagctgggaaaccggcagacaagccaccaagaaccccgtgccaccagagcgcagcaggccatgaaatacgcaaagtacgccttgctaccataattacaccagctgttcctgtccgagggggcatggcgaagagaggtgacataacacgggttgatatcttcaaagtcatcgggaaaaaggggaagccagaatggtacatgatccccatatatccccaccagatcatgaatcgttcccaatggccagctccccctaataaagctgtcgtcgaaaaaaaatccgaggaagactggcctatcatgggggcagaagctcaattccagtttagtctctatcgctacagttatgtgcagctttctaacgagaaatctgtcataaaaggatatttctacagctgtaatcggtcaaaagcttatattactctagtcgattcaaccgaatcaaccgactcaaccgatgctgcaccgtcacaaaaagacaaatgtataaaaaccttggagcatatccaaaaattttccgttaatcgcttcggcgaattgtcacccgtcaaacaggagacacgaacatggcatggcgttgcgtgcacatctcccgaccagcacgattgaagctaaaagacggacaaatgcttattgtgcaggatgatgacaccatcaccctgccattagaggacatagcctgctgcgtactcgacacgccacagatcactctttctggtgccctgctttccacgcttgccgtgcagggcatcatcttgatcgtaccggatgccagacaccacccagccggacttctcctccccttccaccaacactatgcacaagcagacatcatacagtttcagatatccgcttctttgccactccgtaaacgactttggcagctgctcgtcactaccaagatcaacaatcaagcggccgttctgaacatgcaaaggcatagtgaggccaaaaggttgcaaaacatgatagacctcgtgacctcaggcgataaggctaacatcgaggcacaagccgcccgcttttactggtcccggctttttctcaacttcactcgcgccaacgaagctgataagcgcaatggccttttaaattatggctatgccatccttcgtgcagccttggcacgtgcctgcgttgctgcaggacttatcccttcactaggagtgcatcatgcatctcgcaccaacgccttcaatcttgttgatgatctcatagaacctttccgccccttcgtggaccagatggtagcccaataccatccggagccagccactgcttcagccagtcttgaggaccgccagttcatggttggcatcctgtcacaatctgttctgataggccaagaaaccatgactattcttgcagcgactgaaattgttgcctctaacctggttaaagcccttgaacataacagtgctgccttactgcgcctgcctgtctgcatcgctgggggtagctcatgaaagcagaggagacccgattcttgtggctaataatctttttcgacctccccgtccgcaccaaaattcaaaggcggcaggcagcgcagtttcgtaatttcctacgtgatgatggattcatcatgctacaatattctgtctatgttcgtgtcggacggggacaagacagtctcgataaacatttacgccgggttcggaccgccctccctaaagaaggaagcgtccgagctttgcaagtaacggacaaacagtatggaaggatggagattatgctcggccttgccaaaaaaaccgaaggaataggcacgaaacagatggtgttgctatgattttcgatcgtaaaaacaataaaaaatcatgcaacatcaatctgttacgcaagagctagcctaccataggcaaatcggtagggaaaccacggcctccaattcagcaaccaaactagcctctgtagcctaccataggcaaatcggtagggaaaccacggcaggggtatgatgcgaacctcacaagcgttgagcctaccataggcaaatcggtagggaaaccacggcgcgtaatgagcacgctgtataggaaacccgagcctaccataggcaaatcggtagggaaaccacggctcatctgtcagggccgtgatgatgccggtcagcctaccataggcaaatcggtagggaaaccacggcttcacctgcttcaacctgtcatgagtttttagcctaccataggcaaatcggtagggaaaccacggctcttagtgaagcatggtatcttcacccttcagcctaccataggcaaatcggtagggaaaccacggctcaattctttctttggcccgctgcttttcggagcctaccataggcaaatcggtagggaaaccacggccgatctggtcgaacggtacggaatccctgaagcctaccataggcaaatcggtagggaaaccacggctggagcttgcgcacacagccccagttgtcgagcctaccataggcaaatcggtagggaaaccacggctcacccgcagagaccccgatagcagggataagcctaccataggcaaatcggtagggaaaccacggctacgctcgtctttaacgggcagcagctcatagcctaccataggcaaatcggtagggaaaccacggccccatattggtgaagggaattatctcatcgagcctaccataggcaaatcggtagggaaaccacggcccttccgccgtgaggcccttagagcaatcgaacctaccataggcgaatcgctaaccatccaagcgatttggagcaatgtattttgtttgggggggatatttttggatgcgggggtaggatttgaacctacgaccttcaggttatgagcctgacgagctaccgggctgctccaccccgcgttggtgggtggtttttatgggggtgggtgagcgaggggacctggcggcga

SEQ ID NO: 1507 - DNA, 14905 bp, synthetic construct
  misc_feature 1..14905: note = Synthetic
  source 1..14905: mol_type = other DNA
tcttcgaacgagttgatgacgaagtaggtttgctgaaaatcgtcgatccggtagtcggttcgcatgacgcgctccatatcgaagccgacccggttgggcgacggatcctccaggcagaagatcgactccgcactggaggagacgatccctgctccgtagatccggaggccctcgtcgctacggatcagcccgaattcgaccgtgtaccaatagagccgcgccaggttgaccagcgagccaagtcccgccgcccgctgtccgccctttccatacgcctggagatagtcggcaaagaccgggtttgcgagcaagggaacatgaccgaacacgtcatgaaacacgtctggttcctggagatacccttcctggccggccgaccgaatgaaacgaccggagacaaagcggcggttggcaagatgatcaaagaaaaccttgtcgggaaccagacccggcgcggccaccacctgccagccggtcgccttcatcaggcgtcgggacagatcctcaaaatctggaatgccgggtgtatccaggcgcaggatgtccagaccttcgatgaattccggcacagcccggccgggcaggaggcgcgactgatgctcgaacagcttgtcccacattgcgtgatctgcagcagtgtaggactcccaatcctgcgagatcgtccagtccggttttgccccctcgggaaggtccagactctggttcatcgctgcctccctccctctgagaccggtcgggaagcgggatgggccgaacgcccgacccgataaaccccgccccccgcggccctcacttcagggccgaaggcgaggtgttggcgatgacgtgcgatgaacctcgcgaaggtcatgaacccgccggcgatccaccttgcgatcccagtccgtgcggcgttctcgccgcctttcatgtcgcgtccgagtggggtcaggacgcgccggatgttcagcgggagaatggaagtcttctgccaggcggcccggccccgcaacaaggcgtggcggacggatgacgccctctcctccctcttgcgcagatcgtgcgggaggggtcgggatccgacacccctgaggttgaggacactgcggagccgccaggctgcgccagagcgccagcattcgcacaacccgatcatggcgcttcgcccgcgacccttccgcagcaaggcccgaagccgatcgagcggtaaccgggggccgaagccgtccccttcagttggacttcgtcaccgtcctccaggaatgtccgaagctcgccggtcggcagggtcaatggagtccgcccggcctcggacagttcggccagactgccgaaggcgcctttctccgcgccggagatcgtgcctgtgccgagcagatcacccgggttcaggttacatccattggcggtgtgatgggcgaccaactgggcgatcgtccaatacaggttcgttgcaggaccgtagctgagtcgaaccggagccattccggctttccgcatcctggcggactgcagaagcacctccagatcgatcgccagagcgccctctgcctgatccgcttcgtccaacaggtagggcagcggcggcgggtcgccttcaggacgcggcggctgcgcccgtctgaagggcgccagggcttccagggtcacgacccaaggggacaccgtggtcaggaagctcttcgccagaaaggggcctagcggctgatactcccaggcttgaatatcacgggccgaccagtcgttgagcaggccgaggccgccgatgcggtctcctgcgcaggcgatcggcgtcgtttcgccaatcgcattgcttcccgcgacccaaaccgccagttcgagttcgtagtccaaccgctgggccggaccgtaatccggcgacggggcgtctgcgctcttgcgctggcccttttgcctgaagaccggggcgcccgacgcttggacggatgaagctcttccgtgataaccaatcggcacgtacttgtagttcggcaggagcggactctcgggacggaactgcttgccgatattggcggcgtggtgaatgccggcgtagaagtcggtgtagtcgccgatgacaaacggcaaccgtaatcgacaatccgctgcctccaggagatgcctctcaaaggtcgtcctgccggctggcgaggtcaaaccttcaaagagcgcccagcgcatctcccgccgggcgtcggcgggaagggcgaaaagcagattgagcgtgggcgcagccatagccggggcaagcgcggctggaagaacaccctcagccgaaagggcggaaaggtcgaggatgaagggcccgatcgccgttccgatgcgcggcgccccgtccgccagagcaaaaaccccaagcggaagattttgcaccggaaaatcgggatgcgcgtctgcgcccggaatccagcaggacgccgccgggtcatgcgtgtgatctatgctgatcaccccgggggttcctcgtgaagccaggcggcctgacggggcgcgcgcttggtcagggcccactcctcgagcattaccggcgccagggcgcgcagctccgcatgttgtgcgggcttgccgatgttacaggccagctcaaggcgatggccgttgggatcaaagaaatagatcgacttgaatatgccgtgataggtcgggccaagcacatctatcccctgcccttcgatgtgcgcctttgcggcgaccagggcgtccagatcctcaacctcgaaggcgatgtgctggacccaggccggggtgttcgggtcgcgccccatttccggctgttgcggcaactcgaagaaggcgagcacattgcccccgccgcagtcgaggaagacatgcatataggggtcttcttcgccggtggacggcaccttgtcctcggcgaaggcggtggtgaaatccatgcccagcacgcggtggtaccattcgacggtttccctggcgtcccggcagcggtaggcgacgtgatgaatgcgcttcaggcggggtgcggtcaccgcgcgagctcccgggtttccagcgcgccgcgccgcagctggtcgcgctccatgctttcgaaaagcgccgtgaagttcccctcgccgaaaccttcatccttcttccgctggatgaactcgaaaaacaccgggccgaccatcgtctccgaaaagatctgcagcagcagtctcggatcgccggactgcgtcgagccgtcgagcagaatcccgcgcctctgcaattcctcgaccggctcgccatgccccgggaggcgctccgccagcatctcgtaataggtcgctggcggcggcgtcatgaacggcgtccccagcgccttcagcctgtcccagcagctgagaagatcgtcgcaaaggaaggcgatatgctgaatgccctccccgttgtaggcgcgcaggaactcttcgatctgaccaccgcccgcctttccctcctcgttgagcggaatgcggatcttgccgtcaggcgccgtcatcgcccggcttgtcaggcccgtatactcgcccttgatgtcgaaatagcggatctcgcggaagccgaaaacgcgctcatagaacccgccccagtgcgccatacggccgccgtaaacgttgtgcgtcaggtggtcgatggtgtggaagcccgcccctaccggatgacgatcgacgcccggcagatagacgaagtcgatatcgtagatggagaggtcgccttgctcctggccctcgtaccgatcgatcagatagatgatggagccgccaatcccgcggatcgcagggaggcgaagctccatgacccccgtgcggctttcgaccggctcggccccccgtgcgagggcgagttcataggccttgttggcgtcccggacgcgccagcccatgccgcagcaggagacgccgtgctccgcggagaaataggcggccgcgcttcgcggctcataattggcgatcaggttgatgccgccctggcgccacagctggacgtccttggatcggtggcgggcgatcagggtgaatcccatgcattcgaacacgggttccaggacgccctttttcggagcgctgaattcgatgaactcgaagccatccaggcccagcgggttgtcaaacaagtcggccatcgggtgcgtcaccctttgcaggttgctcaggcccccagtctagcgcaacttgggtggtggtcagcatcctttgaatgaccgcaacggacagaggcgagggctagacgccgatggcctgcctgatcgtagcggcgccggcctccaaagatcgacgatctcaagcgacgcgcccgaactgcaaagcctaacgtgcgccgatgcgcacaaggacagctctgggaatggccaggtcggcgaccacctggcgctggtccttcagcccacacgcctcccgctgaatgaaaaagctccagacggcgtcggcggcctgacgcaggaggacctcccgaccgatctccgcaagcgcctcgggatccttcagcctggcaagggccgcctcgacgcgcgcgccggcccggccgagggccgccgcggcctccgacatcatttcggcttccagcacgctgaggccggtgtcgcggccggggacggagacctgtccaaggcggggaggacgcaggctcatggcgcggctccggggaggggtgggtcttcagttacagcaatttaagtggcgccgcacgtttcgggggcccataggccgctcatggcctcaccccctcttcgacgtcttctttgcagagccgtcgtcctgtccgccctcgccgccctcggcggagcgccagtggcgcaggccctgtccttcatgcctgcaaaggacatcccccgcgccgtcagcttcggcggggcctgcgtcggctgcgacctgtccgggcggcagcttccaggcgcccggttcctgggggccgacttctccgggtcgtcgctgatcggcgccaatctccgcaaggtgcacttcaccggggccgacttcagcgggtccgacctcacccgcagcgacctcacaggcgccgccatcaccggggctgacttcgatgaggcccgtctgaaagacgcacgcctggacggcgccctcatccgcagcgccagcttcaaaggcgcggacttcgacggagccagtctcaaggacgccgccttcgccggcgtcgatctcagcaacgcgcgcaacctccgacaagagcagctggacaccgcctgttcggtcgggaccgtacgcctgccccggggcctgaccttgcgcccctgcccgcaggactagccccgcgttccgggggatcgacgccgcccatgaagggggccggccggtaaaccttgccggccggggcgtggcggtcgcagcaagttcagcaagacttgccggaccccggctgatatctcgtcgaggaaccccggccagagatcagaattcgggatgaggaaatgctgcttaagggtttgaaagtcgtcgaattcgcctcctatatcgcagcgccgggcgccgccggcgtcctcggcgactggggggcggacgtcatcaaggtcgaacgtcctgaaggcgaccccatgcgtcacgttttcgccgacaccaagaacgccgtcgccggaaacccgaccttcgccgtcgacaaccgcggcaagcgcgccattgtcctggacatctcacgtcccgaaggccgggacgccctcgcccgtctggcggccacggcagatgtgttcctgaccaatgtccgtcccgccgccctgaagcgcgccggcctcgatgaggcggccctgcgccgggacaacccccgtctggtctacgccatggtcaccggctatggcctcgaaggccccgacgcccacctgcccggctttgacgtcaccgccttctgggcccgctccggtgtcgctcggatgcatgcccccaagggaacggaccccttcatcctgcgcaccggcgtcggtgatcacaccacctcaatggccactgtttccgccattctggcggccctctatgagcgcgagcagaccggccggggccggctggtgcagacctcgcttctggccaccggggtctacaccgtctcgtccgacatggcggtgcaacttgctttcgggcgtctggcctccaaccggccgcgcacggatcccttcgatcccctcgccaacttctatcgcagttccgacgaccactggttcgtgctcaacccccgtgggggtggcgcagactggaaggcgctcacccgcgcctgcggtcgccccgacctcgccgatgatgagcggttcgccaacggccgctcccggcgcatgaacagcgcggccctggtccgggagcttgaggctgccttcgctgcgttcgattttcaggaggtgcgggcccggctggacggcgaggacctcgtctgggcgccggtccagacccccgccgaggtcgtagcggacccgcaggtggccgccgcaggcggctgggtcgaggtcgaggatggcgcgggaggtcacttccggtccccggcggcgcccgcccggttccccggggccgaccagccggtccgcccgccaccgccgggactgggccagcacacccgcgaagtcctctccgagctgggatactccgaaaacgagatcgaggccctctacgccagcggcgccgccgcctgaggcgccgctctagccgaggaggggctcatcccccctgcgaccggcggcggagtccctccccgcagacgcctcggacaggattctcagcatctctgtcgagaacatcgagccgcccagccgcgccccgggggtcgaaccttctccgccgcggtctccgccgagaatgagggacatcagcacctcctgctcgcgctggatatcctgggaccggctgttgcctgcgtactggatgaagccggacggctcgggcgcgggaggcgggctcgccggcgcggagccgcccgtccggctgaggttggcgtagagctcctgcacggtggccgcacgcccttccttgtagaagatggtcggattggcccgcgccgcttccggaaagagagccgcggccggcgccgcgccccgcttctcaagggcctcgatgaggcgggcggatcccataaatccgaggaaatgcgccatgtagagctcccccagggtcggttcgcgaccgatccggcccctcaggtaggcggcgttctgggaggtgaattcggccgccatgaccgaggcggcgttggggtcgaaccgcaggtccagtatggcctgccgcaccccgcccggcgccgtatagcgaccgtctgggttccggcggatctggtctgcgtaggctccatagccgtgccggtcgccgaactgcttcaaggtggccagccaggtctgctccgtgaactggaacaagccggcggcggaggaggtcgaggcccgggcggaggggttaaagctgctctcccgctgggcggtcttcatcagatagccatagtccaccccggtcgcagcgctcgcacgctggatcacggactgtacggcggacctgattccactgatcgacatggccccagcctgtctgggtatggtaaacgaacgcttaaccatacccgtttagacgggttactgaaacgtaaatatcagtagctcttggggaggtccagaacctgttcggcgatgaagttgcagatcatctcgcggctgacgggggcgatcctggcgatcatcgcctcccggaaatatcgctcgacgtgatactccctggcgtagcccatgccgccatgggtcaggaccgccgcctcgcacgcggcgaaacccgcctccccgcccaggtacttggccgcgttcgcctccgcgccgcagggctttccggcatcgaacagggcggcggcgcggaaggccatgaggctcgccgcctccagacccatccaggcccgcgccagcggatgggcgaccccctggttctgaccgatgggccggccgaacacccgccgctcccgcgcatagtccgccgcccgcgccagcgctgcgcgccccaggcccacggcttccaccccgatcaggacgcgctcgggattgaggccggcgagcaggtaggcgaagcccttgccctcttcccccaccaggtcttccgccgggacctccaggttgtcgatgaagacgctgttcgactcgatcgcctttcggcccatcttggggatcaccgtagccgtgatccggctgcggtcgaagtccgtgtagaacaggctcagcccctcggtcggtcgcttgacctcctcccgcggggtcgtccgggcgatgatcaggatcttgttcgccctctgcgccatggtcgtccagaccttgcgcccgttgatcacccagccgttcccgcgccgctcggcccgggtggtgaggctggccgtgtcgaggccggagtccggttccgtcacggcgaagcacatccggtcgcgaccgtcgatcagccgcgggatcgcacgggccttctgctcctcggcgccgaacttcacgatcggcatgggcccgaaaatgttcaggtgcaccgcgctggcgcctgagaaacccgccccggactccgccaccgtctgcatgatcagggcggcctcggtcaggcccaggccggccccgcccagcgcttccggcatggccgcgcccagccagccgcccgccgccatggccgcgacgaaggcttccgggaactcgccggtctcgtcgacctggcgccagtagtcggcgtcaaagtcctcgcagagccgccgcacgccctcgcgcaactccagctgagcctccgtgaagtcgaacccgctcatgccagaacctcccccgcccccggagcgaaccgcgagggatcaagtcgcggggcccagcgcccgccatcctctccggtgaccgccgcggtgacaatcttcgcgacgaggggggccagcaaccagccgttgcggcgagccccggcggccaggaagacgccgggccggcgggaggcgcccgccaggggcaggccatccgggctcgctgcgcgaacgccgacccgcgtgacccagtcgcccgtcggcatctcgggaaaggcgtccgacaaagccgccctgaggccggcctgggcctgcgggtccgacctcaggtccgtccgccccgcctccatggtcgctcctgccagcagcccgccccctgagcccaggaggtaggcgcccggcgcccggatcacgcggctcggcggcctttggtccgcccgccagaggatctgccccttgatgggcgacaggagggccagctccggcgccagggccgccagccgccggtccgcgcccgtggccagaaccactgggcccggagggtccgcaagatcccgcgccgccagggcgccggtctccaccgcgccacccaggtccctcagccgcgccgccatcgccaccagcgcctcctggggttcgatccgccagtcctccgacgtgacaagggcgcgccggaaccgcggcgccaggcccggtgtccaggcttccatctccgcccgaccggcctcccgggtctcaagccccagatgggcgaaccgcgcctgaaggtcgccaagccagtcgtccgggccgaccgccgcagcgcccgagcgatcgagggcgacgcccagccgcccggccaggtccggccagaggtcgcgaccggcggcaagcaggcccagactgtccggtgacggggggtcaagaacgcactcgaaggccggcgccagcatccctgccgccaccccggaggcggtgagccccgaggcggtctcggccaccagccgcaccttcagccccgcctcggccagggcgagccccgtcgccagaccgaacaccccggccccgaccacgatcacggaagctgcgcccgacccgcccatgccctcaggcgccggattccggcggagaaatcaagggcgggggggcgccgggaaggtttcgcgcgacagaagcggtcgtgtgagactcgcgacccgcagggcgccgctggcgcaagcgcgttgcttgacgctaacctgaatcacaagacccccaccggtttcccggtgagggtccagagaacagagaaacctctgtatcagtgcttcttttgggaatttccccgcgaggggatgatccttcacagtgaagctctgttaccgtggcttccctaccgatttgccgtcttcaggatcagagatcagggacgtcaggtcaagggtgttttggtgaagagcaggagtggcccatgagcggtctggtattcggcatcgaccttggcatcgcctcctgcggctgggcggtcctgcgacttcccgctggcgaagaccagcccggcgagatcgtcggcatgggcagctggatgttcgacgtcccggaaacggcggagaagcggacgcccaccaaccaggtccgccgatccaaccgcctccttcggcgggtcatccgacgccgcgcccagcgcatgagcggagtccgtcgcctcttccgtgacagcgggctcatcaccgaagcccgggctgacgccctggccttcgccaacctcaatccctgggaactccgggtccaggccctggagcgcaggctgaccgaagaggaactggccgtcgccctcggccacgtcgccaagcgtcggggcttcaagtcgtcggcaaagggcaagtcggccaacacagccggtgacgaccagaagatgctcaaggccctcgaagccacccaggaacggctcgcccgctaccggacgatcggcgaactctttgtgcgcgacccgggtttcgccggcagaaggcgcaatcgcgacggcatctttgatcgcacccagagccgcgatgaccttgtccatgaggtcgccgagatcttccgggcgcagcgccgtttcggtaattccgcggccagcaacgaccttgaggcggccttcacggagatcgccttcacacagaggcccctgcaggatgccgaaaacctggtcggcatgtgcctgttcgagcccgcagagaagcgcgcttcgcgcttcgctccttctttcgagcgcttccggctcctgacgcgcctcgtgaacctccggatcgtctccgcgacgggcgagcgccccctcacccctgccgaactggcggctgtactggccaactcgggcaagaccgccaagctctcggtcaaggaggtgcgcaagcgtatcggccttcccgccgaccagaggttcagcgccttccgcctggacgaagaggaccgcgacgtcgctgtccgcaccggggaggccatggccgggacccgtaagctccgcgaagccctgggcgagacgctgtgggaagccctgctgacgaccccgcaccttctggatgaggtggcgagggtcctcaccttcttcgagacccaggaagtcatccggcgcgagctggggcggctctcccttccggacggcgccgtggaggccctggtcctcggtctggaggccggggccttcgcgaagttcaagggcgcagccggcatctccgccaaggccgcccgggccctgattcctcacctggaggcgggcctgcgctacgaccaggcctgcgagcaggccggttacgaccatgcggccagcaagtgggccgggcgcgagcaggtgaccgacagggcggccttcaaccgcctggtcgccgacctcgccgccgacgtcgccaacccggtggcgcgcaagtccatgaccgagggactgaaacaggcctgggccatgcggaaccgctggggcctgcccgacgccatccacatcgagatggcccgggatgtcggcaacagcgccgaaaagcggcgcgagatcgagcgcgacatcgagaagaacaccgcctcgcgggagcgtgagaggcaggaggcccgcgagttgctcgggatcaccgacatcacgggcgacaccctcctccgctaccgtctctggaaggaacagggaggcttctgcccctacaccgaccaggccatcccgcccgcggcaatcaacgccaacgacaacagtcatcaggtggaccatatccttccctggtcccgctttggcgatgacagcttcgccaacaaggtcctctgcacagcctccgcgaaccagcagaaaaagggacgcaccccctatgaatggttccaggcctcaaagagcgatgaggagtggctagtcttcgtggcgcggatcgaaggcaacgccgccttccggggcgccaagaagcgcaactatgtcctgaagaacgcgaaggaagcggaggagcggttccgctcacgcaacctcaacgacacccgctatgccgcccgcctcctcgccgaggcgatcaaggccttctatcctccgggagagcggcaggaccggggaggcatccgccgggtcttcacccgcccaggcgccctgacggcggcgcttcgccaggcctggggcgtggagtccctcaagaaggtcgatggaaagcgcgtggacgacgcccggcaccacgccctcgacgcccttgtcgtcgccgctgttggcgaagcggaggtccagcgcctgacccggtccttccaggaatgggagcagcgcggcctcgcccgtcccctgcggcaagtgcggccgccctggggcgacccagccagcttccgtcgcgaggtcgaagacgcttaccgcgacatcttcgtcgcccggccggagcgacgccgggcgcgtggcgagggccacgccgccaccatccgccaggtccggcatcgcgatggcgccgccgtcgtctatgagcgcaaggccatcgccgacctcaaggagaaccggctggaggacatcaaggacgcggaacggaacgagggggtgatcacggccatccgcgcctggatcgcccggggccgtccggtggacgacccgccggtcgggccctccggccaggtgatccgcaaggtccgcctgcgcaccaagatcaaaccggccgtggaggttcgcggcggcgcggccgacaggggcgaaatggtcagggtcgatgtcttttcccggcccaaccggaaggggaaggacgagttctacctggtccccgtctacccgcaccaggtgatgaacccccgccaatggccgacgccgccggatcgggcggtcgtcgcctacaaggacgaggaagactgggtccggatcgacgatgcctacgcgtttcaattcagcctgtacccacgcagtctagtccaggtcgtcaaaggcagtggtgagattcttaacggctacttccaggggcttaatcggtccaccggcgcaatcaacctggcaaaccacagggacacccggtcactgatggacgacccgggaaactccacccaaggcatcggggcgaagacgctggtcagcctggagaagctttcggttgaccgtttcggcgggcgcgcccgcatcaggtcggaggtccggacatggcatggcgtggcctgcacatctccagccccgcccgtctgagcctggtccaggcccaggtttgggtcgagcccgaggggaccggcgaacccgtcgcctttcccctggaggacctcgcctggatcatcctcgatacgccccaggtcagcctctccggcgccctcctgggcgccctggcccaggacggcgtggccctggtcgtcccggacgcccggcatcatccggcgggcctgctcctgtcctttcatcagcaccacgcccaggcgggtgtcgcccacgcccaggtcgacatgacccagcccctgcgaaagcgcctttggcaaaggctggtccggaccaagatcgagaaccaggccgcagtcctgcgggccgtgggaagttcctacgccaacaccctctcggccatggccgcccgggtgggctcgggtgaccccaccaatgtcgaggcccaggccgcccgggcctactggcgacgcctcttcgaggacttccgcaggggtgacgaagaccgtcgcaacggcctcctcaactatggttacgcagtggtccgggccgccctggcccgggcctgcgccgcctcgggcctgttgcccgccttcggcatccaccaccagtcgcgcaccaatcccttcaacctggtcgatgacctgctggagcccttccgccccctcgtggacctccgggcccacacccgccaggcggggacgcccggcgaggaggttgaccttgaagaccggcggcacatggccgcagttctccaggatacgctctcgctgggcgacgagcagctgaccgtgttggcggcgaccgaggccatggccgcgagcctggtccgcgccatcgacggcgcagacgccgccctcctggcggcgcccgccctgcccctcgcccggagacccggacatgcaggccgatgaggtacgcttcgtgtggctgatggtctttttcgacctgccggtgcgcacggcgccccagcgcaagctggccagcaggttccgcatcttcctgaagcgggacggctacatcatgctgcaactgtcggtctacgcccgcctctgccggggccaggacgccgtcgacaagcacctgcgccgggtacgctccgccctgccccgggagggcagcgttcgcaccctccaggtcacggacaggcagtacgaaagaatggaactcctgctcgggaccgggccgaaaatcgaatcactgggccccgcccagatggttctgctgtgatttcggcggcggcgaagccgcgaaaatcacagcagttccaatccgttagcctggagcggtcctaccactggcaaatcggtagggaaaccacggccaccaaaacgccctcaaagccatgtcctatgtcctaccactggcaaatcggtagggaaaccacggcctcaatcgctgcacgttcgatctcctgttcgtcctaccactggcaaatcggtagggaaaccacggcccggaacaggtgagcgaggcgctggcggacgtcctaccactggcaaatcggtagggaaaccacggctattattgcgacgacatggggagcgaggtcgtcctaccactggcaaatcggtagggaaaccacggcagctccttgatctccgccgaggcctgaacggtcctaccactggcaaatcggtagggaaaccacggctctacgaccgcacggcggacttcgccggcggtcct

SEQ ID NO: 1508 - DNA, 14646 bp, synthetic construct
  source 1..14646: mol_type = other DNA
  misc_feature 1..14646: note = Synthetic
ggcgtaccctcccctgccgagggagcagcctccagcggggcagcatcaccaaaaaagcctgcaccaccttcttccgggggaaggggcaaagcatcatcatccgtcacggctgttctggcctcccacagctctcatgttctggaaaagaccacgcggagggcatttctctaagcctgcagactttgtacctccaaagcctaacaggtggaagaccggacacccgacccgatacgatctcactacggctgctcccttccgggcctgaccgggttcgcaagtcaaccgcccagggccgatctcccacgcggcttctagcatgaaaggtgggggggatggcaagccctttacggagcgacagccccaccaccgggatggcgcgggtccgccaccccgtaaaacggcccgaccgccttagcagaaggctgcatacccaaacgtggcccacccaccagaattgcctctgtaatcccccatgggcgatgcgcgatgaaatgataccccatatgctccaacgtcttttgcacctcggggctaagcgcgccgctctccatctccacactatctggcttccattgctcatgcaggcgtgggagatcaaccgcttgggccaaatccaacccgtaatccaccacccccaataagcttgaaagcacaatggtcggaatacgcgacccgccggggctaccagtgaccataaccaccttgccctcacggctaataatcgtaggcgacatggaggaaagaggcgtcttacccggggcaatcgcattagccgcagacccaacaaggccaaacatattcggctcaccaggcttgatggaaaaatcatccatctcatcattcatccaaatgccggtccgcccgcccataacgccagccccaaaccaaccattgagcgtataggttgtggagaccgccataccttgggcatcaatagtggagaaatgcgttgtctcatgcttctcctccgctggctccaccccagcatgggccacatggctagggccgggctgaccgacaaacaaagcatcggatgaaatagcatgatgcgctggtaaagctgcgcgaatctgtgccgcataggcggggtctgttaaataagagaccggattttgcacaaaagcggggtcgccaaggtcacgcctgtcagaataagcatggcgcatcgcctcaatctcgtaacgcacagcttgcgcgctatgtaaccccaactgggtcatattatagccagagaggatgttcagaatctcacatagcgcaacaccacccccacttgggggcggggcagtctcaatctgatagccccgataagcacaccgtatgggctccataaaacgcggcttataggcgtggaagtccgcctctgtaagcaagccaccccctaagcgagccacacgcaaaatctccgccgcaatcggtccgtgataaaatgcgcggtcaccttgttgagcaattaacgctaaagagcgcgctaaaccgggctggataagccggtcccctacagcaagctctgacccatcagggcgaaggaaaatactgcgcgcatactcatcttggcggaaataatctgtcgatgtatgcaaaagctccacatcgccttcctccagcacaaagccatctcgtgcgagagcaatggctggggccatatcctgcgcacggcttaaccgcccccagcgtttacgcacagcctccaacccggcaaccgtccccggtaccgccacagcttgccaaccaatggtagagaggcccggcttcacatgccctgcagcatctacatacatatcaggctgtgcccgcaaaggggcatgttcgcggaagtcgataaacacagctgggccatgcgaggggcgaagggtcataaacccacccccacccagatttcccgctgcgggataaacgacggctaacgcataaccaacagccaccgccgcatctgctgcattaccgccttcacgcaaaatacgcgctcctgcctctgaggctaaatgctgagcggagaccaccatcccccgctcccctctaaccaaaaggccggggcgggctgtatctggcccataagcaagggggtcatggtcggcactaagcggctctgcttggcaaaaaggcaccatgccaacgcacaatgccccgataaccagccgcattgctctcttacgccacgccatcataccccctctacccccttaaacagcgtaaggcggctttgtgtaaccacgcggtgagagagtaaaaatctcgtacccatcttctgtcacaccaagctgatgctcaaattgagcggataaagagcgatcccgcgtcacagctgtccattcatcagcgaggactttcacatccggcttaccgagattcaacataggctcaatggtgaagaccatacctgcctccaaaaccgtgccctgaccgggccgcccgtaatggagaacactcggggcttcatggaaactacgcccaatgccatgcccacaaaaatcccgcacgacaccaaggcgatgcttctccgcaaagctttgaatggcataaccaatatcccccagcgttgcaccggggcggacctgctctatccccagcataagggcttgataggtcaagtcgatcaatttctctgctttgcgcgggggcttgcccaccacatacatgcgcgatgtatcaccataccacccgtttaagatggaagtgacatcaatattaagtacatcaccttcctgcaaacgccgctcaccagggatgccatgacagacaacatggttcagcgaaatacagcatgacttaggaaagccatgataattcaaaggagccggtgtggccccatgagctaacgtataatcatggatgattttatccaactcacccgttgtaataccggggcggacatgctcggtaatcatatccagcgttgccgcggctaactgccccgccgctttgaggtgcttaaaatcctctgccgtataatgctggatattacgcccatcttgagaagccataccgtttgatagtccttatacttacttaaaaagccccttacccatgcacccctctggcaatcatcctcatcaccacgagattaggagcgatgatgcccacgatgggaggcccacgcatgatgcaacccgcgcgaggctgcatgagcatgataacttactaacataacatcacgatgcaaatgccgaccgcgcacagcacgatgctccccacgccatgccacagcataagcccccggcttctggaggagaggcaacggcgtctgacccgctttggagaagccatcattcaacaaagaaatcatcgtctcattacggctagtattgctagaagcccccatctcaacagcgattaagcgcgtctccccttgttgggcggagcttacaagattatggccagcaagatcggtatagcctgtcttgaagccatccgccccctgatacacacccaaaagcgggtcatgatttggaatcatatgacggcggaaagcaaattgccgcacaccgaaataatgataatattgcggataatcccgcaacagagagcgagcaagcacgcctaaatcccgtgctgtcgtcacttgatcagggtctggcaaaccagacgcattgcggaaggtcgtatgggccatccccaaacgacgcgcttggaaggtcatatgcgccgcaaagcgtgtttcatccccactaccaagatactcgcccagcacacaagcggcatcattagcggactttgtcaccaaagcgagaatcgcttgctccactgtaagatgcgtacccggccttagccctaatttggaaggtgcttgtacagaggcatggatggagacaggcatctcatcatccaacgtaatggtcccacgctccaacgcttggaaggtgagatataatgtcatcatttttgtaagagatgcgggataacgctgaagatccgcatcttcctccgaaagcacagctcctgtccgcgcatttaggacaatggaagacacatggcctgcaaactgcgctcgcgctgtaccagcgaacgttaccaagcccacagcaaacgataacaaagtacggcgaaagagcgagtgcatcaggacaaattatccttacagaaacagggcaggagacgcagaataaggcattttttagaaccttcttttgtagcctgtctagctaatttccacacagatgttcaacatttaaagattctttaatcattgaccagcacttcatcacatctatgttacgttcttataaaggatctcccctctctctccgctaaaagacctagcaaacagccccttgtgacgaatcgcgccaatgcaatgcagctgtgctgtacgctatcatcccataggattcttactttttcctgctaaagtaatagccagccctcgcgaattattaggagacaccccatgcagcgcaggccctacggagcaacatcgcaccctcctatagacgatgccaacccagacgtgcctgtttgtgcagtgcaagaagatgcacttaccaaccaaaaaacagaacttacttatccctctatgtataaagttctgctccttaacgatgattatacaccaatggacttcgttatatttatcttagagcgttattttgccaaatcacctgatgaagcccgccatattatgctggaggttcataatcgtggtagtggggtttgtggcatcttcacctatgagattgctgaaaccaaaatcgggcaagtcatggacctagcccagcaaaaccaacatcctctgcaatgcacccttgagaaagcgtaaacgcattgccacctctaattgcggttgatgttcgataactttctgtcccgcaattcatcattctgacatggatatgtgtcacaaggagcgcattatgttgtcaaccacactcgaacagacgcttcagcgcgccctcatcattgccgggcagaaccagcatgaattcatcacgctggaacatctcctcctcgctctttgtgatgatcctgatgcagaaataatcttcttagcatgtcagacagacatcacccatctccgccaggcgttagagcgattcctccttagtgaacaacgcgctgttattcgccccgacctagaggacgccccccaaccgacaacagcatttcagcgtgtgattcaacgcgcagcggtttatatccaaagttcaggctaccccaccatgacaggcggacatatcttaatcgctatgtttgcggagaaagaaagccatgccatcttcttcctccaacagcaaggtcttacccggctggacgctattcgtgccctccaacaagagaaccaagcctcatcacaacacgaggagcatcaccacaaaaaggcacggcactcacgcaaaaacaccgccgcctctgctgaaaacggcacagaaggggacaccaaagaagccctgcgcacatattgcactaacctcaatgagcgcgcctaccataataaaatcgaccctcttattgggcgtgaggaggaggttaatcgcgtcatccaaatcctctgccgccgtaccaagaataaccccctcctggttggggatccgggtgtaggtaaaacggctattgccgagggtttggctcaaaaaatcatacgcggacaagtacccgccatcctcgccgaagcacgcctctatagcctagacctcggagccttactcgctgggacacgctatcgcggtgattttgaagaacgcctcaaagctatcattaatgagctagaggaaaatcctaataatctgctctttattgatgaaatccacatgcttgttggggcgggagctaccacaaatggctctatggatgcgtctaatctactcaaacccgctttagcagcagggaaattgcattgcattggctccaccacttaccaagaatatcgccagcattttgagaaagaccacgccttaacccggcgtttccaaaagattgatgttgccgagccttctcaagccgatacaatccgcatcctccgtggattaaaggaccgttatgaggaccatcacgatatccgctttaccgaccccgccattcgcagtgctgtaacactctctgcgcggtacattcacgaccgtaagctccccgacaaagccattgatgtccttgatgaagccggggcggcctgccgcctgcttcccaatagccgcaaacgccgtacaatcggagtgaaggatattgaggctacgattgcccgtattgcccatatccctccccgtcatctctccactgatgatcgtaccgtcttgcgccatttaccagaggagctacgccgtgccgtttatgggcaagagcctgctctggaggctctctcctcagcggtcatgctgtctcgtgcaggcttgcgcgatacggaaaaaaccatcggcagctatcttttctccggcccgacaggggtcggcaaaacagaagccgcacggcaattagcaaaatcgctcgatattaagctgattcgctttgatatgtcggaatatatggaggcacactccatttcccggctaattggtaccccacccggttatgtcggctttgaacaaggcgggcttttaacaagtgccatcgaccaaaacccccatgctgtcttactgcttgatgaaattgagaaggcccatccagacctctttaaccttctcttgcaggtcatggaccatgggaaattaaccgacaacacgggcaaaacggtcgatttccgtaatgttatcctcatcatgaccagtaatgccggggcgagtgacctctccaaagaggctatcggctttgcccgcacagcgcgtacaggcgatgatgaagacgctataaaacgactcttctcgccagagttccgcaaccgcttagatgccatcatcccctttgcaccgctcagcccggatgttgtcacccatgtagtagagaagtttgttcagcagcttagcaacctattagcggctaaaaatattaccctccaactcaccccagcagcaaaggcgtggcttgttgagcatggatatgaccgtacaaatggggctcgcccacttagccgcttaatacaagagaaaatcaaaaaacctctatcggaagaaatcctctttggcaccttagccaatggcgggagtgtcaaaatcggtgcgcgtgagggagagcttaccttcaccctttctgccgccacatcatctacacctcctactaacgccccaacaaaaggccaatcagccaaaggcactccaacaaaaaccctcaccccggcttaggctctaaaagcctgccggggcacgggaaagcgttattggtaacgctggccatttacacttacaaaccccggccatggccactggcggcttgtgccatggtgggtccagtccaacccttgccgactgggcccatcataataataccgcccttgaacctcgacatgatcccccactttcacccatggccatgcaggggcgcgcatttcatcaagatttgagacgatgcgcaaaggagtcccccccgctacagacatcagaaaataaccatgctgcccgctgcggctttggcgcgctcgataaacatgcacgaccgtcccacaaatatgctctggcatgtccaaatgctgcccgtaaggaatctgcttatgggcaaattgctgattataatgggcctgatcctgcacaaaacgctgattatcacattgcgcgggcatcgtagcctctatcgccgtctcagctcttgcagggactaaccccaccccactggccaaaagccccaataagcccgctcgtaccatcattgaccatgaaaagcgcatcatctctcctttcctcccctctttccccatcgccatagcaggagtatcgtaagggagatttcatcattacggggactttcccgttacgataaccataaaggctagctgactataacgccatcacgcaccttgctgataagagggagaagaccatgcctttgcaccatttaaagacccttcgtacacggctacaaaagaaccagcccgcctcacaaggtacgcctgttaccttcgcaggggcttgccctacttttgaggtcatcgcgctgggggttcgtagtggcgttgctgatggcaacctttcatcctacctcatccgccctcttgggacgaatgaggccgtgttatgtgatgctggtacgctcgggaacgggctaaaacgggccgaggcaaaaggggtactaaatgacatccccatcatgcccaactctgccctcagccgggctggccatgtcctgaagcaaacagtgcgggcttatctcatcagccatagccatttagaccatgtcgccgggttagtcttcacctcaccagaagatacggcaaagccgctttatgcgctctcccaaacaaacgcgattttagcggagcatctttttaataatcgcgtatggggagccatgggcgataaagggccagaaccccgcattgggaaatatagttaccataatatggagccggggcaggcacaaattgtacaaggaacaggcctaaccatcacagcatggccccttagccatgccagcacaacatccacagccttcctcatccagcatgaagggcaggcaattctctatctcggcgatacacaagccgaccaagctgatggcccgcgtaacctccataaattatgggaggctatcgcccccttagtgcagaacaacacactcaacaccatcattatgggcgcaacctatcccgatagtcagcctgatgatgcactttgtggccaattacgccctaaagacctcctcacatcactgcgtgagttaggccatatttgcggcggccgccatcatatccgtgggttgcgtgtcatcatcacccatgtgaaagaaaccttccacgatggggaatgccccacgcagcagatttatcgcgacctccaagaaggtaacgatattgggattcacttccttatggcagaacaaagcgcgcgttatcttgtctaacaacaaagcgcgtaccattcttataaaaagacgagccttcctcaccactataggtgtaggaggcttggggctatgccagacagcatctgccaaacaaaggcatcgtcacgctcagccccaccaccatattcccccctcagatgcgccaccccttacagccctctcggaagcaacccgccaacaaattagccaattaattgctattgccccccatcgctcccgccaagagcgcatcgtcctgatgtcccaatttatgaaagggacgccctatctcgcccagccactcattggctcagccaccacgcaggaagagctcatcctctcatggcgaggggtgaattgcatgacctttgtggaaatcatcctcgccgctagccgcagcttcacagtggagcaattcatccatgctctcatcgctacgcgctaccgtcatcatcatgttacctttaccgaacgccggcatttttatagtgattggctatatggcacgcctattctgtgtcgcgacctcagcccgcattttccctatgcccagcatatctccaagacactcaacctcaagctcccacctacttctcctgccaatacggcaccagaagaccgttacctaccggggattccacttaaaaaacggttaattacctatctaccaacaaagccattattagataatttacatcaccataccataaaaacgcatataaaaagcggtgatgttattggtatttacagccccttacccgggttagatgtcttccatattgggttagccatttggcgaggacacgaactactctttcgtaatgcctcctccctaccggagcatcgctatgttgtcgatacacctctagcggactacctaaaggaaagacggggcatcgtcctctaccgacctattttgtaatggaatgtaattgctacctagtagccagacataaaaaaaggaatccctccccctaaatacatagggagaggtaatcctacacatgaaaaaccatgttaccgtggtttcccaaccgatttgtctagattccttttacaaacatgctgaactctgtcaataataatgaaaggaagatattacatgacaccccccattaaagactccctcctctttggtattgacctcggcattggctcttgcgggtgggctgtcttaaatcaacagccacaaataaactacattgaagccctcggcagctggtgcttcgacgtcccagaaaccgataaagagcgcacccccaccaaccaaattagacgcacaaaccgcctgttacgccgtgtcatccgccgccgccgcaatcgcatggccgagatacgccgtctctttgcagagcatcacttactcaacgatgcccatcccgatgcgctacgccgcaccggagtcgacccatgggagatgcgtgcccaagggcttgaacgtcccctcaccgcagaggagttcgccactgctttaggccatattgccaaacggcgcggctttaaatccgccgctaaacgcgccaaaagcaatgcttcggccgaagatggcaaaatgcttgccgcgattgagaaaaccaaagaacgctctgcccaatatcgcactattggccaaatgttcgcccgcgacccagactatacccaaagacgccgcaaccgagatggcttctttgaccgcactatgagccgtgatgatctcctccatgaagtcaccgtcctctttaaagaacaacaacgccgcggtaaccacttcgccacaccagagctagaaaaggcgtttatagacatcgccttccgccaaaaacctatgcaggatagcagtacccttgtgggcgattgcccttttgaacccggtgaaaaacgctcctcccgcttctcaccctcttttgagcgttttcgcctcctcagtcgccttgttaatctccgcctcacagacggcccagaggaacgccgcttaacaacagaagaactccgccttgcttatgagaaagctgggacaacagccaaattgagcgtgacaagacttcgtgaacttctctctttacgcgatgaccaacgctttacaaccattttacccacaaatgagacagaggatatcgcctgccgcacggggggcagcttgactggtacaaaggcgtttcgctccgttttaggggattctctttgggaacagttacggccctacccggccatactcgaccaagcggcttggatcattagcttccatgaacttgcaaaaacaatcgccgaaaaattaaaaacgatcgagggccttcctcaagaggcctacacgcttctctgcaaagcagtggaggatggaaaattcgcgcaatttaaagaggcctcatctctctccgacaaagcagcccgcgcgctcatcccctatctggagcaagggctaacctacgataaagcctgcacaaaagtcggctatgatcataccgccaccgctttgcgccagcatgatacaatcgatacaaaagccaagtttaaagccttgatggaggaagtacgggacaacatcaccaatcctattgccaaaaaggccgtcacagaaggcatgaagcaactttgggcgatgcgtaaccgctggggcttacccggtgccatctgcattgaacttgcgcgtgatgttggcaacagccttgaaaaacgccgcgagattgaaaaaaatattgaggccacgaccaagaaacgcgaaaaagagcgcgaggaaatacgcgaactcctttccatcaaagacgtcccctctgagacattgctccgctaccgtctgtggaaagagcaaggcggccgatgctgctatacggatgaacctatatccccccaccagcttatctctgacgataatagcgtacagatagatcacatcctgccatggtcacgctttggggatgatagctacagcaataaaagcttatgctctgccaaagcgaatcaagaaaaacaaaaccgcacgccttatgaatggctccacggcataaaaggccaagacgaatgggatagattcaccgcgtctgtggagagccggaaagaaacaaaaggcatcaaaaaacgcaacttcctccttaaaggcggaaaggaaacagaagaacgcttccgcagccgtaaccttaatgacacgcgctatgccgcccgcttaatggcagaagccgctcgcttgctctaccccgctggccatcgcggcgagaagggcggtaaacggcgtgtcttcacccgcccgggagccttaacagcagccctacgccacgcatggggcgttgaatcgctcaagaaaatagacggcgaacgcctccctgatgaccgtcaccacgcccttgatgctgtcgttgtagccgccgtgagtgaaggcgaaatccaaaaactgaccaaatccttccaaaagtgcgagcaacagggcctcccacgcccattgcgccatgttcccccaccatgggagacattccgtgaggatgtaaaggcagcctatcacaccatccgcgttgcacggccggagcgtcaacgcgcacgcggtgaaggccacgccgctaccatccggcaactccggcaggaggaaagcggccctgtcatttacgagcgcaaagctattgaagccctcaaactaactgaccttgccaaaattaaagatccagagcgcaatgaggggcttatcaccgcacttcgccattggattgaggctggtaaacccgctgatgccccaccacgcaccccctgcaacatagccggtgctggccatgagatacgcaaagtgcgccttgccactaacaaaaaaccggctgtccccgtccgtgggggcattgccgaccgtggcgatatggtgcgcacagacatcttcacccgccgcaataaaaaggggaagacggaatggttcatggtccccatctaccctcatcaaattatgaaccgcacccaatggcctaccccacctaatgccgcagtcatccgtaaaccagaggagcaatggcctgaaatgggccctgagtacacattccaattcagcctatacccacgcagctatatccgcctctttaaaaaaggcgtggtgatagaaggctattttgcagggagtaaccgctctaccgcctctatcgctgtatgtgatgctaacgataaaaccgactgccaaacaggaatcggcatcaaaacgctggacctcatccaaaaatacgccatcaaccgctttggcgagctatcccccatcaagcaggagactaggacatggcatggcgttgcgtgcatatctcccgcccagcccgactaaagctcaaggaccagcagctccttatcatgcaggatgatgatacaatcatcctgccgctagaggatattgcctgttgcgtcctcgatacaccacaagtcacgatctccggcgcgcttctctccgcttttgctaccatgggggtcgcctgcatcatccctgatgaaaaacatcaccctgctggcatgctgcttccattccatcgccattatgcccaagcggatatcatccagttacagattggggcctcccaaccgctccgtaaacgcctgtggcaagctctagtaacggcaaaaatcaataaccaagcggctatcttagctgcccgcgctcataaggatgccaaaaagctacaaagcatggctggcttggtcacatcgggggataaagagaatatagaggctcaagctgcccgcttttactggtcccgcttattccagaccttcctccgcgctgatagcacagataaacgcaacggcttacttaattacggttatgccatcctccgcgcggctcttgctcgcgcctgtgttgccgcagggcttatcccctcattagggcttcaccatgcctcccgcaccaatgccttcaacttagtggatgacctcatcgaacctttccgccccagcgtggaccatatggtcgtccattacctccctgagggcgacactgccactgccaccctagaagaccgccgctttatggcagggatactcacccaaaccgtacgtattgggcaagacaacatgaccatcctcgccgccactgaaaccatcgcagcggatttgattaaagcccttgaacataatagtgcggccctgctgcgcctcccaacccctttagggaaacatccatgaaagctgaggagactcgattcttgtggctcatgattttttttgacctccccgtccgcaccaagctccaacgacggcaagcgacgcaattccgcaattttttgcgtgatgatggctttattatgctacaatactccgtctatgttcgtgttgggcgtgggcaagatagtattgataaacatatacgccgtgttcgcacagctttgccaagagaaggcagcataagggctttgcaagtgactgataaacaatatggacggatggaagttatgctcggcctcgccaaaaaaaccgagaaagtaggaacgaaacagatggtattgctatgattttcggccataaaaacagcgaaaaatcatgcaacatcaatctgttacgttctagctagcctaccatagacaaatcggtagggaaaccacggccatattcaaatcaccgcccaactcatcaatagcctaccatagacaaatcggtagggaaaccacggcttgaacttatacttgcattgccgcgggataagcttatcacagaggcaagggtatgttttagtggtgtgtgggtttagggatttatctgggatttgtgtatggtatttattggatgcgggggtaggatttgaacctacgaccttcaggttat

SEQ ID NO: 1509 - DNA, 24452 bp, synthetic construct
  misc_feature 1..24452: note = Synthetic
  source 1..24452: mol_type = other DNA
tggtatgtattcaccacaatctggaaagaattcaaaatcgggttgaggcatattttctgttgtatggccttgtaggtctccagttcaaactcctcgagcaattgctctttgtcgtagccgtgaaaggtatcgacaatttcatctgcatagcgaacaaagccatacactgcgtagataggctggtggtacttcttggccagcatacttatgcccaggctaaaagatgtgctatatcgcttcgtcacaagcttgctgcactcaaaggttgaccggtcgaataggttcatagcgtataatacttaggtggaaatatcctttacaacttcatttgccactacctgcccagaaatgagcgaaggtggcacacctggtcccggcacggtcaattggccggtatagtataggtttctgattttcctgcttttgatggagggtttcaaaatggctgtctgcatcagcgtgttggccaatccgtatgcgttgcctttgaatgagtgataatcgttgatgaattcttggtgtgcatacgatttcttatagaccacatagggccttagattttcgccatagtgccgctcaagacggtcaaagatcatttcataatatttttccctggttgattttttatcttctattcctgctgccaccggtatgagcaccaccatgttttcacaaccttgcggcgccacctgatcatcggttttagaaggtacatttacataaaataagggcttgtcgggccattcgcgggtttcgtaaatggcactggcatgcggtgcaaagggttcatcaaagaacaaaacatgatgccctatctttggcaacttcttattgaaacccagataaaacaacagcgatgagggcgccaggagccttgtatcccagtatttttcggaataggagcgaaattgctgagggagcaatttactttcgatatgatggtaatctgccccgcccactaccacatcggcgtcaaattcgccctgcttgcacaccactttggcgatggcattgcccgaataccggaatgaaaccacctcatggccggttttgatatccactcccaactctcgagccaggtgaagcatgccatccactaccgatttcattcctcccaatgggtaccaggtacccaatttgatgtcggcatagttcattaatgaatacagcgcaggcgtatttttggcgagtgcgccaagaaatagtatcggaaattccagtaattgacgcagtttttgatgtttgaaacgcttatggatgtgcgattcgaaagaggtaaacacatccatcctggccatgttggccaatagcttaatgctggcaaattcccagatagatcgggctggtttataaaccagatcattgatgcctaccttatatttgtatgcggcttcactcagaaattggtcgagttgggtgccacttcccggctctatcgattcaaacattgacctcaacatgccgtagtcggcagggatgtccatttcctcccggtttccaaacactacggtatatgatggatcgagcctggtgagtgtgtagtatgacgatacgctttttccaaaggaagcaaagtaccgctcaaaaacatcgggcatccaataccagctaggccccatgtcaaatttaaagcccgcctccgccaattggcgggcccggccacccgcctgattgtttttctcaagtatggttacattaaagccggatttggcaaggaagctggctgccgaaagtcctgcaaaaccagacccgatcactattgctcgttttgcaggcatccctaattaatttgtagcgtactggttcagtttaaacttaagctccttacgggctatgtgtattctgttttttaccgtaccgataggaatagccagtttatctgcgatttcatggtatttaaatcctcgaaagtgcatcagaaagggaactttataggcatcgtccagtttttcgatggctctttttatgtccttcatggcaaacttgctgtacgcgccattttctatagagtttgaagaagaattgatgtaatgcaggttttcagtggtatcgataaaggtgttttttctgatcatacgctgataattggtgatgaaggtattcttcatgatggtgtacatccaggccttcaggttggtgccttcagtgtatttgtcacgattggaaaaagcctttagcatggtctcttgcaacaaatcatttgcatcttccaaatctctggtaagtctcatggcaaatggtttgagtgatcctgacaatctgtcgatagtgtagccaaattctagtgcagtcattgttcgtttgttttgtttgattacttgtttaaatgtatatactaataaacgtatttaaaattttttgtttaactttttgtgtacttttttaaacactatttttttgtggttgatgcgctttattgattaaatcaaattgaatcctgaaataaccttcttttaccacattgctatattagattagtgctatttaatattattctaaattgacctgaacaaactcctatttcgccagaaacaatttcgtttaatcaaatttctcatttaataaacaatttagtttcaatctaaataaaattaaagcatacatattgtgagaaaggtcacagcatggacattgtgcctatatggtgctaaaaattatataagggattaaaactgaggtaaagaacctgccgatggtaccgcctcatgcaaagcatctttgacctcagtgaggaggaaattggcactgaaatgatgatgctgccaggcttcagggtctggattttgcgccgctttggtagtgttccagcaacagtatagtcggagcgagtatggccatcattatgatggtggtcactttataatcattcatcagaaaaaaggccgtaacgcacatgtagatgatataaaatgcattttgagggaagaaaaattgcggatattcattatgccgttgtttattttaaaggtaccgatcgattgctgaaaatacaaaatcagggaatggttttgagtcttggcatcccgcaatagcaataatgcgcacaaaaatcagcgaaggatttccggaattatcggatcaaatattgcctcaactcattcaaaaattgccctggcggtgcgtacttcacacccaagtcatggttcttttttgctatccggtaaataatcttcatgtgccgcgctatgtccttatacgccctcactattttataatcggggtcataaacgtgggctgcttccgaactcacgccattcagctccattattttaatgttgcggccgtggtacagatcgtcgatagaaggcaccttgagatcgaagcgcccataaaaaaagccctcgatatccagggatattctattaaaaacatcgtgcagcaagggattaatcaggtggttggcgttgtaaaaaatggtgccacggcagtggtttccaatgggttcgaggcgcattcggtgccccaggggcaacactttttctagttggtcggcaaatttattgtacaaatactcctgccggccgctggcccgcaccgacccggagatcaattcgcgcaaagcggaagtgccatcgccggtcaccgtcagaaagcccttttgtaccactgaggtcacctcgcccttgcttgagccaggcatgcggtggtagagcatgccaaattccaggtcgtagttgatgtattcctgagcgatcaggtcaaaggctttgtcggcaaggtagcttttcagtgaaggctcgtcacggataatttccacatctttgccccgctcccccacgtcgggcttcatcacgagcgggtaaataagtccggcgctggtcaggctgtggatgatggaacaatatggcgaacctccggctataaaaactgttttgggcaggtatttgcccggcatggccttcaggatgccaaacttagattcacccatcacgccaccgtacttcatgcctggattggtggccgaaaagtacataaatgaccgggcgcggaaggcgaggtacagtccatagaaatacatgggtatataaaaaatccagaatggccagtattcgaaatgaaacaccttgaccaaaaaaaccttcaacttattcttcaacttcatacaaaagtcaaagaaacaaatttttgcccaagcaagaataacgaccgggtgcaattttgttggatacgaagcgcgggccaatgtgccataaaagcgcttcagcgccatttggaatggaatagtaaaaccactgaaatgccggcaatcggcattgtccaaaacatttttaccaaaacaggcatttacccatgcatgctaaaaggttcgtcatcaaactccaaaaaaaaccttttgaaaaggacttgcaattccatgatattgcagcgtttaaaaaatgtaattattcaaacttttttataacaataaaaatatatgaaaaaaatactggctgagctgatcaccatcggcgatgaaatactctacggacaaaccctcgataccaatgcccactggatgagcggccaactcgatgccatcggagtgaaggtggtgaggcgcaccacctgtggcgaccaggaagaggaaatcctccaggtctttgcggaggccgaacagcgcgccgacctggtgttgatcaccgggggccttggtcccaccagcgacgaccttaccaaaccctgcctggccagatacttcgacagcgaaatagtgatgaaccagcaggcactggccgagctcgaagcgtatatgacatcgcgggggcgagaactcaacaagctgacccggctacaggctgccctgcccgacaaatgcgaagtggtgagcaacgaccgcggtaccgcctgcggcatgtggttcaatcgcaatggaaaagtgttcgtttccatgcccggcgtacctcacgaaatgcgctacatgatggtagaaaaagtaatgccccggatacaacgagcatttgaccttccgatcatctaccataaaattatccgcctggcaggcatcggcgaatcctggcttgccgaaaaaatcgaacagtgggaaaaatccctgcccaaaacagtaaagctggcgtatctgcctggttatggcgacttaaagctcaggctcacctcactggcctccgatctcgaattgcaaaaaaaggagatcgaccagttggtgtcgagcctcatgccgctcattcaggaatatgtctatggctacgacgacgactcgcttgaagtggtgattggccgcttgctcaaagaaaaagggcttacccttgcgctggccgagagctgtactggcggctatgtggcacaccggattacgagcgtggcgggcagttcggcctatttcaatggcgccatggtgccctatcaaaacgaattgaaaatagcccagctcggggtgaaagaggccacgatcgtgacatatggtgcggtcagtgaagaaactgtgagcgaaatggcgcttaacatcgcgcaaaaatttggcgcagactacggattggcctccagcggcatcgccggacccggtggtggcacagaagaaaaacccattgggcttatctggatagcctgtgccattggtggaaaagtgaccacccgcaaactaaacctcaccaaagaccgagacgtaaatatcaaacttactgcggtggctcttttcaccttgttgcaccaaagtttggtggcaaacgattgagaaaaggtggagatatgctaacttggcggcttctaactaagattgaaacataaaagaacagggatggcactattcgaaattttaatgcctcagatgggtgagagtgtgatggaggctacgatcatttcatggcttaagaaagtaggggaaaaggtagaagcagaagaacccctgctggaagtggccactgacaaagtggataccgaagtacctgccatcaaggagggcttcatcaaggaattgctggccaaagaaggagatgtggtgcaaatcggatcgcccatcgcgatcttcagcaccgacgccacggagatagaaattgccgaaaggcagcctaaaagcacccctgcccctaaagaaatggcagagatacaggcagaagaaaaaaaaccagtgataaaagcccctgctaagacggcggctccccaacctgagcccgaagtagcacaagtggcttcggcagtatatatcgacaggtttatttcgcctttggtaaaaaacatagccaaagaagagcacatcaccgaagatgagctgcaatccatagaaggcacaggcaaagacggacgggtaaccaaaaacgatataatcaactacctgaaaaaacaaaagcacacacgatcgggatacaaatcgaacggctgtgtgacgagccccatccgctcagcggtagaaaaaggcacatccattccggcgcccattgccggcgaagacgacgaagtaatagagatggatcgcgtaaggcgcatcattgccgatcggatggttgaatctcgcaatgtgtcggcccatgtgcactcctttatcgatgccgacgtcacggagatcgtgaagtggcgcagccgggtcaaagagcactttttaaaagacctgggcgtaaagctcaccttcacccccatctttatcgaagccctggccaaggcactcaaggactatccgatgatgaatatttcggtggacggctacaagattatcaagcgcaagcacatcaacataggcattgccgtggcgctgcccgaaggcaacctgatcgtaccggtgatcaaagatgccgaccagctcaacctggtaagcctggccaaaatggtgaacgactacgccacacgagcccgcaccaatcagttgagcatagaagaaatcacgggctccacctacacccttaccaacgtgggttcatttggcagcaccatgggcacgcccattattttgcagcccaatgtgggcatactcgccataggagccatcgagaaaaagccctcggtgattcagaccagggagtacggcgatgtaatggccatccgcaaaaaatgacgctctcccactcctacgaccaccgggtgatcgatggagccctgggcagcctctttgtgaaacgggtcgccgaaaacctggaaaatttcgataccagcagggatttttaataaaattgctcccccatcaattaggcaagcgccacaaatgtcggaagaccggggcgcggagacggatgtgatttataaacgtcgataactattggttcattatggccgtgcctttttgggcagctttggctttgggaacatacagcagggtgtaggccgaagtacactcggcatggcccgctacttccacgatcaattcgaaccgatccacttcccatgcgggcaagatcgcccgcacggtaggacctgccaggttgcgattggcctccggcgcatcaaaatcccatgagagcaaaggtaattctttgtcaccggccttgagtttcacatttattttgccggaagcgacatcactataggtgtcgttgagcagccagatgtctgagctaaactcctccccttctttccatttcagcttggtaattttggcactggccataaacggacggcaagactggctcactgcataaaaccccggcttcggtatatttggccaattgaccagggtgttgttggcggcagtgggccagggttcgttgaagcaccagttcaaggccatggtgcaatagggcttttgcctgcgcgcttcttcatagatggccttgtagccttcgcactgtaataattggccgttggcaatgagttcttccaggtcttttgatttgccaaaatagtcctctatcatgccttgcatcagccaggtatctcccacccaggccttgaaggcgtgatggctttcccaggctgtgccgggctttggcggccacagctcgtcggccggaatgatggtttggagcacctctaaagaagatggcgccggcaagccaaactcggtataagccgtgtttcgtgcccgggtcatacgtgcatatacttcttcaccgtcgttccagtcgcgaaatacatagtgtccatgcgccattccgataacgggactggtatagataaatggtgtcttggggtcgagcaggagacattgactgttgagcagacgcaaggcaagagattgctctgtcatgccactccaattgttaaagagctcattaccaccacaccacatggccagtgaggcatgtttgcgcacccgcttgatgatggactccgattcttgtcgaagcacattcaggtattttggagttccgaggtagttgttgcaggccagcggaaattcctcccacaccataatgccgagctgatcgcagagctcaaaaaacgattctttattcacaatacatccgccccaaatccgcagcatattaaaattggcctccagcgcccgttcgagcaattctttataccttgcgctatcgatcaccccgggaaaaatctccggcgccacccagttggttcctttggcaaaaatatttctgttgttaatttgcacctgtatgggtgctacgcttcgtcctttggggaaaccatccggaccattccaggctccttcgctcatgacgagggccaccttgcgaaatcctacctttgacgtatgggtttcgagcaatttcccttcgcgatcgagcagcctaaaaaccgaggtgtacaggtaggggtctccatggtcgtgcggccaccagagtacaggttgctgaaattccaccggaaattgagcattattgccgtgtatcatcgcagccttttgcaaaacggccttgccgcgggcatccctcagttcccacgccattttacattgatcaagttgcaccccttctacttttatttctatatcggctttgctcaacttatcgtcgagtgtgtagtccacccagacgtcccgtaggtgagaggcatggcgcacctccagataggtatcatcccaaatgccgctcggcaccaggcgtggatgccagtcccaaccgtagctcactgcgggcttcacactttgagcggcctgtgagcggtctgctggcgatttgtgcattttggggacagggtatattttcacctgcatttcatttttttctttgaccaatgcgctaaggtccagctgcaccggggtgaacatgccttcctggtgcaatagctgcctgccgttgagccatatttcaaactcatagtctatgcccttcgaaacaaaaaagagcctttcggtcgagtcaaggtagggcttttggaaagaagttttatacacaaaaaacttgtcttccatccagaggtagtctttccagttttcggcatagtagtacggatcgtatttttcggcgttggccatgtcgagttgaacggcgccgggcaccgtagccgacacccattgctcaggtagagctgtcaggtggtcggcatgtcccacctgccagtgcagtgtggtggtggtattttgggcggatgtggaaatgaaagcagccacaaacaaaagcagaatgaatgatcgcatcaacatttgaaaaaagatttaagcataaagataaatctgaaaatgtttaatctataattaatggagagccattcaatgattaaaaacgcaaatgttcttgtgccctgatttttcccactcaaaactcagacctgacaatcagccgggattggagaggaataggaataatatattgcgaggaagggttaaattgactggatgaactgctactggcttttcgataagctagccccattctctgcggcgggcaaaaagtaactcccaccgaagcgggagtataggaaataattccttcggcatatagccttattgtgataagattcaaagtgtaatgatagcgatgggtggtgataatgtcaatgcttcgctcaagaaatatgaaatttatctgttttatctaaggctatagctcaggacaagaacgacaaaaacaaatgtatagttcatatttaaggtaaatgagtctatattgaaatgcgaagtaattatttttttaagacaactattttttaggacatacacaaacccccaacatttattatgacaaaaatcctaggactagacctcggcaccaacagcatcggatgggctgtggtagaatcggaaaacaacacttcttttgaactgcttaataaaggtgtgcgcatttttcaggaaggggtgaaaattgaaaaagggattgaaggctcgaaagcagcagaacgaacccgttatcgcagtgcgcgacgtataaaattcagaagaaagctgcgaaaattcaaaacattgaaggttttgtcagaaaacggaatgtgcccgattcctatggacgaattgttacgctggagaaaacataaagatgttgagacgggacatcaaacaactttcaaaatgtatcccataagccccgcttttattgattggcaacggacaaaagatgaaaaggacggctcaaaaatcaagaacccttattattatcgctcattaaccgcaaatcaaaaactggattggagcaatcaggaagatcgctataaaataggtagagcattttatcatatagctcaacgaagaggctttttaagtaatcgattagatggaaatagcgatgaccgtatggatgctatcagacaggaattactgactaagatagatgaagtatatgtagatgttgctgaattgaaacttacgctatcttttacatttaatgacgatgagcaagaacccaaaataaaaagccttaaaaggcagatcaatgccatttgcgaaaagcatgaccagatgaatttggccaaagaagatgtagttaatcttttgaataagagggaaaacaaagggaaggtaaagcaagctattgatgaattgtctgaaaaaatagagcaagttggctctaaaacgttgggagaatatttctatacattatacaagaaaggcgaaaaaatacgtgaccaatatacacatcgtgaagagcactatttgcatgaggttaacactatttgtaaaatgcagcaactaccttctggcatagtgtcttctatcaataaggcaattttttatcaacgcccgctcaagtcgcaaaaggggttagtcggcaaatgtccgttcgaaaaaaagaaaacacgatgtgctgtttcgcacccttcttttgaagaatatcgcatgctatgttttgtgaacaatataaagattcaaacccctgaggacgaaaagcttcgcccgctaaatgatgatgaaagggcaaggatcatcccaagattttatttaaagaaggataatttcgattttgaagacttagcaaagcagttggctcccaaaaaacaatgcaagtttcacaaagacggaactaaagctcccggtgatttcctctttaactatagcatgcacactaccgtaagtggttgtcctgtatcagcaaggcttctgagtatctttgggaatggatggaaggaattaaaaatagaatatgtcagggagaaggacaaaaaaatttcaaatattgacatcgatgatgtctggcatgtgctcattacctccgattcagatcaaaaactcgtcgattttgctcgaaatcggctacatcttggcgaagaaaaaatcaaagaattcataaaaatcaaggtaaagcatgattatgccgctttgagtttaaaagcgatacgtaaaattcttccgtacttgcaagaaggcctcatttattcccatgcagtattccttgcaaaaatggaggatatcattccagtgaaaatatgggcagataaatcaaatcaaaaattcatccgcgatgaaatccaccagataatcctgacccaaaacgaagaaaaacaaatagcggaaattgttaatggtatgattaaaaattgtcacgaaaatcattggacttggagcaaggaaagcgaaacagggcactataatgatctaatgcttcgaatcaatacctactttggcaaaaacaaatgggcaagctttacccctgaaatacaaaatagagtgattgagagcggttttactttattcaaaaagcatttgggggattcaagctttgtaaaaccgtcgcgtattgatgaaagagtaaaagcatttttgatagataattttgacctggaaagcgaaaaattggatttgatgtaccacccctctgccctggatgtgttcaaaccgcctatcaaaggcgatgatggaaaagaatatctgggtagtcccatggtgacatcgattcgtaacccaatggccatgcgaagcttgcaccaacttcgaaagttgatcaatgagctaattaaagaagaaattattgaccgttcgaccaaggtgaacattgaaatggcacgcgacctgaaaaacgccaacgaaagaaaggctttgcttgcctggcaacgtgacagggaaaaaatccacaaagaatatgcagagcggatcaaggagtattttgaaaaagaatcctggaatatggtaccatctcagtctgacgtattaaaataccaactctgggaagaacaaaaccacatatgcctttacactggtgcaaatatcgctatcagtgattttctgggaaaggatcctcgatttgacattgaacacacgataccgagaagccaatctttcgacaattctcaggaaaacaaaacactttgcgacaatcgattcaacagacaagtgaaaaaaaacaaaatcccccaggatctttccaatatcgaagaagtgctcagtcgaatagttcattggaaagagcgctttattattctggaaaaacaaattgagatgctggtgaggaaatcgaagggcgccaccacgaaagaattaaaggacaaagccatcgaaaatcgccaccgactcacctttgaaagagattattataaaaataaataccgacgttttaccatgaaagatgttccggaaggctttaaaaacagtcaattagttgatacaggtattatcaccaaatattctcgtttataccttaaaacattgttcgatagggtatataccgtaaaaggaaacactgtcgcggattttcgcaaaatatgggggcttcaagatgaatatgagaaaaaagcaaggggcaatcatatacatcattgtatcgatgccataacaatagcatgtatcaccaagcagaattacgaagcccttgccaagtattatcatgaaattgaagaccaaaatgacaggggcatagctagcaaacccaaagtcgacaaaccttggcctttcttttcgaaggacttgaaagaaattgaaaaccaattgcttgtttctcatcatacccctgatgtgctacccaagcaaagcaaaaagaaacttagaaaaaggggtaaaatacaaagaaatttaaaaggggaaaccaaataccaacagggtgacaccataaggggaagcctgcaccaggaaactttttatggggcgatacttaggccaaaaaaagacaacaaaggaaaacatgtttatgatttaaatggtgaactggattttgaaaccaatagcaatggggataaggtattttatgtaactcgtaaaaatgtagaagatatcaaaaagggtgatgtcgataagattgtagatgaagcagttaaaaaaataataatcgatgctataaaaaataagttgatagtgattacgcccgaaaatcagaaaaataaaataaacgaaacggtctggatgaataaagaaaaaggcataaaaattaataaagtgcgctgcctgcatactttgaaaaatccattgaaaataaaagaacatagggacacttcaaagaaaaagcacaaacagcattactataccggcaatgataagaattatctgatggctatttatgaaggaattaattcaaaaggaaaaatagatagggattataaaatcattaataacatggaagatggtgagtttttcaaatcttctgtttacaaaaatctaaaaagccagggtttaaatcaattggaaacgtctcttttaagccatgaaaaagattcatacaaaatatatcagataattaaacctggtaaaatggctcttttgtggaagcattttccatcggagatttgggagcttgatgaagtacagttaaaaaataggctctataaaataaggggtgtcgacaaggatggaattaaattgtattaccatcaggaagcacggcctggcactgaattaataaaatacatgaatgaaataatccgcaaaggatttgttgatgaaggaattttggacaccaagaaagttatggatatgcttaaagaaacaggctcccctattgacaatcaaaaggacatcagtccttatgccgaaaaatctgtcaatgggcaatggttgataaaagacaagcttggctccgtaatattatcgttgaacgacatcgagaatctgattaaagaaagcaagttgactacgcccaaaggcggtgatattgttgacaagggagttgattttccttatgtcaaatttaaaccttcaaatttcaatgcccttttagaaggtgtggattttaaaatatctgcattaggcataataactaaattgaaatgaagaaaaagaaaagaaggaatggatgtgaaacgatcaatgtaatcagttcactaggaatccgtatgtccactcaatgaccacatgcactccacctttgagattttgttgcctggttagccgtcttaacagacaaaagtattttgaaggaaaatcctgccctcggataggccgtcctaagtctttggagctaacatccggcacccgggtaggccacaaaacttgtagtttgtcgaatccggggctcagataaggcaaaaaagatgtttgaagccgtactttttcgccaggttggcagacaaaagacgttggtcggccaacttggcagtcatttgattatgatatttcattataagtgatatattgccaaaaaataacccaatccacaagttaaatttttttatacctaacattatcaatcatgatggaaatcgccctcacctcactcgacaaccaacaactattcactctggcttcgcgcgtggaaacgctgcttggcaagcaagacaccagtgccctgggcataaagccctacgccgataagttcttgtccaggttctctgattataaaacctccttcgaaaagcaatcattgaatactgaacaaatcgcccaaaaagatggcgaaagggacaatatgtacatcgccctaagaaaccatatccgcaattaccactaccatcctgaatctgacaaaaaagaaaaagccaggaagctgttgtccgtgctcaaccaacatggccaacaagtatattcagaaagctatagcgtagagactgctgccctggaggccatcatttcggagtttgataaaaaccaactgcctgttttggaagaactgcgtgccaccgagtggtttacaaacttgaaaaatgcccaggctgattttgaaaaaaccgtacttgggcataccgaactaaaggcagaaagcgccaaaatcgactccgccaccaaaagcaggtcgggtcttgtggatgccctcaggaaactgtttttgtttatgcctcttcattacgaaatgacccaatctgcaccattgggcagtttaattgaccagctccagatcgaatctgacaggatttagcacagcttcaacaatggatctctagatatgggatccatttttttttgatcgaccaacagccttgacgcagataatgtagggcacaccgaccaccatgttgacatggattataaagaagtcggaggccaaacattcaaacttttttttatgctcaagcgaacacttttttttagcaatccctttcacttgtcggtaagagattgccagttggtggccacacccaagccagagggcaacccgcgcacgatacccatcgaagacattggctttgtagtaatagatcatgcacagatttccgtgactcccgtgctgctggagcacatggttgccaacaatgtggccgtaattttttgcgatgggctccaccatccgcaaagtatgttgctcaacctgaatggacaccacttgcaaaacgaacactttcgtcaacaaattagcatttcggagcctttgaaaaaaaacctctggaagcagaccgttgaggccaaaatcataaaccaggcagcactactaaaaaaattgggaaaggatcacctggcggtagaggcctacgccaaacaggtgaaaagcggcgataccgacaaccgcgagggtgctgcggctcgcgaatactggaagacgctgatggggccggaatttaccagggcgcgttttggaatgtggcccaaccccccactcaactacggttacgccattttgagagctgctgtggcacgtgcgctcgtaggctcgggcctgttgcccaccctgggcattcaccaccatagtcggtacaacgcctactgcctggcagatgatattatggaaccttaccgaccctatgtggatgaaacggtttaccacatgtatctaacctgccaaggctgcgaatcgctgactacgcaacaaaaggcagaactcttgaacgtactgactatagacgtggctttcgagcgctttacccgtccgttgatggttgggctatcacagaccaccgcctcattgacccgttgctatgccggcgatgttcgcaagatagcgtaccccaaacttgaccagcccatcacctgataacgtgaacaggagaccaaaacatggaacaaacccgtcttaacgcctatcatatcatgtggctatttgtgttttttgatctccccaccaacaccaaaaaagaacggaaggtggcggcacgctttcgaaaaggtctgctgcaggatgggttttcgatgatgcaattttccgtttatacgcgtcactgtgccagtcgtgagagcgccgatgtacacctgcaccgtgtacgcagtatggtaccggaaaaaggtcaggtgagcatactcaccgttacggataagcaatacggccagattgtgaactattggggtcgaaaaatcagggagtctgcaccaagcccgcaacaattagaacttttttgaacaaatgttgactgatttgctatctttggcacgttaaaaggccacgttctttgacatagcagatcaggataaaaaaaaccaaaagaacaaactacttcatagtaaggaagcatgctttttgcgaatgtaatgcggctcaaaatcaagtaaaatgagccatcaagcatagataagcagcccctatgttgtggtttgattcaaaatccagataaggcattaattgaggtactaacccttcatcctatcccaacaattcatccatcgaatggcagtgaaaagtagagataatgttgctgctgctgtttttgaaatagtgtatcattttagcttcgtcgctgaccgcgtccaaaggttcgtcgaaggcaatttctatggcctgggcatttttgtaattatagctttgcttttgttttacgagcacatttttgatggcgatggcttgcccttttctattgagtgtattcgaaacgcccatgatcacctccggggctatctcaaatccgatgttgaaaatataggtttccttttcgttccagtctatattttcgcattctacatacagggcaccatcgcggatgatcatgtatgagcttttgtagcgatgtcccagggttttggtttcgatcacaacggtgtcgtgggggtcttcgcgtatcaccatgggcgctttgatgaggatgggtctgccgtcgggtttttgataatatcggtaataaaacccggtaaaatatttttgagcagcttgagggttccggtttcgttgtcgctgaacttgctgtagcccaagctgcgggtttgatcgccggggccgggtttcatggccttccattcgtcccactcgtgcatgcctacgcccaaaaaagccaacaatacattcagttttttgtctttggcgttgctgttgttccaatagccctgcaaggttttgccgctgatccagttatagggtttttggttgtttatattttttagatgttcgataaaatcgtctgtattgttgagttgatatttgaatttgatgttttcgaattcatcctggcccaaaagcaaaaagtctttgaccaggtaaggcatttccattactttttgggtggtcacctggttgatcttgcgggctatgcgctcaaaaaccgtccgggtaaagttgccccagtcgccgtttatcccattgactccggtgatgtttttgatgaccggtgagttttctatttccaactttatcctgcgcgaaatcatacgtattgtaggcgttttgcctctgatgtaagggcgaacttaatctgccggaggtgaatttcaaagatattacctacataagaacaaacatttgactaagatatgactttctgttgcttataaactcttgctgtttaagcagttgttcgcagctcaaatttattatttgactgattttaatattcttatgactgacttaatatagcatctcaaattaaacttatacgatatgaagatgaaatttacaccacttttcctactggtgctttgtctggccaccacattggcatcgggtcagaccagccaaatcagcgggaaaatcacctccgaagagggcgatcctctaccgggggcatctattcaggtaatgggcaccatggtaggcacagtcaccaacctcgatggcaagtacgttctggagactccgtcttatgccaccaaacttattatatcttatatcggctacgaaacagccgaagtagaaattggcgaccgcagcgtgatcgactatcagctatatcccgatattcagcagttgggggagatcgtagttacagccatgggtctggagcaggaaaaacgatcgctgggatatgcggtagcagagttaggttcgaaagaaatcacacagtcaaagcagcccaacgtagtcaacgctttggcaggccaggtttcaggtgttcagatcaccaatagtggaggtgcgcctgggatgagttcacgcattattatcaggggaattacctcactgaatccgaatgccgacaatcaacctctttttgtggtagatggagtgccaatcgacaactcaaccagcgaatcagttgacaataccccgagagggctaagcaatcgcgcggccgacatcaaccccaatgacatagaaaatatttcggtgctcaaaggagcggcagctactgctttgtacggcgtaagggctgctaacggcgcagtgattattaccaccaaaaaaggaaaacgaggggctgtttccatcaatgtgaaaagctctgtcgggtttgaccaaatcaacaaatacccggattttcaagaacaatatggccagggattttccggcgattattctacagacagcttttggccaagttggggcgctccgattgttgcagggcaggttattgatccgagctataagttttatgacaacaccagaaacgtgatgcagactggcaagcagttcgataattacattagcgtgtctggcggtgatgattacaccaccttttttggatcggtttccaattttcagcaagaaggagttatacccttcagtacctgggacagaacttcggtcaagctctcaggcgatgtcaaagtaagtgataagttcaatttttccggctcgctcaattatatcaaatcaggaggtgaccgtgtaccacacgacaggatcatggaaacacttatgtattgggcagtgacccaagatgcgactgactacctcaatcctgatggcacacaaaagacctatggcaattcgaacccgctatacgcagccagattttggacctacgaggacgatgtgaaccgcatgatcggcaacatcaacctcaactataagccattggactggttggcgatttcctatagactgggcacagattactacagtgaccaacgcaccgaaatagagccaggaccaataggcgccgaaaatgaggtgcccatcagcagcaccggatttattgaagaaacccgtatcaatagccgcgacatcaactccacgcttaatcttaccatcaataaaaaatttaatgagcggttttcgagtattttgcgcatcggtcaagaccttttcgaccgtagcagcaacagtctcgtagccacaggaaatgaatttgatatccctcttttttatcatatgagcaacacaaaagagttgctgaattcacagtccaaaagtcagagaaggctcatcggcgtttatggtgatttgatgttgaacttcgatgatatgctgtatctcaactttaccggacgaaatgactggacatccactttggccaaggccaacaggagctttttctatccatctgtcagcctgggctttgtttttgatgaggttttgaacttgcccactgcggtatcttatagtaaattcagagcctctttcgcagaagtaggaaaagatgcatcgccttaccagaccgcaaagacttatgaatcggccagcggttttccgcttaacggcgaactgggctataccagatccaacgtgctgggttctcccgaactgaggccggagcgtactacatcacttgagtttggtttggaagcgagctttttacagaatcgtctcggattcgacctcacctggtaccaatccaatagcaaagaccagattatacctgtgccggtgtccaatgccactggttttacacgactggtgaccaatgcaggagaacttgaaaacaaaggcattgaacttgtcttaaatggcacgccaatcagcacattagacttcgaatgggatataagactcaattttaccagaaacagtaatactgtagtttctattcgtgagggaattgaatcaataccagtgggcagtcagtttggctatgtaggagccaccacctccatgattttaaatgaaggagatccctacggcaatctgtatggcaccagctatgagcgctactacgccgatggtaaacccgaagaactcgaagagctcgatagggatttgcccctactgatcgacgatgatggttttccgacgcgcaacggagaccaattaatcataggaaatgcacaaccaaaatggatggccggactatccaactcttttacttacaaaggcatcaacttgtccttcctcatagatgtgcgttacggaatagaccaatttgaccaatatggcaatttttactcagcgtttggatttttagattattcactcaatcgaaatgatgtggtcatttttgatggtttcctggaaaacggcagcgcaaacaccaagccggtatggcttggtcaggggcttggccccgactatgccaactatggcccaggtttttatcgcaatgattatcgtggtgtttcggaaaatttcgtaaaagatgcctcctttatcaagcttagaaatataaccctgggctatgacctgccggcttccttgctcgattccaccccaatcaaaggggtaaatttctcgatatcggccaacaacatcctgctctggacgccatggaagggttttgatcccgaatcctttagtgcaggagccagtggcaatgccaccgcctttaccgggctgggttatccaggtgttcaaagctatttcttcaccctcaatcttactttctaatgctgacgaaaatgaaatataaaaataaatcagtggccattttgcttgctttggtgtttcttcctatgataaatgggtgcgaaagttaccttgacatcaataaagaccccaataacccgactaccgcaccaataaccggactattagcccatgcaagcttcgaaacaggtgacaacgtgcaaaatatcagcaatatcacctcttattatatgcaatacctcgcctctccaaatgcggcaagttcatcagatactcaggaacctgtaccttatgaccaaacctggtttgagctgtatgatgtaatgaccgatcttagcgatctggaagttcaggctggggagctaaatgccagaaactatttgggcattgccaaaatccttaaggccatcaacctcggattaaccatcgatctctggggcaatattccttatactgaagctttttttgccgaaacccttaccccggcttatgatagtgatcaggttttgtacgataccctccagcaactcctggatgaagccattgttatgctgggctctggtgagtttacttttgaggtgggcaatgatgattttatttacgaaggcgacattgatctatggatcaaaaccgctcatgccctcaaggcacgatatcttttgcacctgagcaagactccggaatttaatgccgccaacgtgctgtccgcaatcgacaaatcctatgccgacaatgtagaagatgccaccgtgagttatttcgaagaacagatcaatccatgggcttcggttgctcaggcaaacgatgccttaatcttgggtggctggatatctgagcagctcgtggaggccatggatggcacttcatatggagtggttgatcccaggatgccttacatgtttggagaaactgaaaatggtgaatttgtaggtacagaaaatggtgccggacgaggtgatgcccctgagcaaggcgccagaagcaccctggtgctgggaacctactattcgagtcgtacctcgccgttggaaattatcacctatgcagaatgtaaatttatcgaggcagaagctgctttggctacaaatcccgccagggcttacaatgcatatttgaatggaattatagcacacatggaaaaggtaggagtagagtcagacgaaatccaagcttatatttcaaatcctgctgttgcagtgggggcaggggcgctcaccagcgatctgatcatgaaggaaaaatacctggccatgttcttaaaccccgaatcgtgggtcgacggacgcagatatgactataattataaggacatgaccgctccacaaaacctcaatcctaaccttggtggccagtttctgagaagattgatttatccagaatctgaaactcagcgcaatggattgaacgtgccaaatgtaaatctcctgaatcgtttatggtgggacaaatagtttaatttaataatatactgatgatgaacatattcaaaaacatacaaatgatactcatggccacgactattgtgatggcctctgcatgcgtagaaaacacggtagtgccagattatgaactggtaggaagctcttacgctactatagtgaacctgaaagtgtctaatgacgaaccgattgcaggtgaaagtgttgaaatatccatcacttacgtcaactacgataaagatccattgcttcaattaaccttcgaaagcgaagtcgatggtggagccaggactacattgagtacaattgatgagcgtgatgcagccaaaaatgctgaaatcacccataaacttacttatatcgttccagatggcgaagatgttaatatttatgcggtgctacaatcacaaaaagagtttccgcaaattgaaatggtatctctggaaatcaagtagcaatttacttcactcataaaggtggaagggacgaaacattccctccacaccttttcattactaaacatgataggtaacagacgccactttttgagcctgcttggggtagcatcacttgctaccaccttgcctggctatgccgttttggatactttttctgtacatgaaaaagcaataaagcctccacgactcaggcctggtcataccgtggcactcatcagcccgtcgggagccatctacgaaagtgaaccctacgctatcgccacagaagtgctcgaagccctggggctaaacgtgaaatatagtccccacctccacgaccgatatggccatttggccggcaaagatgaagaccgcgccagggagatcaacagcatgtttgccgatgacagtgtcaatgcgatcatgtgtatcaggggaggctccggtgctgcacgcatagtcgatttgctcgactatcataccatcgccgccaatccgaaaatattcattggctacagcgatatcaccgccctattgttggccatttatgccaaaacaaacctgatcacctttcacggaccggtggccacctctgagtggaacggcttttcgctcgattatttcaaaagcatattgttcgaaggggctgcaccgcaaatgctcaatcctgacaaagccgatacagacctggtacaggtcgaagaccggatccgcaccatcacctccggcaaggcaacaggcatattggccgggggcaatctgtccgtgctctgcggcctcattggctcagggtacttgcccgattggaagggtaaaatcctctttcttgaagaaataggcgagaagatttatgccatcgaccgatggatgtcgcaactgaaactcgccggagtattagaacagttgagcggttttgtgctgggcaaatgcaccgattgtgaaccaggcaccggctatggctctcttaccctggaagaggtgataaatgaccacatccggccactgggcataccggcatatagcggagccatgatcggtcacatctccaaaaaattcaccttgccggtgggcctccgcgcccaaat

SEQ ID NO: 1510 - DNA, 24230 bp, synthetic construct
  source 1..24230: mol_type = other DNA
  misc_feature 1..24230: note = Synthetic
tacatttcttatccttattaaacgataaagaagataataaaataggaaataatagaattattgaactaatgcaggaacttaaacctgctatagaagatgattacacagaactgcatacagaaaatctgagctctaaaaagaaaataataatggatgtaattcgagaagagttacaaaatttagatttttctgagattactttgataggtattagtgcaaagtattatcaatggattccgggattaattttagctgaagagattaaaaaagttaattcggatgttaaaattgtagttggtggttttggaagtgttgatgccgctcaagaagccatgaatttatgtcagtatttcgactttgttacttggggagaaggtgaatatcctttgttgtctctatatcaacagattaatgaggataatccggattttgaaaatgttccacgtttgatttatagagaaaataaaagtgtagttcagtctaaacaattaaaaagtgagtatcttgatttttcgaattatacttttcccaattttgacgattatatggatgcttatccattttctgacgatgaagatgatgaaataaatttccctataaatactattcgttcttgtaattggcgcagatgtaagttttgcgattttaatagtggttataaattgcgatctagaacacctgagaatatcgtagcagaaatagaatatattattgaagaatatggtataacaacattttcgttcgttgacagtgatacatttggaaatctgatacattttgaagaactactagatttgattatagatctaaaatttaagtcagaagaagacttgatattttgggctgagattattccaaatccagagattgacactgctattatgaagaaaatggcaattgcaggttttaaaaatctatttattggatatgatggtttatcagataagcatctaaaaatgatggataagagaaatacttttgctgataatattttctttgttaaagagtctattaaatactcaatttctccaattgttaatgtaatacgatttattcctggagaaactaaagacgatattttaaactgtattgataacctaaagtttttaaggtttttctacaataatcctgttgtaaaattcgaacatatttatgttgatttagtattgtcatctacttctaaatattacaaaactctaactgagattgaaagaaaatcttatgattgcgatgatattacatatttgatgcccaaacgtttctcagaaggtgataatcgttttagattatttagatataaagagaaaatgcctgtaaatgctgatgcctggagtcatttagcaatagctgaagaacattataaagaaaatacatactcttacactttattagaaaatgaaggagtttattattataccgagttttgtaatgacacagaaattgagaatattatttttggtgagcaagactatggaatagttctaaaactcttacaaaagaaaatttatactctgcaagatttgcttgatgatattcaaaagatatttccagagtttactgtcataagacttaaagagattctatcgaatctaaaagaatcatatctcgtttattgtgatgataatttttatagtcttgttggtttggtagaagtaggttaaaatagatttattaagtacatgacatttttttgtttttgaattatgcaataatctaaaatattgccatgctcctttaggagcataatattagtaaccctggacaagaatttattcgcagtccgggggagggcataatgcaaatgaaatcatttttggcgtatatatttgctataaccgagttttgaaggtttgcaaagattatgacaaaaatttatcatttatgattttacatttagtggtgtaagtcgatagtaagtattgtgtttataaagtagaggttaaatatttaaaaaattgtgtaacctaactaatcagaatttggcacatgagttagttttttcgaaaactaagtaacaaagtaaatctagtaaaacaggataagtttaactgttttaataattactttgaaaactttacttgacatcctaattcttatttcgtattttataaatggttgaaaattgaaatattaatattaaaatctaccgttatgaaagaacattataaatgcccgaattgcagaaagaacttaaatattggaaatagtattgttttactcgtaaggaaaaataaaacagaacgtggaattattcatctgcatactgagcttggtaattatacaacagaaactagttctgattttgatgtaaaagacggtgatcatgtatgttttatgtgtccagtatgtcatttcgatatctcaataaagaaaaataataagttggctcgcttaataaggattgataaatatggagatgaaactactattattatttcaggaataatgggagagaaatgtacttatgaaattaaaaatcgaaaggtcataatgtcgtatggtgagcaaatgtataaatacactaatcctgagtggtatttggatatttgacatttctgtgacaaagtgcattgaaaataaactaacttgtcacaatcaataaatatttaaaattatacctttgtatcttaaacatcgaaaacaaaaattgtgaaagatattcttttaattactcctccgtttacacaattaaatacaccatatccagcaacggtatttttaaaagggtttttaaatacaaaaggaattagttcatatcaggttgacttgggaatagaagtgattttagaattgttttctaaacatggattaagtacagtctttaagattgcagaaaagtcaatcgataaagcttctaataattcaaaaaaaatattctcaaaaaaaaatgaatatatttctacaattgatggggttatattttttttacaaggtcataaccgtagatactggaaacaaataatcaacaaatcaattcttccggaagcttttagatttaatcaggtagattctgtaagttggatgtttgatgagatggatatggaagatcaggctaaatttctcgctactctgtatttagaagatttgtcggattttattgtagaatgtgttgatgcaaattttggatttagtcgttatgctgaaaggctaggaagaagtgcaaattcatttgatgaattaaatgacaatctacaaaacgaattaagctatatagatgctattaccaataatattactgacttaaaacttaaagaacataatcctaaacttgtttgcatatcagtgcctttcccaggtaatctgttttcggcatttcgaatagctcaatacataaaacagaattatccagatattaaaattgctatgggtggaggttttgcaaatacagaacttcgttcagtttctgataaaagagtctttgattactttgattttattagcttagatgatggagaactacctattgagttgatttttgatagcttgcatgaaaataatatagaagaattaatcttaaaacgaacttttattatgagggataataaggtttattttaatgataagtcaagccgtatcgattataatcctatggatgttggaactccagattattctgacctgcatattgaaaagtatatttccgtaatagaagttgtaaacccaatgcatagtttatggagtgatggtcgatggaataagttaatgatggctcatggatgttattggggcaaatgtgctttttgtgatatttctttaccctacataaaagattacattgctaatacagcgaatgttcttgtagataggatggaggcaattattttacaaacaggggaaactggatttcattttattgatgaggctgcacctccaaaactgatgaaaagtgttgctttagaaattataaaaagaaatttgtctgttacttggtggacgaatgtgcgatttgaagaaaatttcacactggaagtgtgtgaattgcttgctgagtcggggtgcattgctgttgctggtggtctagaggtagcatctaacagactattaaagttgataaataagggggtaagtgttgagcaggttgcaaatgttactgcaaactttactgatgcaggaattatggttcatgcttatttaatgtatggatttcctagtcagactgaacaagaaacaattgatagtttggaaatggttagacaaatgtttgaactaggaataattcactctggtttttggcatcaatttgctttaactgcacattccaatgttggtttgaaatctgagaaatatagtattaatccaaaattggctgaaatttcattcgctaataatgatatcgagtttgtcgataatacaggagttgatcatactaagtttagttttccacttaagaagtccatgtttaactttatgcatggtgttggttttgatgtaccattacaggattggtttgattttccaattccggaaacaataattcaaagtgactatattcaaaatattatcgatgataattagacctaaataatcggatcattacaatagtctttccttttgcagtttttacaaaatttgcccatccatacttcatcgaattgattcatgattttttcaactaatataggatctgaagtaataatacctgattcaaaattacgtgtgtctttactcttaattcctaatccggcaccagtgaggtttgcagatcccatatatgccatttttccatctataacgataatcttaaaatgcactcttgggcataattgtctttcaagagatttccatagtaatgggtatttatcaaagcttttcctaaagttttctcctggttctttagcgtgcaataatctgattttaactctctttttagataattcgtttagaatttcaagaaaagattttactttacctttatgatgaacatgcatgtccttaatgtcagcggtgccaatccaaacatgtgtctttgtattggcaataggggcaataaccttttgaaaaagattatcgtttgtcacaaattcaaaactcattagtaattattgaaattaagttattcttctttgcgacctttgtatttgtgcattaaatgttttctaaactctttatctgccttatatagtaaggcaactttttttattgggagaacttgtttgaattttgcgtgatactcttcagatagctcagctttttcgctattgatttcaataatgcgatctgtttttgtcgttaattctgtatctgagagggtactgatatttcttttgatttcacgatacaatttatgctcttctacaaataacttatccatttttttgctgaattcgttgtgaagaggccagaagttttgagcttcttgaacagttaagtcaaggttttctgttataaaagctactttttcagcattaatcttctcttcatcaaaatgttttccaggacaatcttcatgttgtccgtaagcaaaaatagcaagtaagctaaatattagggaaagtgaaatgagtttgtgttttttcataacttataatttattcgtacaataattcatattcaaggtaataggagcttagatattcctcaatatcttcatcagcaatatcattagaagcataggtttcataatcttcttcaagatattcgtaaaaagcaatgtcatcctcatataagctaaaaatagattcttctaaactaatgtctgacttagcttcaatgttaggattaatgacaggatctttatcaacgaaagtgttaagcgtgaattttagtaaactaacaagtacaatcatagacgcagccatataaatatatggtttaaagatagaaaaagtagatctaggagtggaatttgtctctttctcaactttcgacattatttccttattcagattgtcaaaataaccttcaggagttttgaagttattttttttcggtatgtcgcttaaatttttcataatcaatattttatatgacaaatgtgcctataaaaggtttaatcttcgttcaaatatttttcaatttttgttaccgcatgatgataggatgcttttaatcctcctactgatgttttaagtatttcagaaatttcatcatatttcaattcttcaaaatacttcatgttaaaaacaagtctttgtttgggtggaagttttaatattgctttttgaagctttttttgaatctcgtcaccatcaaaatattcatccgtttccagagtgttaattaacttgtcctcgtaattaattgcagtaaaagtgtattgtctttttttcttatcaagaaagtttaaacaagtattcgtagcaattctatatagccaagtgtatatagcagagtcaaatctaaatttattaagatttgtaaatgctttcacaaaagtatcttgtactaaatcattagcatcatcatgatcaataaccatgcgacgaatgtgataatacaattgttcgctgtatttctcgacgacaaagctaaatgcttcattacgcgtattttcatccttaagtttttgaaggatatctttatcgtcgtttaatgtcattttttagtttatttcctactaattactttctcaacagcctgacaaatactttcagttgtaagaccatatttttccattaactggtcaggagtcccactttcgccaaatttgtccattactgcaacagcttccataggaaccgggttgtttaatgctacagcttgagcagcagtgtcaaataatcctccgttaagcatatgttcttctgcagttaccattgctttagttttacttacagattgtaagacagctttagcatcaaaaggtttaattgtatgaatgttaaataattctgcgctgatacctttttctgcaagtttttcgcatgcttcaattgctttccaaaccatatgtccagtagcaagaattgttacatcagtaccatcgtatagtttttgagctttacctatttcaaatttttcgtcaggatttgtaaagtttggaactgcaggacgtccaaaacgtaaatatactggtccttcaaattctgctacagcttttgttgctgcttttgtttgattatagtcacatgtgcaaattactgtcatattaggtagcattttcatcaaaccaatatcttctaatatttgatgtgttgcaccatcttcaccaagtgttaaacctgcatgtgaagcacatattttaacattcttatttgagtaggcgatgctttgacgtatttgatcgtatactctacctgttgcaaaacctgcaaatgttcctgcaaatggaattttacctccaattgttaagcctgctgcagtaccaatcatatttgcttctgcaattcctgcttggaaaaaacgatttggaaattcattttgaaaagcattcatttttaatgatcctgtaagatcagcacataatgcaacaatgttttcatttttttgtcctgcttcgtgtaatcctgctccaaaacctgagcgagtgtctttcttttcggtaaatgtatatttcatttgtctaaatttttcagtttttttgatattatagattttcaattctgaaatctccggattttactcggaattttgtctcacttgtattaatcgattgatgtttgtctttttccctgaaaacaattctgtaatagcctggttgtaatctgaatttgtaatgagtttgtccgggtttaaagtcataaaggttagttaaaacatctccacgttcatgtagtaatgtcccgtatgatggagatttaaaattaataataacctcaccaggttctggaattataatatgatttaatccactttgttctatctcaacagcatcaaaatataaccttggcattgtaagaacttcaatattataaagtccggttattagtttttgctttttatcggcgtctagaatatataacgtttcaggaattccagcatttctgacaatgcatttgatatttgaatttattgctgtgtcaccttgaatatcaacaaaaagaactccttgtggtgcaggaacatcaataatattatggactccctcttttagtattatactatctttatatcttgctggaatagtatgtacttttaaatcataaacagaaaggaggtcaagataaattgtgtctggatttccctgattgttcattgtatgcatgtatgtgtatctgatatctcccgataaattatcatggaacgacataactgcatttgtctcaagtggctttccgtctgtatctagcaaattaactgttactgttgttagatttgttacctgtgcaacaatagtattaatcgcttgtttaaattcttgttcatcagcagcattaaagtaattgcccatacagtctaaaacatttgcaagattgacatcaatatcgacacctacaatgtatggtttcaaaacaactccttttttttgtaaggccaaacttacttcacaagggtctccttgacacatttcaattccatctgtaattaaaatgataatatttcgacaatcatcacattctggaaaatcagcctctgattggccaagtgaatatgcaataggtgtagtaccttttggttctatggtatttagtttgtctttaatcagaccaattgtatttgccccaaatgcaacttcgagttttgaatcaagacaatcgggtggggggacaggactctgatgaccatatactcttaaagccacttccatattttcatcatcctggataatctccagagaatcaagtaattcgaacattagttcttttgctttgatgaacttttgttctccttcccaagtctcgatcatactcgttgatgcatcaaagatgaaaagaatccttgtaagtggcttttctggttcgtcaaaattctttacctgagcatttactgccagagtaaagaataatgctgataatattaaaataagttttttcaaaatatttgtttagtaatcaccaagagtttcttccagttgggatagagcattttccagttgttcatcatttggtgcaactccatgccatttatgtgttcccatcataaagtcaacgccatttcccatttcggttttcatgataatcatgataggtttgccgttaccagttttttcttttgctttgttaattgtatcaactaagtcctgcatgatatttccgttacattccattacttcccatccaaaagcgttccacttttctgaaatgtttcctaaattcattacatcgttagttgttccgtcaatttgctgaccattaaaatcaacaaatgcaattagattgtcaatttttcttgcaggagcaaaaagggcagcttcccaaacctgaccttcttcaatttcgccatcacccattagacaatatactagcttgtcctctttgtttagttttttcgctaaagcagctccacaagcaactgagagtccctgaccaagtgaacctgaagcgatacgtattccttctaatccttctgctgtagttgggtgtccttgtaaacgagaatcaattgcacggaaagtacctaattcgcttattgggaaataaccactacgtgctaaaacagaataccatgctgcagaagtatgtccgtttgataggaaaaataaatcctgtcctttgccatctgtattaaaattctcaggactatggtccattacatcaaaatataaacatgttataaggtcggtaacgccaagcgatccacctggatgtcccgatttttttgcatgaatcattcttagtaaatcacgtcgtacctgacttgctgtttgctctaatctttctattttttccatttgtcttattttaataacgcaaaaatatcattttcaggtgtattaacataatttattttttgatagttgttaacgtgggagcgaatggaatgtagaggctaaagtaatagacaaaaaaaaactcctaccgaagcaggagtacaggatctttatccttcggcataaagccttattgtgataagatgtaatttggattttattccactacaaatatattataaatgtttcgttttgcaaaataaaattattacttttataaccaaatcacggattaaagtatataaatcagaaagtattatggctagaatattaggtttagaccttggaacgaacagtattggatgggctgttgtggataaggatggagataaatttcaattgatagataaaggagttagaatttttcaggaaggagtaaaaatagaaaaagggattgagagttctaaagctgctgaaaggacaggatatcgaagtgcaaggaggataaaatatcgcaggaaaataagaaaaataagaacattagaacagctttcaaaatttggctgttgtccgaatttgacagaagaggagttgagtttgtggagatataaaaaggtttatccggaaaatgatagttttaagaactggtggcggacagatgaaaataagaatattacgccatactattttaggaatttggtagtaacagaaaagcttgacttagatgtagaagaaaatcgttttaagattgggcgtgcattatatcatatttgtcagagaagaggtttcttaagtaatagattagaggggacaaaagaaagtgatggagcagttaaaaaagcaattaagaatattacagaagaaaaaggggagttaacactaggacaatatttttatgacaaatatcttaatcgagagaaaattagggatatttatactcatcgtgaagagcattatttgagcgagtttaataagatttgtgaagttcaggatttaccaaaagagtttgttggagcagtaaaagatgcaattttttatcagagaccattgaaatcacaaaaagaattaattgggaaatgtgtttttgaaaagaacaagcaaagatgtgcaatttcacatccattatttgaagagtatagaatgttatgctttataaataatattaagataaaaacacctaatgatgaaaaattgagatttttgaattctggagagaaacaaaaaatattacctcaattttttaggaaaagtaaagaccattttgattttgaagatttggtaaagcaaattgcacctaaaaagcaatactgtttttatagagctagaaataagaagccagaatattatcaatttaatttttcaatgaagactaccgtttctggttgtccagtttcagcaagatttaaaagcttgtttggagatgcttttattgattcagaatttaactataaattaaatgatgatggaaatttgccaaaaagtatacaagaagcatggcatgtgcttttgacttttgattcagatgttaagttgaatgaatttgcagttgagaaattaaattttgatgacgaacaacaaaaagagttttcaaaaattaaactaaagctggactattcatcacttagtcttaaagcaataaagaagattttgccatacctaagagtgggaatgatttattcacattctgtttttatggctaatttggatacagtcattccaaaagaaaagtggagcgacccgtcagtacaaaaagatatttcagatgaaattaaaacattattatcaacacaaaatgaagaaaagcaaattgttgaaattgtaaatggaattattaaaacatgcagagaaaatggagaatgttggagtaatgaagcaaaagaatattttgtaaaggatattctaaaacaccttaaagcgttttatggtgcaaataaatatgcaagttttagtgaggataaaaaaggtcgaattgaatatcgtttgttgaaacttttagaagttcagatgagaaagaataatgataggggtgagtttgcaaagattgaaacaatagacgaaaaactaaaagcatatattattgagaaatttgatgtttctaagaaggatttagaaaatatttatcatcctgctgcgatagaggtctataaaaagcctttaaggaatgttgatggaaatttatatcttggatctccaatggtttctacagttagaaatcctatggcaatgagagctttgcatcaacttcgaaaagtaataaatgaattgattaaaaatgaggtaattgattcaaatacgaaagttaatattgaaatggccagagacttgatgaatgcaaatgaaaggaaagcatatcaaagatggcaaagtgataatgaaaaacaacgtaaagattattttgatagaattaaagagtattatgtatctcaaaaaatgaatacagaacctagtgctgatgatatattaaagtataagttttgggaagagcaaaatcataaatgcctttatactgggaaagaaatttgtataagtgattttttaggggcaaatcctaaatttgatattgaacatactataccaagaagtttatcatttgataactctcaagttaataaaaccctttgtgatagttcatttaataggtcggttaaacgaaataaaattccatttgaactatcgaatcataatgagattcttgcaagaattgaaaaatggaaagagaaatatgaaaatttagaaattcaaattgcgatagcagttagacagtcaaaaaatgcattagataaggatgcaaaagatagagcaattcagaaacgtcataaacttgtatttgaaaaaaggtattggcgggaaaaatatggaagatttgaaatggaagatgtgccttctggattcaaaaatagtcaacttgtcgatacgggaataataacaaagtattcaagaatgtatttaaatactgtttttgataaggtatatactgtaaaagggaatacagttgctgactttagaaaaatatggggcttgcaggatgaatatgaaaagaaagcaagggtaaatcacattcatcattgtatagatgcaattacaattgcctgtatttcaaaagaaaactatgagagacttgcaaaattttatcatgactatgaagaaatgaacatacgtggtgcagaaacaaaacctgattttgaaaagccttggtcaacatttacagaagatgtgaaaaaagttgaaaaagaagtctttgtttctcattataccgcagatgatttacctaagaaatctaaaaagaaattacgaaagagaggagtaatacaaaagaatagtaagggagaggtaatatatcaacaaggagattctgtgagaggaagtttgcataaagaaacattttatggggcaatagcacaaaataaaaatggagaaataattagaaatgcatcaggacaagtaataccaaattttgttgtcagaaaggcaatagtggatttgaagaaggtagaagtagaaaaaattgtagataaagcagtaaaagagaaagtacaagctgcaattaaagcaaaaaaaatagtttttgctaattctgatacagcaaataataaaatacttgaaactatttggatgaatgaaggaaaaaagattccaataaaaaaagttagaatattccaatctcaggttaaagaccctttaaaagtgaaaaaacacagggatataagtttaaaagataagtatttatacaaagaaaattattatgctgtaaatggaggtaattatttaatgggaatttttgaaggtgaaaataataaaggtaaaataattagagattataaaataataaacaatatagaagcagcaaatatctataaaaagacatctgaaaatgatttagctggtttattggatggatatactgatgtagatatattgtcggtttttaatgagaatatgtctttattgcaagtaataaaaccagggaatgtagtcttattatataaagaatcacctgatgaaatttggagtatggataatatagaaatgcaagaaagactatatattgttagaggggtagacagtgatggaattaaattgtattttcataaggaagcaagaccaacaacagatgtgataaaagcgatgaataatcagattgatgaaagatatagagatgaattgctgttggatttaaaatataccaagaagcaactggaaaagaaaggacttgttattcaatctgaaaaagagataaggataaatgctattcaggaaggtgcaaaatttgaaatatataatgtaagcaatgaacgattatgttctgtagatgatattaacccatttcttaaagtaagtaaattgacaacgccaaaaggtggtgatgtaatcggaaagtgtagggaatttccttatgttaagtttaaggcgagtaattttaatgctcttattgaaggagtagattttagaatttcccctcttggaaaaattacaaaattataataatcatgttaaaacgaaccctatttttctcaaacccttaccggctaagtttaaagaacaatcaattggtggcagaagcaagagacggaagcgatacacgcactgttcctgttgaggatattggttttgttatactggaaaatatgcagattagtataagcatgcctttgcttgaagccttagtggcaaataatgttgcagttgtgtttgccgattcaaaacacatgcctcaatctatgcttttgaatcttgattcgcataattcgcagacagagatattccgtaatcaaataaatgccagtcagcctttaaagaaaaatttatggaagcagacaatagaagctaaaatcaaaaaccagtcaagacttttgaaactatatgacaggcaaagtcttgatattatgaaaatgtcgagagaggtaaagtcgggagatactgaaaataaggaaggtactgctgcccggacttattggccaagactaatgggtgagaggtttatccgtgacaggtatggggatccgcctaataatttgcttaattacggatatattattttgagggcggcggtagcacgttcgcttgttggttcagggttgttgccaactcttggaatacatcatagaaataagtacaatgcatattgtcttgccgatgatattatggaaccatacagaccctatgttgacaggagagtttttgaaatgtttaaaaaagacccggatatttttatgcttgaaaaagaacataaagcagaattattaaaggttttgacagatgatgttattattgatgaattaaggcgtcctttaatgattgctttgtcaatgacaacatcttcgcttgcaaaggtttatgcgggtgaaataaaaaatctgaaatatcctgatttaagataatggaacagttacgattaaatgcatatcatattatgtggctatttgtatattttgatttgccgacaagtactaaaaaagagcgaagggcagcttcgcaatttcgtaagaaattgttgcaggacggttttacaatgatgcagttttcggtttatacacgtcattgtgcttcaaaggagagcctcgatgttcacgttaaacgagtagaatcttttattcccgagtttggctctgttagccttttacgaataactgacaaacaatacggagatatgataaattttattggtgtaagtaaacaggagagtaaaaatcagcctttgcaattggaattgttttagatataatttgttctttgaaatactggattaaaatcctaaatttgcataatcatgccacttcatagtagcaaaaagtcaacttttttgtgatagaagttaatataaagcccttgaataatgggcgttttgaagcgctatgttgtggtttgatgtaattttggaataagatacaactgtatcagatacgactgatgatgcagggaggttgtggtttgatgtaattttggaataagatacaacataaatctgattgatgcaaacacgagcaaagttgtggtttgatgtaattttggaataagatacaacttggtatcttgaacaggcaacagatgttcagttgtggtttgatgtaattttggaataagatacaacggcaaactatgcgtaataatctgattatcggttgtggtttgatgtaattttggaataagatacaactggataagtaaacaagtttgacactcctgtgttgtggtttgatgtaattttggaataagatacaacattttcatgataaagggttgcctgtaccaggttgtggtttgatgtaattttggaataagatacaaccaaggcttcaaaattatcatcaaattacaggttgtggtttgatgtaattttggaataagatacaactccctcgcataagcaagggattcgtttactgttgtggtttgatgtaattttggaataagatacaacaagaggtcaaggaactaactccgcttgaaggttgtggtttgatgtaattttggaataagatacaacccgtccagcttgtaccccttagggctgttagttgtggtttgatgtaattttggaataagatacaactaacctttgtttgttatgtctatcgaaatggttgtggtttgatgtaattttggaataagatacaacgaaccgattccgatatcgtaacttctgttggttgtggtttgatgtaattttggaataagatacaacatgcttgttcaaatgcatatttagctacttgttgtggtttgatgtaattttggaataagatacaactcgagtaaggcgcaccactgccagacatgggttgtggtttgatgtaattttggaataagatacaacattactaccgtacacattaacgataaatcagttgtggtttgatgtaattttggaataagatacaactaaatcttttccattgatgaataagcaacagttgtggtttgatgtaattttggaataagatacaactgcccgtaggcaacttcactagatttttaggttgtggtttgatgtaattttggaataagatacaacccgtcagcaaaaacaagtgtagttttttcagttgtggtttgatgtaattttggaataagatacaacaagctcatgaatcatttgtccagtatgggggttgtggtttgatgtaattttggaataagatacaaccaataccagcaattgtacgtgcttgttcagttgtggtttgatgtaattttggaataagatacaacggatttcaaatgaggctacaccacttgatagttgtggtttgatgtaattttggaataagatacaactcctaatgaataaggagcaagaggggaatagttgtggtttgatgtaattttggaataagatacaacttctcacttatgatgtagcttgtagttttagttgtggtttgatgtaattttggaataagatacaactctatgtttgcatcggaactaatgttgaaagttgtggtttgatgtaattttggaataagatacaacaaactcagatattttatatatctgagttttgttgtggtttgatgtaattttggaataagatacaacaacctttgatttgaagtttttgacgttgtggttgtggtttgatgtaattttggaataagatacaacctgtattttgagaaccagctgcaaaccagcgttgtggtttgatgtaattttggaataagatacaactcatagatttaacgagtaagtcctaaaaggttgtggtttgatgtaattttggaataagatacaacaaaaacctaaagtgtccataatcaaacttagttgtggtttgatgtaattttggaataagatacaaccagcgtttgaattttcaggaacatacacgcgttgtggtttgatgtaattttggaataagatacaacaagctcatgaatcatttgtccagtatgggggttgtggtttgatgtaattttggaataagatacaaccagaccaattcttataatcaacatttagttgttgtggtttgatgtaattttggaataagatacaactgagtgttgtgaaaggtgtattcatatttggttgtggtttgatgtaattttggaataagatacaactaggctctgctttagcataaacctctgaacgttgtggtttgatgtaattttggaactagatacaaccttattggattgattttgttgtaggtagtggttgtggtttgatgtaattttggaactagatacaacaaaagaagaataatgaactaaatacaccccgttgtggtttgatgtaattttggaactagatacaacaaaactgaatttttgacctatacagaattagttgtggtttgatgtaattttggaactagatacaactttttggtaaagattggatattcattgcgagttgtggtttgatgtaattttggaactagatacaacagaatagcgaaggaggaagaaatcgcaaagttgtggtttgatgtaattttggaactagatacaacttttatatttaaatgattaatgtaaaaaccgttgtggtttgatgtaattttggaactagatacaactcgaccgtcaaaacgcaacttgtattaacagttgtggtttgatgtaattttggaactagatacaacccgactacttaagaaaagttaacgaattgtgttgtggtttgatgtaattttggaactagatacaacaataatctaagttgacgcacgtgtagctcagttgtggtttgatgtaattttggaactagatacaaccatttattacagaacccttaatcttatgaggttgtggtttgatgtaattttggaactagatacaacaggtattggaatagttcaaactacgacacagttgtggtttgatgtaattttggaactagatacaacaatatcggtaattatccaaaagacatgggtgttgtggtttgatgtaattttggaactagatacaactttattgtttcggattattgcaagaaattagttgtggtttgatgtaattttggaactagatacaactaaattcttgattttctccattattattccgttgtggtttgatgtaattttggaactagatacaacttttttggatagaatcaataatagtatcacgttgtggtttgatgtaattttggaactagatacaacattaaaatcggtaaatacgaactatctatagttgtggtttgatgtaattttggaactagatacaacaaaagttggtattctgtaagtaccgcgtaggttgtggtttgatgtaattttggaactagatacaacaacaatgacatcaaatccattcgagtatgtagttgtggtttgatgtaattttggaactagatacaacttaggaacttcaattttatgccccgttaaggttgtggtttactccctaaggtcgtgagctccgctacgctccggttgatgtaatcttggaaaattatttaagctgtgttcaatatttattcacaaaacaattgattttatcggtgttcatgatcttcgctacgcttcggttcaaagatacaaaatgaaccgaacaaagtgagttcaccagcaccgctaaaattaaaaaataagttgctggtaaagcaattcacaatctagcggcatttattaagacaactacgaggctgtgttcaatatttatttacaaaacagttgattttatcggagttcatgatcttcgctacgctccgtttcaaagatacaaaatgaaccgaacaaagtgagctcaccagcaccgctaaaattaaaaaataagttgctggtaaagcaattcacaatctagcggcatctattaagacaactacgaggctgtgttcaatatttattcacaaaacaattgatattatcggtgttcatgatcttcgctacgctccggttcaaagatgcaagttagtaaaaaaatagaaacaaaaaaggctatcaatcagcaaaatagcgtcatgatagcctaatgttgttttagtagttaaatgtcttatttaacagtaatcttgtgtgtgttagtgttaccgttgatagtttcaacttttaagatgtacattccatgttttaagtcagaaacgttaatttttaagttgttgttttcaacattgattcttttaacattttgtcctaccatattgtaaatgtttactgtagtgatattactttcagcagaaatataaactacattgtcagttacaggattaggataaatttctaaaccgcttatgttcttgcctgcaacaccagattctaagcttacgtcgtcagcagaacgagggtttaatctgtaataatcgtaagagtaagatacaataccagtaatgtaataatctgtacttaattctggtacgaatccagcttctacatatctccatgctaaatcatcgaataaacatacaccggaaccatcattaatgttaagttcattatattctgttggagtagtactttcaaattgtacagcattaacagcaactaacatactttcgtattgttcgtcgtttacttctgtagtagttaatagaattgggttaacagtgtttccagaagagttaacagttaaagataaaatgttttgtaattctgtccagtcaaaatattcaatgatctgtccttcaatagtaatgttgtcaccaacagcaataggagatgatggtccatcgtttccaaaatatacatataaaccattccatccagtttctccatcttggatagtagctttagtaataacaccatcctggttaggaataacagctgttacaacaccagaagtcgttacgatttggtcaacgtaaggagaagtttctgtttgtccctgaatgtcataaattgttgtttgagcgctggctccaatagcaaataatattgctaaacttagtaaaattgttttcatgttttctaaaatttaattaataattatttaaaaagttactttaatcgaagcattaaatcttcgtcccatacccataaataccgcagctgatttagcatcaaaatcggaatattggtattcattgtatgtgtcattattagaagcgtctgatatatacaatgtgttaagcacatttaatattccaaagcttactttataatattgtttcccgatttttcttccatatcctgcatgtatgtcaagtaatccataatctggtaattcccatgattggaatggattgccatcgttatcaaagttctctggacttttagttggatctaaatccagtggattaaaatctgagtaatgtctcataaaatatctatacgtagtattgatataaaggtttttaattggctcatatcttaaacttgctgcaaattgagattgtgcagcatcaccaaccattaagtcctcggcattataaaatattgtttctacatactgttgatctctatcataaacttttacagaatcttcagatgcccatttccaatctccaatagaaactaatccctgaaaatcaagcttgtctgtgaacttataaatgaaatcaaattcaactcctctatgaatagcatccattccattaatgtttacataataaatactaacttcatctgtgtgtgggtcacgatattcataagaaaatccacttgatggtttattttcccaaatagtataataagaatttaattttgctgaaaaagaagagctaaagtatgcaagaccaagttctacagcctgaaccttttcgttttcaattgcatcgaacaaattgttatcgtaatcatatacattgttgaattttggagcattactcatgtacccaatatttgtaaatgcatttaggtgttcattgatattgaagttgtagccagctttaattgtgaatccaggaatccagaaccaatcagtttcagtatgtcttgcgttagtagagttcattgtataagcctgaccattataataaactgtgtcatactgacctgtaacatctctcaggtttttaaatgaatatccaacagcttgttccattacagtatcttcaaaaacaagatccatctttttaaagtaatcaattcttttgtaaccagagtatgaaccggtaacatttacaaatgatgatgaacgtccgtttttatatttaagttgagagaaaactccaccccagttaactaaaccatcattatgatatcctgtaatgtcaccttctttcaaaaacttgttagtgctagttttattagtcgtttcaattgagtaatcagcacctaacatatcgtcaatttgcttgtagtgagaacctttgtatgacctgatgtctataccagaagagagttctagcttttcagtaatattataatttacagttgagattaatccataccaaaagtgttcgtttttagagcttcttagataattgctcgctgaatatcctgcaggaaaatcttcgatgtattcactccaatttgtaactctgtttctgtcataaatatgctgaaaatcgagttgcccgttgtcatcaaattttacacctgattgagtatttaatcctgttccaccacctctaccaattgataaatatgctatgtttgagatatataaattttcgtttacagtccaaaaatcgcgaagagtaaacattggtttgtagaagtagtttgttttttctgataataactcttgtccaccatgaatagtgtctccactttcgctaagtgtccaacgatccacatatccccagaaaggattatatctaatgccatgatcggtattaactctaggagtagtatctccaatactattaatgtaattgtcggtgttcatgcctaagctttcagcatattctttgctgtaacggtcaatttctcttttatactttctttgtgcatgtacttgtggtgctcccatagcgtcgaaagaaataaggtgatttcctgctcttttttgaactttagcataatagaatccagcttttgaccatgcattgtcaacccaaccgtctctctgtttgtatgagcctgcaacggtgaatccccaaccattgccaatagttcccgaatttaacatcagtgatgttctgagatacatgtcagaaccaacttcttgcttaattgacattgattttttgttgtcaataccttttgtaataatgttcattgtaccacctacagaaggtaaagctaattttgaacttgcaagccctctttgaatctgaatattacgtgttacattgtctaaaccaaaccaatttgaccagtatacccatccgttttccatatcatttacaggaacaccgtctatcataatcgcaatgtttctttgagagaatccacgaattgtaattcttgcgtcaccatcaccaccaccttgctgtgtagcataagcaccgggagtgttgttaagtaacattggaatgtcttgttgtcctaattcttcttcgattttttgtggtttaattgatgaaaatgccactggagtttctcgtaacttcgcaatatcagcaacaattgttatttcttgcaacattattggtgataaatcaaaatctaatcttacacttttatttacaatttcaatatttttggttatggattcatatccaacaaaagaaacagttacagaataagtccctggatttacatttaatgaatattttccttcaagatctgttgaaatgcctgttccatcatttaaaataacgttggctccgtaaagtccgtcaccaatatcagtgtcgtttacatttccaaaaatgcgatattcctgaccacttaatgtagtagcaataaatattagacaaacagtaaacaagtaagtaaatcttttcatatgcctttatgttaatttttttgaattctcgtaataaataatattacaaaaataaagattattattattagttgacaaaatacttattaacttaatataaaattaataattatatgtagaattactgctttggatgtgacgaaattactgacatactattatttagcctttgtgaataacgctattgcttaaaataaaaaaatgagcttacattacttaaatcaaatataaatgtaattaaaaatcatatttttattatttttacaaaaaaaagagtgaatttagaactttttatagcacgcaggcttgtaagtaagcggcattcgaaaaatagctttagcagaccaattgtttctgtagctattgcagggattgctatcggtttagccgttatgataatctcggttgcagttgttacaggttttaaaaatgaaatttcccaaaaagtaataggttttggttcgcatttacaaatagtaaattttgataataactcatcttatgaaacatatcctattactcaggatcaggattgggtagatgatataatgcatatagagggaatcagatcggttaacaagtttattgtaaaggctgggattgcaaaaactgatgaaaatcttatcggagttgtttttaaaggaattgatactgattatgattggagattctttaaacagtatcttatagctggtgatactcttagtgtgaacgattcgagtaagataaatgatgttttgatttcggag

SEQ ID NO: 1511 - DNA, 24056 bp, synthetic construct
  misc_feature 1..24056: note = Synthetic
  source 1..24056: mol_type = other DNA
aatcagcccagccaacaggcattgtcaaagctattcttttagtgttgcgaacattcagatttcaaaaaaataattaaactttggggcttacaaatcaggaaatggaaagaaactattacatgattaacagcccaaaactgctatttgtggttttggaattacataagcgtggctacgaaaaattacatattgtacctgctctggcgcccagtggaatggcgtggagatgtactttcgtatcagaaatgtataaaagtgtaagagcaacagaatggttcgaagaatttgcacgggctgagcgggaaatcaattatacgattgaagaattgacggattggtttgaacgtgatcattctgattttctggaatcttgcagaggacgaaataccgattatctactttgttttagaggaatgttgaaccagttggaaaagggcgaacttccctatgctttggcagagtatttctatgaaactgaattctggggtaccacaaaacaaaagaagattcgaacattgcccgacgaaaatcgcttttacagctatttgtagttttttttgcagaacaggtttgctgaatggagcagaaagtatggaataagctttctgaaattagttgaacgttgagcggagtaagtgaaaggctgagcttttgggcaattcatctttgctgtgtcctaaaatgcccattttacacgtgcataaactgcttgtccgtaatcgccgtattctgtcccatcacgtccgaaaaacagctgaccgttgagcattaactcccagttattccccaacgagtaggttaaagccggaccaagaaaggaagagccatcgcagggatttaccatggctgacaggttggtagaaaataagggagtaacaggataactgatttgcccgaacagttgatatttgcctaacgaaagcattttggcagaaatatcgggagcaaaaaaactacgaccaccggcatcgcctgttgttccgtagctgttgaataaggttccgaaatgcaggtagaaactattcgggaatgtataatctgccgaaaccgaagcgacaaaagtttcgaagttcgctgtgttgcctttatcgcgcggacggaaccaggttgcctcaccccgaaatccggcacctttaatatcgccggcccaaccgccaccaaaaacaaaatctttaccaacccgaccacccaaaaattggatgtcgtaatcaaatttcgaaaaccggtacatgccggcaatggccgtttcatcactattgtgaccaattttataaaccagttctgccgaagaagttacaccggtataatattgcacccgaattccatcggttccggggcgttcttcgtaatcgaaatcgaagtaggaaaaggtattgaacacatcattcggattcgagaccaggttggtgccccagttaatacgctgtcgtccgagccgtacctgaagttttccgctggtgtaatcaacccaggcccggtcgagcatggtgtgtaaaaaccaactgtcggccgagagcaacaccgttcccatatcgaaataaccgttgtcgtcatcaacaaaatcttcgtaatcgggaaattcacgaatcatttgtcccatgtaaatgcggttgcgggcttccagtgcgatggtcagtttgtccgatgcataccacttgaaatttaagcggttgtgtatctcattcagaaaaaggtaatctagcgatttatctattgaaaccggaattggctccaccggatgataatacatacccaaatcttttacgtagccgtaaaacgatagcttcggctgagcgtaaaccgcagtgctaaaaaatagtagcgatagtatgagtaagttttttttcacttctgaatactgttaaatcagggattctctgcttcctacatcttctgaatttttattggagatgtgcgtttcaacatggcttgattttgctttctttcaatcgtcaatctaaaatcgttaatagatattcgtaattcatcagttgttttccattcctcccgccaaatccattacacacatggtgttgtattgtggatgtgtgccgcatgcaactccaagagatttaaaatccgcttgaagaagatttgcccgatggccccggtttttaaccccatcgtctatcaacagaaatattacgatttgccgtgccgaagtatttccataggcaatgttctcagctatgcgtacctgccactttccgtagcgttctattcgttcttttgagtttgaaccatcccggcctatgtgtccggttttgccggttttggattggtctttctgatgatcgttggcagctttagttaatagtttgtcgggatataaaatcggagcaggaaccgcatttttcagcgctcgtacacattcacgcaatgcgcttacgccttcctgcgtcagtatcgatttatcgccggggtaatgcaatattcttttgtcgtaaaattgggcgaggggagcaatatatttctccgcatattccgacggatttgagcggaacaagttgatctcgtagatcacttccttctcgagctccgacaagtagctaacatcggctgccgtgtttaatgtacggtcttttagttcttcttttgccgaaactcccaggcacagaccgattaataaaatcgctatcgaaattttcgtgattctcattacttaattttcatgtgttagagccaccaataatgtggcctttactttctctcatcgcttattatttttccatcctcaatggtaattacacgccgcgctttgtttaccacccgctggtcgtgtgttgaaaatagaaacgtaattttttcctctttatttagttgctccataatatcgagcaggttttcggtagagtgcgaatcgaggttggcagtaggctcgtcggccagtacaaattttggtttcgatgccaacgcacgtgccacagccaccctttgttgctgcccgcccgaaagtttcgatggccggcgatccatcatttctcccaagccaacagcttttagcaattcgctggttcgtgcatcgcggtcggctttttttcttccctgcaaatgcataataaattccacattttctttggccgtaagcaccggaatcaggttgtaagcctgaaaaacaaagccaatatttttcatcctgaaatcagtcagtttccgggatgataaatcgttgattttaacaccgtcaatttctaccgatccttctgtggcgtcatccagcccgcctattacatttagcaacgtggttttccctgatcctgatggaccaacaatggcagtaaattcaccttcttcaaccgacatattaatgccgttaaccgcatgtacagaaacggagctgccgttgtaaactttgtgcaggtttttgatttctattattttcatatcaatgctttattgattcaatgcttcaatgcttcaatgcgaaaatgctttaatgccggaatgctttaatagttgatgctgagcattaatggttattatttttgttaattgtgtcttttaatcttatccttttattttaatgatcttctttttctcatttaagcatttaatcctttatacatttacgcattaatctgttctggttgcttccgcgggatttagcttcagcgcttttcgtgccgggtaaattgcagaaatcagtccggttaataccaccaatgctattaatatgccaagcgagtgcgatggaaaaacggttgcaatttctgttgacatgccgtattgttccaaaccctgggcaaatgccgaaagattaattgggtgattctcgaaaattctggaaatgccgattcctaaaagtattccaacgactccgcctgtcagcgtaagcattatcgattccagaatgatcatgttaaagatttttcgattgttcattccaaccgccatcaacattccaatttcctttacgcgttccagcacagccatcagcatggtgttgataatgccaaaacacaatgcgaaaagaatgatcaggataaaaatgtacatgtactgatccattgaatcggtaatgagcgacatttccggactcagttctttccaggtttgtacgtccagtgctttggctattttttgcaccgatggttttaccaatggtgcgtaactgttgtctttaagcagaatggcaatctcgtgaacagcatcgggttgaatgccaatttgcgattgcaggtcgttgatgttgacaaacaaatgcatttcatcaaaaccggtgtttaccgttttgtaaatgcccgccacacggtaaccttttgatgataaatcgccgttaaaatctacgagctggacatttattttggtgcccacctttaatcgtagtttatcggccagttttttacccaccagtactggtggcatccggctggttttttcaaggtaagtaccatcaaccaggtgttcccagatgtcggtcacctgcttttccttttccggatcgattcccagcatttttccgccgcccgttccgtgagctgccataataaacggctcagcaatcagacggggagaggcagcttctacagaatcgagtgctgcaattttttcggccaaagcaaaaccgtcgggaataaataattccgattcggtgttatccagaaaacctggagcgtgaacttgtatgtgcgataactccgattttgtggccgattcaatccgcgaattgtacatgccattcataaatgccatcatgaatattcctgcaaacaggcccagtgcaatggccgcaatcataacgatactgcgggttttgcttctccaaacgtttcgccatgctattgaaagtatcattttgttttatttaagccggaagcacgaagtggtactcttcatatccaaactgttgtattccttattattattcatcttcattattgtgagaactgaaaactattactgagaactgaaaactgcgactgtaaactttcttacgctcgcattgcctttgtgatttttaaacgactaacattggatattgggaaaatcgttataaaaatgctgatgatgaaaaccacgatcatctggttgtaaaagagcgaggctttcatggaaacgaacatgtatggttccatgccatagatttcggtggcttttgccatgtcgccggtaagcggaatcgggttgtagaaaaagtacaggcagaaaaagtaactgattatcaatcctactgcacaaccgataaatccgataaaaagcgtttcgataaaaaccagcgaggctagttttcgtttttgcattccaatggcgtgtgtaaccccaaattcgcgctggcgttctttcaccatcataataaccacgctaaacatgccaaaggcgataaccaggtagagaatgcccagcataataattccgccgccgcggtcgctttgaattatttgcaatagttcaggagtcatctctgtccaggtcattacggtgttcttttccggcaggattcgttcgatttcttgtttaatgtgatttacacgataatgatcatcggtcattaccaccagcgaagtggataaaccataggctgaataaaattcgcgggccgtttcaatttccatgtaaattaagcgcttgttaaactctgcgttaggatgtttaataattccttttatcggaaacaggccactcgcactaatgccgtggtagccttgtgagatcatcaccagtgtatcgccaacgcccagttccaggtatttggccaatcctccgctgattaccacttctttatcgcctgatttaagaaagtctcccgactgtatttttttcgaaaggttggtgatctgatcctcggcttcaggctcaatacccatcaccatgaccggtttgcttttcatgtggtcggcagccagcgaaaacgattccagccggttcgaaaccagcgaaacattttttatctcctttattcgattttgtaattcagaatctacctcaaagctgttgtcaagcgtgcgttcgtcccaataagcagtatcttgtatctgcaaatagccggtgtagaattttacggaattattgatcatgctgtcgtacgaaccttcctgcatcgatcgcatatacgaggccagcaacacactaaacacgatagacgatatggcaatgatagtccggcgtttgttccgccacaagttgcgccatgctagttttaggtttgttctcatttgttaatgcttaaatgcgttaatgcataaatgcttaaatgttcgtttttttgtgacaccttcttaatattgatactatttaccgttgaggtttttgtaagtggtatcttttgcttttgtcatgatttttgaaatttcaatagcttcttttatcaggcgtgtcagctcttttggatcaccagataagtttgcttcttcaatcacttcgagccagtacaatgattcgtcagattcttcaacaacaatacaaactttactgaagaactctgattttgaacgtccccggcaagctgccctgtaatttgctcctgttgatgttgctgatttaataagttgataggtaataactgaggttgctttgcaattctttaacgtttcacaaaaaagaataatatccaccgcaaacttttttgttcgttgttttagctcttcaataaatttatcttttgtattcatccgtttaaaattttttgatttctgaatgttcaaaaaatttgaatacattcaggaactcacataaattttaatcattcttgtttttgaatttatgatttaaaaagttcatgttcgtttcatagtattatctttattagttgacttaaaattaaagcattaaagcattgaagcattttcgcattaaagcattgtcacctgattctcttcatattctgctgcgagaaaaagctctctttcaaatcaacgtcaaactcaatagcgtcaaaaatcataactgttttgttgccttcttcatcggccggaatcatttccaggcgtgttggcatttctcggtcgtccatcatttttatattcgtcagaatttcggtatttaccaggtagccgtcttcgtcgtaaaactctgctttcagccagtgcagttcttttttcgatatccacatcatcacttttccccaaacaacgggtgcatcttcgtgtggtatcaattcaattttgtagcacgaataaccgtcaacttcttcttcggccaataatttgttggaatagtcttttgccatttgcgattcttttaccaaatcgtcgttggtaaaatccgagcccatccacgactgcatcatcatcgagggcggaatttttatcatccgctcaatgttaggcacccaattccacatctctttatcgcgtttcagaaaaacctggcctttttctttggccggtgcggtaatgtaaatcagcgaatagtcgtttcccagcgtccagtttttcatcgatactgttcggctccatcccgggcgttcaataatcatggttatttcgctgcggctcgattcgcccctgaatttttcgtcggcttgttttataatggcggtcatgtcctgggcaaaaactgcgagagccaaaagcactgttgctattgtgagtactatacgtttcattattcgttgattttaaatttcatgttacagcttttttatcctgtacattgggagcatacagctgtggcaattaatttaagcgggggcgcggttacttgttgttttaacttttccgatatgcttaatttgttgcagacggccccgaattttttagtcataaccaaagctttggtaaaagttatgcgatggctgattcaattgcaaataaattggagaattattgaccggctattcagtaaaaataataaagcgtagccgtaagggattaaaaagaagggtaggtgataaaaaaggttaaattatgcgaacaattaaagcaatgcagcaattgtttcaaacatttgaaaaattacttgctttctttgcgcccaattgttttaacagaaccggggcctaattaaccccgttatttataatttacgtaaatgaaaatatttgaaggacattctttccatatacccgttctgggtgttggattttcaatggacacacctgtaaatgtagcacccttcggaatttcatcggtgatttcgcttgttgacgattcactgatggaaacgatacgcgaattctactgtaaaaagtttgatttgccgtttactgccatctctaaaaaagtggatgaccacagggcaaaacgcataacatcgtacctgaatacgatggaagaagtggtaacccaaaaggtggaaagcctaaaagcatcgctgttgaatgttggtggcgaattggaaaaatattacgatatgcttcctgaagcatcggaactgaaggcgaaattcaacaaccttggatttaaaaaatcagtaagcgaagaactgaagaagtgggtgaacgagaaattaccggtagggtcgattgatgtaaacattatgaccaaactcgaccaggcgaacaaaaaagatggcgaagaacttcccatcgagtataacgatgcacatgcggcactgcgtggttttgccaacagtaagctgagttcgtcgctggtgctttcggccggaatgagcccgcgtttgtacagctacatcgaaaatttcaaggacttctttcctgatattaccggatcgatgaaaaagaaaattattctgaaagtaagcgatttccggtcggcactggtacagggcaaaatgctggctgcaaaagggctttgggtatccgaataccgtattgagtcgggggtaaactgtggtggacacgcgttccctaccaatggtgttttattggggcctattttggaagaattccggcagaaccgccagaagttattcgatacctgtgtagaggtttataaaacggcgcttcataaaaaagaaatttcgcaaccggcagaagatccggaaatgaagattacggcgcaaggcggtgtaggaaatgcagaagagcacaacctgctacttgagcattacaacatggacagtgttggctggggatcgccgtttatgctggtgcccgaggtggtaagtatcgataatgaaacgatgaatctgttggccgatggcaaggaaaaagattactattacagtggcttgtcgccgctgggggtgccgtttaacagtattaaaggtgcatcaatgagtaatttgcgcctggccatggctgccgagggaaatgccggaatgccttgtacgaaaggatttttgcgctttaataccgaatttaccgaacagccggtttgtaccgcatcgcgcaaataccaaagtaaaaagctacaggaactggaaacgatgaacctgcccgaagcagaatacaaaaaggcctacgataaaattattgaacgcgaatgcctgtgcatcggactgggaatttccatgctgcaatcgaaaggcattgcagtaaaggaaaacgaaaaagtaaccgtttgtccggggccaaacctggcttacttttcgaaaatatcgagcctgaaagaaatggtggatcacatttacggtcgtattaatttgttggataaaggttatcgtccgcacatgtttttgaaggagctgagtatgtacctcgatatttttaaggagcgtatggaagcatttcagaaaaatgccgacgacgtaaaagaaaaacgtaacctggtaaaattcaaaagcaacctgatggacggcatcgagtactacaaaaacttttttggtgaaaagaaaaaggaagtggttcaggaattggaaaaacttattcagaactattcagtgctgaacgtggaattgtaagtttttacatttaaacgatacttaagcgggattcatttggttgggttccgctttttatttgtattaaatattagaccttcaaggttttcaaaaccttgaaggtcttgtggttaaaatcaggcacaaaaaaactcccaccgaggcaggagtacaggaatttctttcctttggcatatagccttattgtgataagatgtaaaattgaatttctatgttattgaacagatgctttgcaaatgttcagtaaatatagtgtaaaatgatcaaatttcctacatttaacatcatatttttttcaaaaccttttataaccacaataataatggctaaaattttaggactcgacctcggaacaaacagtgttggatgggctgttgtggaaaaacaagacggagaattttctttgttagataaaggagtgagaattttccaggaaggagtgaaaattgaaaaaggcatagaaagttcgaaagcggcagaacgaacagaacatcgcagtgcccgaagattgaaattccgcagaaagctacgcaaagtaaaaacccttaaaatgctttcggaatatggttattgtccgccattaacaaacgaagaattagacttgtggcgatacaaaaaaatatatccacaaaatgttagttttcgtaattggtggcataccgatgagaagtcggaaaaacacccttacttttttcgaaacctggcaataactcagcaacttgatttaaccaacgaggaagacagacataagttaggtcgtgcattttaccacatggcgcagcgtcgtggttttttgagtaatcgtctggaatctaccccagagaatgaaacagggaaagtaattggtagcattaaagaattgcaaaagaagaagggggatagaactttaggtcagtatttttacgaagattgttatttgaagggagaaaaaataagagaccaatatactcaccgcgaagatgactacctggatgaatttaaacgtatatgtgcatttcagcatattccggaagaaatacagcaaaagttacacagagctatcttttaccagcggccgttaaaatcgcaaaaaggattgattggtaaatgtgtgtttgaacccaataaaccccgttgtgcagtttctcggccggagtttgaagagtaccggatgctttgttttatcaataacattaaaataaaaacacctgatgatgaaaagttgagaccgctcaatactgaagaaagaaaaaaaataatcccacaattctttagaaaaagtaaagatcatttcgactttgaagatttagccaaacaacttgcacctaaaaaacagtacaaatattacagggacaggaacaaaaatcccgaggattacctgttgaactattcaatgaaaacaacggtgagtggttgccctgtttcggctcgttttaaagatttatttggagccgattttattgatgatgatttctctttcgtgaaagacagcaataacagaacgcccaaacttataactgatgcctggcatgttctttatacttttgattctgataaaaaattgaaagaatttgccctgaatcgtttgaattttactgatgagcagtgcacaacattcctgaaaatccgcttaaaacaagactttgcttcattaagtctgaaagcaataaacaagattctaccttatttgcgcgaaggtttaatttactcgcatgccgtttttttagccaatatggaggagacagtgcctgttcatatctggaaaaacgaagagaatagaaaagtaataagaacggccataaaagagattattgaaaaccattcggacaataccacaattgtgaatatggtgaatggatttattaccaatgcccgacgagaaaatgaagtgtggagcgaagaggctaaacagttgtactttaatgatctggacaggaagataaaaacgacttttggagcaaagcggtttgaaaacttttcggagtataaaaaaacgaatcttatcaacacggcgcaacaattgataaccgaatttatgcctaaaaaccttggaaaaggagaacatgtaaaagtggatcgcctcgacgaagctgttttatcatttctggccgataattttggaaaggaaaacctcaatgcaaaaaagttatatcatccctcggcaattgaaacttataaacccgccaaaagaggaaaagatggaagactgtatcttggcagcccgatcacatcgtcagttcggaatcctatggcgatgcgtgcgctgcatcaacttcgtttggtaataaatgaattgattaaaaacggtttaatcgataccaataccaagattaacgtagaaatgtcgcgcggtttgttaaatgctaacgaacgaaccggattaaagcgctggcaagacgacagggagaaaaaacgcaaagaatatgttgatcgaataaaagaacacttctcgcccgattatcaaccttcggaagatgaggtattaaaatatcagctatgggaggagcaacgacgcatttgtttatataccggcaagccaatcagtattgaagattttctgggagctgatccgaaattcgatattgaacacaccataccacgcagccagtcgtacgacaattcgcaggaaaataaaacgctttgcgaaaatgagttcaacagaaaggttaaacgaaatagaattccttacgaattaacgaaccacgccgaaataatagtacggatagagcattggaaagaagaaattgagaagctggagaaagagattcaaaaggcagttcgtcaggcgaaaggagctgtcgataaagatcaaaaagataaggccattcaaaaacgtcatcagcttagctacgagcgtaactattggcagaataagtacaagcgctttacgatggaagaagtgcctgaaggctttaaaaacagccaaatggtagatattggtatcattactaaatattcgcgactctatctgaaaaccgttttctcaaaagtatatacagtaaaaggcaacaccgttgctgattttcgtaaaatgtggggcctacaggatatctacactaaaaaagcccgtgttaatcacgttcaccactgtatcgatgccgttacaatagcttgcatggataaaagtaattacgagactctggctaagttttatcacgactgggaagaattgtatgttgcaggagtcgatcaacttcctccggtaaataaaccttggccaacttttaccgaagatgttaaaggagttgaaaaagaaatactggtatcgcaccatacccccgatgtgttgccaaaacaaagcaaaaagaagctgcggaaacgtggaaaaatacagtacaataaaaatggtgaaccaatatatcagcaaggtgatagtgtaagaggcagtcttcataaagaaaccttttatggagccatagaaagagaaattctgaataagaaaggcgaaactgaaaagcaaataaaatatgtagtaaggaaaccgcttgacggtttggaagattcggccattaaaaatattgttgacgatagagtgcgcgaaattgtaagccatgcacggaaagaagaaaaggaaatccaaaagcaaattgatgcgcttttaaaacaacgcagaaaagccgaagaaaatgaagaagctgaaatcgataataaaatcgccgaactaaaacagcagattgttgaactatattctctgcccaacaaaaacggagctcctgtgcctataaaaaaggttcgggtttatcaaactcccaaaggaattttagaaataaagaagcatagagattgcataaaaaaacataaggcaaactatcttacagaaacagatgataattacattatggggatttatgaatattctcagaacggtaaaataaaacgcaagtttaaagcttataacaattttactgcttctaattatttgcgttcagatattaaaaaaagcttatcgccacaaggaattggagcaattagtgctatgttgccgaataattttatcaacgaaaagggcattgaattaaaattgaaggctgcacttaagataggaactcttgttataatgcacatgccagatgaaaatttaaatgatcttaccaattgggatgacctgcaaaaacgactatacaaagtatatggatttagaggagatgatggccgaattaaactacgatttcataatgaagcgagacctgataaggaacaggagaaaccttctagttcattttcacttgatattattcattcaaagcttattatatcactcggcaatttccacgctttaattgaaggcatagattttaaaatcgacccactcggaaacataaaacgtattaactaatccttcaaggtttccaaaaccttgaaggatttggggcaaccgaaaacaagcggccagcctaagccaaagttccaaccttttccaaagtttcaaactttggaaaaggtatccgaaacaaataccgaatagataaaccgtaaaacaacacaatgtgctaaaaaccaaaacaaaactgctaaaaaccactgcggaatggaaaaaaccagcgcgaaacggcatttaccgcggagaaatacaaaaaaccggcgcggaatggctcactaccagcgcgaaacagaaaaaaccaccgaggaatggaaaaaaccactgcgaaatggaaaaaaccagcgagaaatgcaaggcaacgccgttgtattgcattccgcgccggtaaattgcatttctcgctggtaaattgcatttcgcaacagaaaaaaacagaaaaccaaagtatcgttcatgtaaatattgttaatcgacccggaacagtggaaaaacccaaaactgctggagaatagcctccaattttcagtttctcccaatgttcgtccttcagctgcctgtttaggcaggatacgttttaaatttttttcagatttaaattttcacaaatgaatgcatcacaaatgaatgtggacgaaattttatttcagtcgggattgcgtattaataacagcttaagcgatccgcttattctcaatgcagttagccttatgggctacaatcaggaaaaacttttggaaggacaaaacctgctggacgaggctaccactttggttgaaactcaaaagcgcgaatacggcgaggtggatgccgcccaacaggttttcgataaccagcgcacaaatgcacacaaagtttatatggccgttttggccatcagtaaaattgcttttaaaggcgatgtacaggctatttcaaccctcgatttaacagggcgccgtgcttctaccttcagcggatggttaaaccaaacccgtagtttttaccgggccattttggccaacgaagcctggaaaacggagctggcaaaatacgggcaaaccgaagcgatgttgaccggagagctcgctatgattgatgctgttgctaccgcatcggagaataagaaaaaggaaatgggcgatgcccagaatgcgacacaagagcgcgacgaaaaaatggaagaactggccgaatgggtaaccgactacgaagttattgcccgtatagccctggccgataaacctcagttgctggaaaaactgggtattgtggtgaaaggctgatcttgttcgaaccagaccttcaaggttttaaaaaccttgaaggtctattagtaaaataaagaaatgaaaaccatcctgctcgaatacggaaatttctatcacatctacaaccgtggaattaacggctgcaacctgttccgcgagaatgaaaactatgagtattttctgcatttgtacgataaatatatttcgccggtggcagaaacctttgcctgggtattgatgcggaatcattttcattttttgattagaattaaaactgttaaggaactaaaccttcaaggtttccaaaaccttgaaggtttgaaaggaacaaacagaaatggggttaatcaacaatttgcaaacttgttcaacgcctacaccaaagccataaacaaacgttatcaccgcaccggaagtttgttcgaacatccgttccgaagaataaaggttgaatctgatgcccatctgaaatatttagtttattatattcaccataacccaatccatcacggtttttgcgatcattaccttgattatccgtggagctcgtacctaacaattgtatcgccaaaagctacaaaactaagtagggcagaagtgctaaagtggtttcgtgataaatcgaatttcgaaaagtttcatttgcaggaagaaataagaaaattcgatgaattgaatattcgtttaccgggagacctttaaggtttaaaaaaaccttaaaggtctgtatataaaaaccaattaagttaaaaccatgctaaaacgaaccttattcatctccaacccctactacctgtcgttaaaaaacaaacaactgcaggtgagcgaaaggggagggatgttgctaaaatcggccccggttgaagatatcggcttcctggtgctcgaccatccccaaatttcattctcgatgaaactggtagaagaactgagcgaatacaatgtggctaccgttttttgtaacagcaaacatatgccctcgtcgatgttgctgccgctcgatgcccatcacattcaaagcgaacttttcagggcacagatagcagcttccgaaccgctgaaaaagaacctgtggaaacaaaccatcgaggcaaaagtgaaaaaccaggcggccttactcgataaattggggaagaaaagtttacaactaaaaaatattgctaaaacaattaaaagtggcgacagcgataaccgcgaaggctttgctgcccgtatttactggacggctttactcggaaaagagtttatccgcgaccgctacggcgcaccacccaataattttctgaactacggctatattctgttgcgttcggctgtggcacggtcactggcggggtcggggctgttggctacgctgggcatccaccaccgcaatcgctacaacgccttttgcctggccgacgatataatggaaccttaccgtccttatgttgatgaaattgcctgcgacctggatgaaaaatacccgggaacatttgcgctcgaaaaggaacacaaagccgaactgttgcagctgatgacagcagatgtaaaaattggcgacaacaaacgtccgcttatggtagccctgtcgcaaactactgcctcgctggcccgctgttttgccggcgaacaacgtaaaatcatttatccggtgtttggataatcttttcaaattagaccttcaaggtttctaaaaccttgaaggtctgaaaacacgaacaatgctatgcaacaaacccgattaaacgcctatcatattatgtggttattcgtttttttcgacctcccggttaccaccaaaaaggagcgccggctggcaacccgtttccggaaagatctgatgaaagatggcttttcgatgatgcagttctcggtgtataaccgccattgtgccagtaaggaaagtgccgaggtgcatataaaacgtatcaaaagttttatccccgaacacggacaggtaagcatacttaccgttaccgacaaacaatacggaaacatcgttaatgtatggggcaacaaatcgagccccttgcccgaaggccccaaacagttggaaatgttttaattgactttcttaaaccttcaaggtttcgaaaaccttgaaggtttggatggaaaacactatattcgaactccgttctttgatattgtgaccgaatatcaattataccacatagaatgaaaaaaacagtgcatcattccgcttctctgccggaaacagggtattatagccatcgtgtttttaccggaaacacccgtaaaaacagggcatacccaccgcttggttgtggtttgatgtaaaattgaaatgatattcaccgttcaaggattgtagaaacttagttttttagttgtggtttgatgtaaaattgaaatgatattcaccttttcattttcaaggtccgaattctgatcagttgtggtttgatgtaaaattgaaatgatattcacctttattcatgtagatccgctcgtatgccgagttgtggtttgatgtaaaattgaaatgatattcacctaatatcttcaagtttagactctaactcttgttgtggtttgatgtaaaattgaaatgatattcaccgcgaacaccaaatttgattaaatgtaattagttgtggtttgatgtaaaattgaaatgatattcaccaattccacgacttataccttgaccatccagttgtggtttgatgtaaaattgaaatgatattcacctatcagcttaataaacaacgaagcatttgtgttgtggtttgatgtaaaattgaaatgatattcaccttctctgatcattcgtagtttattcaatagttgtggtttgatgtaaaattgaaatgatattcaccgcaaaacgacaccgccccccgccctattcagttgtggtttgatgtaaaattgaaatgatattcaccataaaccaagaataaaatatgcccaccatcgttgtggtttgatgtaaaattgaaatgatattcaccttgccggtgtaccaatcgtttcggaattgggttgtggtttgatgtaaaattgaaatgatattcaccaaactttattcagccacttattctgaccagttgtggtttgatgtaaaattgaaatgatattcacctccaacgtctttaaccactctgtcgtgacagttgtggtttgatgtaaaattgaaatgatattcacctccggctcatttgttatgaaagccttaaatgttgtggtttgatgtaaaattgaaatgatattcaccgaggatggttcgatcatggttgtagctgaggttgtggtttgatgtaaaattgaaatgatattcaccaatgaaacaaactccgctatctattgtaaagttgtggtttgatgtaaaattgaaatgatattcaccatctggaatgagcctgacgatttatcacagttgtggtttgatgtaaaattgaaatgatattcaccttgaggggttattatccaaacaataccgcagttgtggtttgatgtaaaattgaaatgatattcaccttaaatgtagagaaaaacgaccgacgcgaggttgtggtttgatgtaaaattgaaatgatattcaccacagtgcaaagacactcaaggtggtattaagttgtggtttgatgtaaaattgaaatgatattcaccaaaatttaagtcgtagttaaatacattcccgttgtggtttgatgtaaaattgaaatgatattcaccgaaatttatgaaggagattggataaaattaagttgtggtttgatgtaaaattgaaatgatattcaccgtttagatactgtcttatttgcggcaaccagttgtggtttgatgtaaaattgaaatgatattcaccaacatcgtaaacccgctcaacatagttctggttgtggtttgatgtaaaattgaaatgatattcaccgagactgaaaactatatcctaaccatcgaggttgtggtttgatgtaaaattgaaatgatattcaccaaccggggttttcatcgcactgccatgaaagttgtggtttgatgtaaaattgaaatgatattcaccgtaaatggtgttaatacaggttcgatacctgttgtggtttgatgtaaaattgaaatgatattcaccagtggagtagggcaggactcattttgttgcagttgtggtttgatgtaaaattgaaatgatattcacccataacctgcatggaaattcgctgcgacttgttgtggtttgatgtaaaattgaaatgatattcaccaatgtttcggtgaaggtgtcgccaagggtggttgtggtttgatgtaaaattgaaatgatattcacccgaggtgtgttggagaaacgtttgcacgaggttgtggtttgatgtaaaattgaaatgatattcacctgaaaaacatgttatacaacacactaaaagttgtggtttgatgtaaaattgaaatgatattcaccagccgataaaagaattaaagatttgctgctgttgtggtttgatgtaaaattgaaatgatattcaccaacggatttatcactttgaagcttgcttcagttgtggtttgatgtaaaattgaaatgatattcacctcctaaagcaatgggaatggtcgcactccgttgtggtttgatgtaaaattgaaatgatattcaccaccaacggcggcaccagcggcggccatacagttgtggtttgatgtaaaattgaaatgatattcaccaatacacatcttctttttatctatcaaatggttgtggtttgatgtaaaattgaaatgatattcaccctgggtataattctcaacttgcttcacgaagttgtggtttgatgtaaaattgaaatgatattcacctcctgtaggatgggtaaaagcgtacagatagttgtggtttgatgtaaaattgaaatgatattcaccaaaaattgttgtaatgagtaacgccctggagttgtggtttgatgtaaaattgaaatgatattcaccgccgacgaagccgtgcagagctatatacctgttgtggtttgatgtaaaattgaaatgatattcaccaataatagttggagtgtttgccattctggtgttgtggtttgatgtaaaattgaaatgatattcacctgccagtgcctcaatcgcctttttgtgcttgttgtggtttgatgtaaaattgaaatgatattcaccccgccctattttcatcaaacgtaaccacatgttgtggtttgatgtaaaattgaaatgatattcaccggtgggattgttggtatagctcttacggctgttgtggtttgatgtaaaattgaaatgatattcacctggaacatttaaataggaactttaaggaaagttgtggtttgatgtaaaattgaaatgatattcaccggcactgaaagacgttcaggaaaaccacttgttgtggtttgatgtaaaattgaaatgatattcaccttattgacacccctgcagcttatggttatagttgtggtttgatgtaaaattgaaatgatattcacctgtgttagattgtgcagaagtgttcccgggttgtggtttgatgtaaaattgaaatgatattcaccgctattgctgattatttcaatccaacttacgttgtggtttgatgtaaaattgaaatgatattcacctacagggaaacattaaagagctgatcccagttgtggtttgatgtaaaattgaaatgatattcaccacaccatacttccgtaactgtcggctcggcgttgtggtttgatgtaaaattgaaatgatattcacctgaaacatcattaatatcgttatgacagaagttgtggtttgatgtaaaattggtgaaatttgtaatggatatacctacaaggttttcaaaaccttgaaggtataaatatttcctgcttatttcccccgatactgataaacagccttgttcaggcgatccataatggcaatgccgataccggtttcaggcaccggttctgcaataatcagatcgacatccgaatcctcgagacggtgcaatgcctcaaagaaatttgctgcagcctcgcctaaatccgcgttggttgacaacctttctatctgatgatatttgtccggattttttacttcagaaaaagccagaaatccatattttttgttggcagagtattccggttcgttgcccaaaaggtacattggtttccgggggctgtagtgcgattttagcaaccccggtgatttgatcggcgaattggcctctttcgctttactttgcggtagcactttcattaaatcctgctcggtaataaaaccgggtcgcagtattttaaattctccctggcacagttcaatcactgttgactcaataccaactttaggaagttcgccgttgagtatgcatttgagctcaggaagctgtttttgaacgtgctcgggcgtagttgggcttaacatcccaaatcggttggcactgggtgcagcaatgcacttccctgaaagttttaacagttcgcgggcagtttggttggcgggcatacgaacagccactgtatccaatccggctgaaacgatatcgggtaccgcttgttgttttttggcaacaatggttaaaggccccggccaaaagtgttcggccagttttaaaagcgcatcatcgatctcaacaaaaagtttttccagttctgaaatatcacgaatatgtacaattagcggattaaatgttggtcgttcttttgttgcaaatatttttgcaaccgcctcggcattaaatgcatctgcacctaaaccatataccgtttcggtaggaaaagccaccaactcaccattcccgataagctgggcagctaattttatatcgttgctaatcgaactcattcttgcttcaattttgtgggcacaaatatctaaaaaattagggagagttgttaaaacaaatctccctttatgattaaagttttcctgaactgccgataagttatcaagttaattattaagtagattgtgaaaaaaaactacctgcctccaggaaaaagaccaatatttaactaattacttcttattgaactgttgtcttcaattaatttttgccgttgtgcctcctgaaattttgatacctcggtacgcacttcatcgttgtttaatccaataattttagctgctgccagtgctgcgtttttgggatttaaaattaccatgggagcaacacccgaaggcattcgcaggctcgaataaatatcggcgccggcaaacgagtcgccaacaggaggacatgcaataaccgggcaattggtttgcgcatcggagaatccgcttagtgcgttgctcattcctgctatggtaatgaataccgggttgtgcatttcctgctctttaataatgttataacactcaagcggtaccttgtgcgccgaagcaataaaacattctgaatcgattttaaacccgtttagtgcatcaacaattttgttggcccagtccagatcggctttagagcccattattataactactttgctcatagtcttcaatattattaaatgaatattcgtaatccataggaattatctggttgtattcttcaatcgacgcgtttgacaaacaagcgtcaataatttttcttccggtgtggaacaggtctttgtgcatgaatttcttcagctcgcggttaaagaattcctgtaaaacttctgctccggcatcgtagccttcggtacccacttcaacctggttgtacactttcaggaatcgggaagggatttttgagctttcgatggtgaggtaatttagctcgtaacccaaaagcggacaacgtgctgcttgtatctggtcgtcttttaatttggcgccacctcttcgggttaaatattcgcgcattaaaagctgcggtttaaaaccaacttcccaaacgccaatgttttggttgggtaccagcgaaaaaatggtacgtggtgtttcaataatttgcttcaacaacaggttggcgtgaataatccggtcgccggtggcaaaaggccagtacgaaccaactccttcgctttccatggctccggtgccaacaatacttgggtttttgtgtccgcgaggggcaaccaaacgccacaaccaggccaaagccggtggcaatacgtgaaacaaacctacaattccgtacgttggatcttctttcgaacatttaggtgtacggataccaaaactacgcacatcaaccgaaaccgatccgttaatggtgttttcaacactttcgcgtggaagaacaacccgtggattcggacaaggcttgcccggttcatcttcaatatgattccagatcagggctgttgattcaggctttgtgtcgatatttaaaaacagcaagggttttttcggatgtatcgttgccttttcaagaaccggatcatcgccgtattggttaacactgtcaaccctgacaaaccatgcgttttccgcatccataataccaagtttaccgttctttttctggaacgatggatgacagaaagccatatcgtcggcaatgggcaggaagttacaggtgcgcggaatagtgatataacgggtttcgccagtaaccgaattcttacccaacagaactctaccgtcggtttctcttacaatgtgctggtgcagttccgattttcctccgccactggccccttcgtgcataaatgtggtaacaatgtcgtacggacttatcgattgaacggcagaacagtgagccgttacccattcttctttttcgccctgggttaacaacacgccatacagcccttttttggcactgggacccggatataggttgtacgaatacaattcgtgaatatcgtctaagcggttgtgaacaa

SEQ ID NO: 1512 - DNA, 24041 bp, synthetic construct
  misc_feature 1..24041: note = Synthetic
  source 1..24041: mol_type = other DNA
  variation 17952..19460: note = n is a, c, g, or t
aaagatcacaaaaaataagcgactggtagtaaaagcagatgttccacaacgcttttttcccatgcttagcaagattaaaacggccaattttattaccctttatgatcagcaacttcacaaaacggaagagctcaacgggaagctgatttcatatggaaagtcaacgggtgaaaactcgttgttcacaccaatctactttgagatcgataatattggcaatttgcttgctggatcttttgtggaagtttacctgaaaacatcggaagttccgaatgccattgttgttccaaaaacagctctgctcgaagaagccggacgctattatgtctatgttgaagcaggcgaaacgtttgaaaaacggtacgttaccatcgactgcaatgatggtgaaaactaccacatcaccgatggtttgaaagcaggtgaccatgtggccacaaaaaacccttatttgatcaaattggcctccatgtcgagcgcactgccggcacacagccaccaacactaattcttcaagattaaaaagctatgctaaataaaattattgagtattcgctgaagaataagctggtggtaatgattatggccacccttattctcggcgcaggaattttcgtcaccactgacatggaggttgatgtctttcccgatttgaatgccccgacagtcgtcgtactgacagaggctcatggaatggcaccagaagaagttgaacgcctggtgacctttcccattgaaaccgcagttaatggagcaaccaacattcggcgtgtccgcagttcttcagccatgggattttccattgtatgggttgagttcgactggaacatggatatttacgatgcccgccagattgtaagcgaaaagttagcaaccattgccgaccaaatgccaaccggagtgggctcaccaacattggcccctcagtccagcattatgggtgaaatcatgatgattgctctgactgctgacgaaacctcgccaatggatttacgcacactggctgaatggaacattcgcccgcgtttactttcagttggcggagttgcccaggtggctatcattggcggagaattcaaggaattccaggtattggccgatccacttaaaatgaaatattacgatgtttcatttcaggagctgattaccgcctgcaaagcatccaacgaaaatgtgtcgggaggttttctgaatgaacatggacaggaatacctgattcgaggaattgcccggagcaatacgcctgaagaaattggtaacaacctggttaaaatgaaagatggctaccccgttaaagttaatgatgtagcccaagtacgcattggtgccgctcccaaaattggagatgcttcctaccggggagaaaaagcggtcatcctgaccgttaccaagcaacccaatgtcaacaccttggagctgaccgaacgaattaagacttcgctgggcgatttaaaacaaacactgcctgaagatgtcggcattcacaccgatatttttgagcaagccaagttcattcaaacatcagtcaacaacgtgcaaaaagcgctgatcgaaggtggactctttgttgtcatcattctgtttgttttcctcatgaactaccgaacaacaattatttcggtactggcaatcccgctatcgctgttggtggccattttagccatgaaatggatgggaatttccatcaatacgatgaccctgggagggatgacaattgcgattggatcgctggttgatgatgccatcatcgatgtagaaaacgtgtacaaacggttacgcgaaaacagccggttgaccgatgatcaaaaacgacctattttcaatgtaatttacgaagcctctgttgaaatccgggcttccattttgaatgcaacccttatcattatcatagcatttattcctttatttttcctttcgggaatggaaggacgaatgctacaaccgctggggatcgcctacattgtatcgctttttgcctctctctttgtagccattaccatcattccggtgttgagtagttacctgttaaccaacgaaaagcgtttgcaaaaacaggccaagggcagccgtgtcgaacgttttttacgccagcactacacacaaaccctgcaaaaggcattaagctaccgcaaaccggtaatcggcatcagtgttgcattgtttgcagtagcgatcgtactgatcacaggctttggacggagttttttaccccccttcaacgaaggttcgctaacgatcaatacgacgaccatgccgggaatcaaccttgaggaaagtaataaacttggaattgaagcggaaaaggcgcttttatcaattccagaaattacctcggtagcaagacgcaccgggcgggcagaaatggcagagcatgcctttggagtgaatgtttcggagattgatgctccctacgaactgcaagaccgttcgcgggaagagttcctgcgcgaggtgcgagaaaaactcaatcagatccaaggaattacggttgaagtgggacaacccatcagtcaccggattgacgccatgctttccggatcgaagaccaatattgcgattaagctttttggaaccgacctgaatgaaatgttccaaattgcctcacaaatccgtaaagagatacaggatgttgaaggaattggagacctctcggtagaacaacagatcgagattcctcaacttcaaatcaaacccaaccgggaaatgctggctcgctacggaatttcggtcaatgagtttttggaatttgtggattatgcctttgccggagaaaaaatatccgacgtattcatcaatgaaagagcttttgacctggtgcttcgttttgacgacgactaccgcgaccagattgaagctgttcgaaatgctttgattgacacgccttccggacaaaaaattccgctctattatgttgccgacattcagtcgacctttggaccaaataccattggccgtgaaaacgtgatgcgcaaaattgtggttgccgtcaatgtggctgaccgcgatgtacgcagtgtggtcaacgatatccaggataaagtttcagcaaacatcacgctacccgaaaactatcacctggaatatggcggccaatttgaaagcgaagcggaggccagtcgtgtgttgctcactgcttccttgggagctttgctgttaatttttattctgctgtatgttgagttcaaaaacacaaagctggccatgatcattctgatcaacttgccactggcgcttatcggcggtgtcgtggctatctggatgacctccagggttattagtattcctgcaatcatcggttttatcaccttatttgggattgccacccgaaatggaattctgctgatctcgcgttaccagagccttactgatcaggtcgatagtttgaaagaccgaatcatcaaaggttcagcagatcggcttaatccaattttgatgaccgctctgactgccgctttggctcttattccgttagccttggctggcgacaaaccaggaaacgaaattcagagcccaatggccattgttatcttgggaggattgttaagttctaccctactcaacatctacgtggtccccattatttattatctatttcagaaaaaaaaggaggaaaagtcagccttatgaaacgaactagaaaacaagtaacagcaatgttacaccaacataaacgcaacaccctgaaagttttactattgacttttctgggggtgctatctcaggctgtctatgctcaaaacaacgtagacgaatttctatcgcttgtggagcaaaacaaccaagagcttaaagcagcatacaaactcatggaagcccaacagatgggcttccaaacggggcttacgcctgataacccaagcattgagtatggccatttccccggaaagcaagaggaaattgggaataaaacgacctatggcatcagccagtcatttgactttccaacggtttattcggtacggaaaaaattggctaacgatcaaagtcagttaagcgaatacgaataccagctattccggcaagccaaattactggaagctcaactcggcttttaccagtatgctttcctgctgaaaaaacagcgaattctacaaaaacgcctggagcatgccgagcagctttaccaatcgtatcagaccaagtttgaacgtggtaacgcctcggtgctggatgtcaacaaagcgcggattcaatacctgaaaaccaagagcaataaccaactactggttcaagagctggatgcccagcaaagagacctgcagctactttccggccaaactccggacacgctggttattgtctccaatccagcaaacgaactcccctccttggaaaccgtcctaagcgatatgcagcaacttcagccggaagttcgttacctgcaacaagcccagcaggttgccgacaggcagattaagctggccaagcaaaactggctgcccgaacttgaactaggctacgaatcggaaaaggccggagatggcacttatcgtggggttcgtgggggcctgtctattccgctttggaaagataaaaacaaggtgaagcaagccaaagcgcaggctattttcgaggagcagcgctacagctcgcggttaagctccttggtaagtgagacacaaaagcgctataaacaggccgaagagttaaataaaatttggaaagaatatgaccaaacgctaaaagaagcagccaacatcggctttttggataaagccttgcaattaggacatctttctgttattgattattttaacgagctggctttttactatgaaacgattgacacagcaatggagatcgaaaacaactatatccaaacgctggccaagctccaagcttataaactataacacaaagagatagccataaatacttttattgatccttatcaatatgtccaattcaagaaagacattcattgtcaataaaaaagtaaaataatatttctattttgcagttctttagcgaccgggtagatgggagatgattagaaacgaaaaggactatgctgaataaaactcaaccacaagaaggctcaaacaagccagaagaggaaataagacgactcaaacaaaggttagaggaagaaattgccaaaaatgccttgttgggagaacacatccaacaattacaggacggtcagaaaagcagcctccccttcgcaaatgagaaacgtctatcagcaatccaggactttgatagttttaatcacctttccatcccggcctgggaacaagatttttcgcaggtagcccagagcattaaagcgcttcaggtacaaggaataaatagcctctcatcctactttgattcccgtcaggatgaatttttcaggttactcaaacaaatcaaaatcattcatcacaataaagaagccgaaatgtttacgcccaaagacatggcgtatagctctttgcttgatctctaccttcctgaagcctaccaaagtattttaaagcaattttactgtattcttcgtggcgaaaagcgcttaacaacagagcttccaattgagcttcccaatggcgaaaagcgctattacattctcaaatggatcgccattgagcatcccattccttataaacgagtgttggtatcgctcgtcaacattaccgaccggcatgccatggaagaaaaactggctgaaacaaaccgccagctttcaaccttaatcaaaaacctctccggtatcgtttatcagtgtaagaacgacaaccactggaccatgcaatacctgagcgataccgttcaggaaattaccggctattgctgtcaagagttgctttttaataaaaagaagtcctttgctgatctcattcatccagaagatcgaaaaagtgttgagcgtgaggtccaacaagcgattcaaaagcatcatcaattttccattgaatatcgcataacaactaagaaaggagaagaacgctgggtatgggaacagggagttggaattccgggccataatcctgaacacatagaaacactcgaagggtatattcttgatattaccgaccgaaagcactatgaagaagcactcctgcaaagtgaagaaaaattcaaaaaagcgtttcatgccagccccatggccattatgctcgcccgagaacgagatggtaagatcatagaggccaacgaaagcttcaccgagattaccgggtggaccaaggaagaatacgaaggcaaaacaagcgtggagctgggaatttggactaatccttctgaccgaattgattatatcacgaccattcagcaagaagggaaggtaaaagcccgggaatatcttattttcagaaagtcggggcacctccggaatgtgctaatttccggctatccaatgcgattgggagaggatcacattatcatcgccaatatcaccgatatcacggaacaccggcaagcccaacttaatctcaaaaatgaacgcacccaccttcgtacggtgctcgaaaccattcccgacctaatctggctaaaagatccggatggggtttacctcaattgcaactaccaatttgagcaattttttggtgcaacggaggctgaaatcatcggtaaaaccgactatgattttgtcagcaaagagttggccgatttttttcgaacaaacgataatttggctatacgtaaaaaccaagccagcaccaacctggaatgggtaacctttgccagcgacggacatcgggccctgcttgaaaccgtaaaaacccccatgcgcgacagtcaaggcgaacttgtaggtgtgttaggagttgcccgggacattaccaagatcaaactcaatgaggaagcactaaaagaaagtgaagtgctttacaaggccatttttaataatactggaacggccacttgcttgattgacgaaaaccgaaccttgattcttgttaatgagaaatttgaacgtttaagtggctactccagaaaagaactggagaacaaaatgaagtggaccgactttgtgatacctgaagatttggagaagatgcaaaagcatcacaataaccgacgacaggcgccacaaaatgcccccagacaatacgagtttaccttcgttgatcgcagaaaagccgaacaccacatctttctaaatatcgacatgattcccgggacaaaaacatcagtagcctccttgcttgatgttagcgttcggatcaatgcactgaatgagttgcggcaaagccacgagaaatatcaaaacctggtagagaatatcaatgatattatttacgagttagacgctgactggaatttcagctatatcagtcccagggtgcaagccataacagggtaccctccctcacattacctgggaaaatactttcttgaggttgtggctgagcgcgacaaagcagatgttgaaaaacgctttgatggcttcctgaaacaaaaagacaaccttcctcttgagttcagagcacaaacattggatggtcaaacggtttggctgcgcatctctgttcgcccggtaatcaaaaaaaaccacattattggcttacggggaattggaagtgatattacccggcaaaaacggaccgaacaagagctgattaacgccaaagaaaaagcagaggccgccgaccggctgaagtccgctttcctggcaactatgtcacacgaattacgaaccccgctcaatgccatcattgggttcagccaactgatagacgaaagcttgccgccagcagagatggtcgatatgggtaaaattattcactccagtggcaatcatttattgtcgatcatcgaatctattttcgagttgaccatgcttcaatccaagcaaacaaaacttcgagttgaaaattttaccgcacaagaaattggaaaaagcctggagtttttcatgaaaagtgaactaaagaaatacgacaaacaaaacatcagcttctccttctccggctttaatgctgcaaaacagcccaacatccagtccgataaaaccaagttaacgcaactgctaacgaaccttatcagtaattcagttaagtattccaataagggtaaaattacagtggaatgccaagccaagcaaaaatccgtcattttctgtgtaaaagatgaagggattggaattgctcaagagatgcttgaagtcatctttgaacgattcaggcaagtagatgatagcagcacccgacgctatgaaggagttggacttggcctttcaatctgcaaggaaattgcagagctgcttcacggggaaatatgggttgaatcagcgccattaaaaggctcaaagttctattttaaattgcccttaacccaggaaaacaacgcacacaagtgaaaactaaaaatcgatggtcaattgaataggcccctttacgggttcttcaaagtttgagatggtgagtcccagcaagcgaacgcccttcacaaacggagcttcgtgctgcaataattcggttgcatgcgtatgcaacagttctttcgaacgaaacaaagtcaacaaggttttacttcgggtgatttgctcaaagtcggcaaacttgattttcagagtcagggtccggccatgcttctgcgctcgctccaaacgttgccacacttcatcttcaatggcctgcatcttggtctgtaaatcctccaacaaaaaataatcagtatcaaaagtacgctccgcccccagcgattttcgctcgcgcgatggtgtcaccgggcgatcgtcatttccccgaacaatttgatagtaataagcccccgatttcccaaactgacgaatcagctcctgcagttccagttttttcagatcagctccaaagtaaatcccctgccgattcagcttttcagccgtcactttgccaatcccaaaaaacttgcgcacctccagcttctccaggaaagcttcagcctcatcaggcgtaatcacaaacaagccatccggcttatcgacatccgaggccaccttagccaaaaacttgcaatacgaaactccggccgaagcaatcaagcccgtctcttccttgatgcgccgtttaagttcacgagcaataagcgtagccgacggttttcctttccgtgcaaaagtcacatccagaaaagcttcatccagcgacaaaggctcaaccaggtcggtgtactcaaaaaagatctcccgaatttgctgactcacctttttgtacttatcgaaattgctgcgcacaaaaatcaaatccgggcactttcgcttagccaccaccgaagccatggccgaatgaatcccataacgccgggcctcgtagctggctgcggcaatcactccccgctcatgatcgccaccaacaaccacaggtttcccgcgcaatgccggattatcgcgctgctccaccgaagcataaaacgcatccatatccacatgtataatctttctcaacggtgtttccatggccaacttgtcaatacatgtaaaaatctaaaatctgtaacaacgaagttttgtacagaattgaggtaaaagtaccgtttttgcccgaattacacgaaaaagccgacagacaaccctttcgaacgccgaacccccaacccccgattcaatgagcaaaagccaagctcactcatcggctatcgctcgggatccctgcctgaccattcggggaagagtgcggttaaatgataaaaaaaataaaatcatcgccttactaatttaacgataaaatctccttcgttgccggaaagcggggggtcatcacgaaaaatggctcgttcatgaaaaaaagatcatttctgtttactaatcatcaattagattgtaaattcatacatccaatcaattatgaacactagctcatcgaaagaaggtcagtaacacaggaaaggtcagtgttcctattaaagatagtttgatgattcgaaaacaaaccggctaaaaataaaaactcccaccgaagcgggagtataggaatgttttccttcggcttatagccttattgtgataagatgtaaaacaaaattcgttctaatgttaacgaaggtaagaaataaaagacataaaaaacaaaccaaacaataaaaatttaaacctatggctaaaatactcggactggacctcggaactaacagcattggctgggcagtggttgaaaaagaaaaaaatgaagatttcaagcttatcgataaaggcgttcgcatttttcaagaaggcgtaaaaatcgaaaaaggagttgaaggatcaaaagcagcagaaagaacagcataccgaagtgccagacgattaaaatatcgccgaaaactacgaaaaattgaggttctgaaagtcctttctgaatttggctactgtcctccattaacaaatcaagagcttcgagactggcgctacaagggaatttatccaatcaatcaagctttccgaaactggcaaaaaaccgatgaaattgtaagcaaaaatccgtatcgatacagagccttagcagtagaatcaaaattcgacttaaacaacgaagttgatcgatttcgcttaggaagggctttttatcatttagcccaacgtagaggcttcttaagtaaccgacttgaaacaactaaggaaaatgatggtacagtaaaaaaacaaattgaagaacttaataccgcaaaaaagaataatactcttggtcagtatttctacaatttatatcagaaaggcataaaaataagaggaaaatatacccatcgggagaaacattatttagaagaattcaaccgcattattgattttcagcaattgccatccgaatttgtcgataagctccacaaagctattttctaccaacgtccgttaaaatctcaaaaaggattagttggaaattgcccgttcgaaaagaataaaccccgttgcccggtatcgcatcctcgatttgaagaataccgaatgcatgcctttatcaataatatcaagctaaagacacccgatgatgaccaacttcgatatttgaatatcgatgaaaaagaaacaattatcccgctctttatgcgcaaaagcaaggagcatttcaaatttgaagatatcgccaagcggctcactccaaagggagcaaaatactcttatataaaaaggaaagaacgttctgaggcagattacttattcaaccatgacatgcgcacttcagttagcggatgccataccacagctcaattaattgccatatttggcgctaactgggaacaagagcttgtcaattcttatacattgaaagaacagaagacgggactcaagtcaacagaagaaatcgtaaccgatatttggcatgtccttttttcattcgataagacagaaaaattggttgagtttgctcaaaaccgattaaggctcgatgagcaaaaaatacgagagttctcaaaaatcaagttgaaacacgactacggtgctttaagcttaaaggccatccggaaaattctaccttatttgagacaaggcttgatctattctcacgctgtatttatggctaagttggaagatttggttcctaaaaacatttggagtcaagaagagaatcgtaagctaattcaagatgaaattcttcacatcattcaatcccagagtcgggaaaaacagctggcggacatagtcaatggaataataacaatgagccgaagggaagacataagctggagtgacaatgaattctggcaggctaaccttcaaaaagacttactcaaaaaactaaaagctgttattggcaataaaacctgggaagaatatccagagaccgaaaaagaagcctatcagcaaaaggtttatgagctcgtaaagcaacaaatgagcaataatcttggacgcggtgaatatctgaaatcgaaaaggacggatgagcgtattcgtaatttcatcaccgaccaatttgatgttgatgccaaacaattggagcaaatgtatcatccttcagcagttgaagtctatagaaaggcatcaaaggcagctgatggaaactactatttaggaagcccccttatttcggctattaaaaatccgatggccatgcgtgctttgcatcaacttcgaaaagtagttaatgagttgattaaaaatcgagtgattgactctgataccaaaataaatatagaaatggcacgcgaccttaaaaatgccaatgaacggaaagcactacagcgctggcaaaataagagacgtgacaagcgtaaagaataccaagaagagctacgccgagattacctggctgcaacaggaaaagagatggaaccatcaggaaacgacatccttaaataccaactttgggaagagcaaaaacacatttgcttgtacacgggagagaacattggcttaaccgagtttattggcgaccatcccaaatacgaccttgaacataccattcctcgcagtttgtcattcgataactcacaggaaaacctaagcctttgcaacagtcattataaccaaaaaataaagcgcaaccgtatcccctctgagttacccgaccatgagaccatcctccagcgaattgagcactggaaaaaatacattgaagaggcgaaagaaggagttgaaaaagccgttcgccaaagtagggcaaatgccgacaacaaggaagtaaaagacgcagcaatccaacgccgacatctgcatcaactaaatcttgactattggaaaagtaaataccatcgttttgagatgaaagaggttcccgaaggatttaagaacagtcagctagttgatatcgggatcattacaaaatatgcaagactgtatttgaaaaccgtattcaaccacgtttataccgtaaaaggaaaaacagttgctgactatcggaaactatggggaatacaagatgagtttgtcagaaaagaacgaataaaccacattcaccattgcattgatgccattactattgcctgtatgagcaaagaagcgtacgagcaattggcaaatgcttatcacgagtgggaagaattggaacaaatgcaagcaacagatatgccacaggtaagccctccctggccaaactttgcatctgatttaaaatcgattgaaaacgaagtatttatttctcattacacccctgatgtactccccaaaagaactcgaaaaatattaaagaaaagagggcaagtcgtccgggacaaaaaagggaactctatcattgtgaaaggggattcggtacgcggagctttgcataaagacacaaattacggagccataaaacaagaagagatcaataaaaaaggagaggtaacagaaaaaactgtttacgtagtccgcaagcccatcgatgccttaacaccaagtgatgttcaaaatattgttgacgacaatatccgttcgattgtcgaaaaaggcaaaaaggaagaaagcaagctgcgtaaagacctcgagaaagcgcagaagcaacttcgggatgctgaaaaacaagaacaactaacaaactgccagcaaacagttgaccaactcttggatcagctatcaaagatctatgccatccccaacaaagacggcagctatactccaattaaaaaagtaagatgcaaagcaacaacagttacaaatcctttaaaaataaaagcacaccgagatcaatcaaaaaaggaacacaaacaatacagctattttgtaaatgatggtaattatgcaatggttgtgtatgaaggcttaaataaaaaaggagaaatcaaacgggatttttcaatcgtcaacaatcttgaggcaggtaaatatttcaatacgaaagaatcagtaaatccatttcccaaccaacatcctaaatcaaaaaaatacttaaaatacattctaaaaacaggctctgtggttttattctggaaagactctcctgctgagttaaagaaaacggcaacagaaagtgtattgcttttgtataaagttgtcaaaatgaataaagatggaagaattacatttaagtttcaccaggaagccagaaatgatgaaagcctaaaaactgattatgaaagtaaatatggagaaaaagcgcccaaatcgttaactaatggagtttcaacagttaattttgattttcccgcaccaaagttattattaagtccttcaaaattcaattttctggtcgaaggctacgagtttaaaataagtgcaacaggaaaactagaatggttaaactgaaaaccgactcactcggcaatatcaaacgaataaaataaccagtccttcaaggtcttgaaaggtcatgaaggattcgtaaacaattgaaaaatacaggctaagcttttccaaagtttaacactttggaaaagctgaaccacctaaaaaaacgtaacagcatgctaaaaaccagaacggactactggcaaccagagcgaagcatgattttccggggcgaaacgctaaaatcggtggcggtagtgattcaaaccaatacacctgagctttctacctcggcggaaagcaattttcggcagcggagagcaataaatcactgcgaaaagcctctttacctggttcaatgccttttcgctgcgggaataagcctatcgcagccaaataaacggtctctgtttcgggggaaccatcccccattcaaacaatactcctgaactttgggatagatcagaataccgcacagctcgtcccgcttcgttctgttttcccaaaatgttcctcctcaaaactgctgtaccggcagactacgcaacactttcttatcattctcaaattattcctatgaatttttcaaaattatcaatcgacgagattttatttcagtccagtattcgaatcaacaacagccttggcgattcaaaaattctgaatgctgtttcgcccatgggctatcccgaggccaaactgaacgaaggaaaagctttgttgaccgaagcaagcaccttggttgaaaaccagaaaaaagagtatggcgagctggatgccgcccaggaaacctttaaagtagaaaagcaaaaagccaacgagacctacaaaaacatggtggctattggacggattgcttttaagactgatgtgcaggcaacaaccacgcttgagcttaatgggcgacgtgcttccacgcacagtggctggctgaaacaaacgcagggcttttaccgtgccctgctggcaaacgaaagctggaaggcggccatggccaactacggacaaaccgaggagaaactaacagccgaaattgcggctattgaaagcgtggcagccgcctcggaaaacgttcgaaaagaaatgggcgatgcccaaaatgccacccagcaacgcgaccaaaaagtggaagaactggctgactggataaacgattacgaagtcattgcccgcattgccctggccgataaaccccaactactcgaaaaaatcggcattgtggtgaaaggctaagtccctatttaatccttcaaggtttccaaaaaccttgaaggattaaaacagatcaaaaaaaagaaaaaccgatgagcatacctcctctcgaacacaatcacttttaccacatctacaaccgtggaataaacagctgtaacctgtttcaggagaacaccaactacgagtatttcctttcactttatgcgagatacatttcaccggtagccaacacctatgcgtgggtgttaatgaggaatcattttcatctgctggtaaagatcaaaggagaggacgaaattcaggcgttttttcagaaccttcaaggtatcaaaaaccttgaaggtttgaaaggaaccaaccgaacccgggtaaaccaacagcaaaacaaaccttttccaaagtttgaaactttggaaaaggtctttcaatcatttaatcaaaaagaacagcatggaaccattgttgcctgaatgttacttccatatttacaaccgcgcaattgggaatgaattacttttcagagaagacaaaaattacacgtttttcattgaaaagtataaacaatacctaacaccaattgccgatacgctggccttttgcctgatgccgaatcattttcatttgttaatatgcctgaagccacaagctacaatcgaagcccaactattgagttcagctaaaggcgcaaaaaattatcctgctgcagattgtattgaaaaacgggaattgtttctaagcaaatatataagcaagcaattttcgaatctcttcagctcttacacccaagcttataatttgatttataatcgaagaggtagtttgtttttaaagaattttaagcgaaagccagtcgaagatgatggctacctgatccgtttggtgaattacatccatcgtaaccctgtaaatcatggctttgtcagtcaacctcagcaatggaagtactcttcgtataatgccatcgtttcggatcaaccaactttgattaaacgggatgaggtgcttcaatggttcgacggattagccaactttaagtataaccatttctactcgctggagttatagcaatcttttccaaagttcgaaattttggaaaaggtcatcccaaaacaaaaaaccatgctcaaacgaaccttattcttttccagtccctattatttaagtttgaaggactgccagttggtggcgcagtcgaaagaccagttgaccaacaaaaccattccggttgaagatattggctttatcgtgctcgaccatccacaaatcagttttagtatgaaactggtggaacagttgaatgccaacaaggtggccctggtgttttgcgacagcaagcacatgccctcctccatgttgctcaacctcgaaagccatagtttacaaagcgaattgttccgggcacaaatcagcgcttcggaaccgctgaaaaagaacctctggaaacaaaccatcgaagccaaaatacgcaaccaggccgctcacctcgaaaagcaaggccataaagcccacgagctgcgtgcttatgccaaaagcgtaaagagtggcgacctggaaaaccgcgaaggactggccgcacgcatttactggagccggttgattgggcagggctttttccgcgaccgttacggcgatccgcccaaccacctgctgaactatggttacatcctgctgcgctcggccgttgcccgtgccctggtgggttccggccttttgcccaccctgggcatccatcaccacaacaagtacaatgccttttgcctggccgacgatatcatggaaccttaccgcccgtttgtcgaccagctggccttagcggtttatggcgattaccccgatgaactcttcctgaacaaagagatgaaagcccgaatgctgagcctgatggctggcgatgtgtggctggacggcaccaagcgcccgttgatggtcgcactctcgcaaaccaccgcctcgctaggccggtgtttcaatggcgaaaaccgaaaagttgtctatcctcaattcgaataaaatcttttccaaagttcgaaactttggaaaaggtaaagttcaatcctcatggaacaaacccgtttaaatgcctatcatatcatgtggttatttgtctttttcgacctgcccgtgacttccaagaaggaacgccggcaagccacccgatttcggaaagacctgatgaaagacggcttttcgatgatgcagttctcggtctacatccgccattgtgccagtcgcgaaagtgccgaagtacacctcaagcgcgtgaaggattttgtgcccgaaaaaggacaggtcagcatcctggccgttaccgacaagcaatacgggagcatcgccaactactggggcaagaaagatgatcctttgcctgaaggccccaaacaactggaaatgttttaagcgcccttttcgaaaggctaaagctttgggaaaacgataaaagagcgtaacttccccactccgttcattgacatattggctttttcgtgttagttttgaaccgataggattaaaaaaaccgtgcatccaaccacttctttggagtaaatcaggcatttttcttcttgaaaaatcgccgcaaaaccccatcaacaaaggggataaaagcccaaggttgtggtttgatgtaaaacagctaagacttacaacattcatcaacgaaattggctttatgaatgagttgtggtttgatgtaaaacagctaagacttacaaccnnnnnnnnnnnnnnnnnnnnnnnnnnnnnnnnnnnnnnnnnnnnnnnnnnnnnnnnnnnnnnnnnnnnnnnnnnnnnnnnnnnnnnnnnnnnnnnnnnnnnnnnnnnnnnnnnnnnnnnnnnnnnnnnnnnnnnnnnnnnnnnnnnnnnnnnnnnnnnnnnnnnnnnnnnnnnnnnnnnnnnnnnnnnnnnnnnnnnnnnnnnnnnnnnnnnnnnnnnnnnnnnnnnnnnnnnnnnnnnnnnnnnnnnnnnnnnnnnnnnnnnnnnnnnnnnnnnnnnnnnnnnnnnnnnnnnnnnnnnnnnnnnnnnnnnnnnnnnnnnnnnnnnnnnnnnnnnnnnnnnnnnnnnnnnnnnnnnnnnnnnnnnnnnnnnnnnnnnnnnnnnnnnnnnnnnnnnnnnnnnnnnnnnnnnnnnnnnnnnnnnnnnnnnnnnnnnnnnnnnnnnnnnnnnnnnnnnnnnnnnnnnnnnnnnnnnnnnnnnnnnnnnnnnnnnnnnnnnnnnnnnnnnnnnnnnnnnnnnnnnnnnnnnnnnnnnnnnnnnnnnnnnnnnnnnnnnnnnnnnnnnnnnnnnnnnnnnnnnnnnnnnnnnnnnnnnnnnnnnnnnnnnnnnnnnnnnnnnnnnnnnnnnnnnnnnnnnnnnnnnnnnnnnnnnnnnnnnnnnnnnnnnnnnnnnnnnnnnnnnnnnnnnnnnnnnnnnnnnnnnnnnnnnnnnnnnnnnnnnnnnnnnnnnnnnnnnnnnnnnnnnnnnnnnnnnnnnnnnnnnnnnnnnnnnnnnnnnnnnnnnnnnnnnnnnnnnnnnnnnnnnnnnnnnnnnnnnnnnnnnnnnnnnnnnnnnnnnnnnnnnnnnnnnnnnnnnnnnnnnnnnnnnnnnnnnnnnnnnnnnnnnnnnnnnnnnnnnnnnnnnnnnnnnnnnnnnnnnnnnnnnnnnnnnnnnnnnnnnnnnnnnnnnnnnnnnnnnnnnnnnnnnnnnnnnnnnnnnnnnnnnnnnnnnnnnnnnnnnnnnnnnnnnnnnnnnnnnnnnnnnnnnnnnnnnnnnnnnnnnnnnnnnnnnnnnnnnnnnnnnnnnnnnnnnnnnnnnnnnnnnnnnnnnnnnnnnnnnnnnnnnnnnnnnnnnnnnnnnnnnnnnnnnnnnnnnnnnnnnnnnnnnnnnnnnnnnnnnnnnnnnnnnnnnnnnnnnnnnnnnnnnnnnnnnnnnnnnnnnnnnnnnnnnnnnnnnnnnnnnnnnnnnnnnnnnnnnnnnnnnnnnnnnnnnnnnnnnnnnnnnnnnnnnnnnnnnnnnnnnnnnnnnnnnnnnnnnnnnnnnnnnnnnnnnnnnnnnnnnnnnnnnnnnnnnnnnnnnnnnnnnnnnnnnnnnnnnnnnnnnnnnnnnnnnnnnnnnnnnnnnnnnnnnnnnnnnnnnnnnnnnnnnnnnnnnnnnnnnnnnnnnnnnnnnnnnnnnnnnnnnnnnnnnnnnnnnnnnnnnnnnnnnnnnnnnnnnnnnnnnnnnnnnnnnnnnnnnnnnnnnnnnnnnngttgtggtttgatgtaaaacagctaagacttacaacacaagagacaaaactggcaatcgagtggttgttgtggtttgatgtaaaacagctaagacttacaaccgaaggacagccaccataattccagcagtagttgtggtttgatgtaaagcagctaacgcttacaactaaatcagtgcaattggtgaaagcttgcgggttgtggtttgatgtaaaacagctaacgcttacaacgctcggagcagtttatcaatcaagctgtgagttgtggtttgatgtaaaacagctaacgcttacaacagggatattttgcagtcaatactttcggataaatctgaggtcaacacctcgcgggcgatggggacatggaaggctggaataccagcgaaagtatttgatcaacccgcaaaagaccggtcaaaagccggtctttttatattataccactcaaactttagtacgatcgattaatggctcaccggtccttgatggtgttgcgccccgttgcattcaaactgcagggtaatgtgttcaatgccgaattcatctttcagaatatgtgtcaactcctgattgatggcttcggtttccgacagtttcaggtcgtgctgaatgaccacatgcccttcaaagtgaatggttttatcggttagccgccaaatatggatatgatacacccgctccacagcctgctgccgggtcagccgggcagcaatctccgcaggcacaagatggtccggcgcaaactgcatcaaaatttcggttgattctttcagtagcttataggtatgaaacagcaggtagaggctaatcatcaaggtcaccgttgggtcaatccaataccaatcccacagccaaatgcagactgatccggcaataactgccagcgaggttaaggcatcccccatcaggtggaggtaggctgcacgaatatttaaattccggtgctggtcggcatgcagcaggaaaaccgaaaagccattggccaccaaacccagcattcccatccaaaacatccaccgaaaatcaatcacatgcggatcgacataacgtttaatggcttcaaccatcaggtaaaaggaaatggcaatcaggatgagtgcattgataaaggctgccagaatttcagctcgtttaaagccaaaggtgcttttagccgttcgttcccgatgtcccaagcgatcggcaacataggccagtaccaccgcaacaccatcactcagattgtgcagggcatccgaaatcagcgccaaactccccgaaattaacccaccaatgacctgcgctaaggtaatgatcacgttcagggcaatcgtaattcccagtcgttggtgcgtatgcatatgattatgagccataattccttgattaaaataaagtttatacctttaatagcgtattcttttaaaggatgaacctcaatgaacgtataaaaatacaaagcaataactacaaaccagaacaaataaacccataagccgatgaaacttttcttacagtttaccttgattcttttgggcatgctagccacaccaaccgccttcgcacaaaaaaccatcattgatttatacgaattgtataaaggaagaaatcaccttgaaccagcaaatcgtgagcaaagctatgcggatgttgccggttcaccctacgctcagcaagattttgttatcggctccgtggtgctaaaaaacggcgatacctacgaggacgttccgttgcgctacaacacctatgaagaccaaattgaatttaaacatcccaatggcgttgtgttaaatctgaataatccgaataagctgaagctcattgcaattgggcaacagcaatacacctacttcgaaaaagaagagacgccccccgacggacttaccggctatttcgaattgttggaaaacggcgagattcagctgttaaaaagacaaaatattatccttaaaaaaacatctccggcgaaagcctatcaagatcccaaaccagcacgttttaaagaacgccccaccgattattatatccactaccagaaccaactgtttaaaataaacagtgaaaagcagctattcaatacatttccaagcctggagaaagatttaaaacctttcattaaaaagcaaaaactcaagttccgaaaggaggaagatctccgtcggatcattgcccatgccaaccagctctagcaaaccgcttagccaagcttgcttttaagctcaataccattatttttgcatcccatcagcaactaagcgaagtcgctgattcagggcaatattcagcggcatcgtgccttttgcaaaaatattttagcaggaatgtgctcttttgatgcaacaaattaatttcggctgccgtctttcaatcagaaacagcaataacattggaagcactttaccaaaatatccatcaagatgtgattgaccgctgcagagcaggcgaacgagatgctcaattccagttgtataaattgtattataaatcgatgtacaacaccagtttgcgcatagctggcaatgccaccgatgctgaagatattatgcaggaagcttttttaagtgctttcaagaaaatggacacttactccggacaagtaagttttggagcctggctcaaaaaaattgttgtgaaccgttctttggaccatctgaaaaaaaagaaagttcattttgaagaactggatgaacgcgtaactgaagaagttgaaaatccgctgatggaaattcgtgaagtggatatcagtaaaataaaagaagccattttccaacttccggaaggttaccgggtagtccttagcctctacctgcttgaaggttacgaccacgatgagatttcagaaatactgaacatcagcaattcctcgtcccgatcgcaactgttgcgggccaaacgtaaattacgcgaacgtttattaaaagatgaagttttttcaatcaactaaataccggatattatgaacgatttattggagaagacaattcgggaaaacaagcaagctttggaagaagatgcccccatgggacacttcgagcgatttgaagccaaactcgatcaggagttacaccataaaaagcaattcaacaggaagatttacctgcaaatagctgccgctgtgatctttgttctgttactcggcaaccagcttcgcatgtatttctcaacagaaaaagaattagctccagtaaccttggcctccgtatcggaagaatatggcgaagtggaattctatttcacctcatcgatcgaccaaagcatgcaacaatgggaaaaactgattgccgatggttatatatcagaagccaaccagcaaatgatggaaaaggaaatgaaggagttcgaccaaatggaagcacaacttcaagaagagcttcaggccaatcccgacgatgagcgggtgatcaatgccatgctggaatattaccaggctaaactaagcgtaattacgctgattatagacaaattaaaagaagtgaaacaacaaaaaatgaccgataatgaaactcaagtttaagttactattcatgctggcgatggtattttcgctggctgccaacgcccaggagtacacccgggaagaacacagtgcctttttgaaatcacaaattcaggcgctcgatgtcaccaataaatttggaaccattaccattaacgattttggaggtgactcagttgttgtagacgtgcgcattaccgtagaacacaccgttgagaaaaaagcagagtttctgcttgatcagatcaagattagcactcgtcgcgtaggacaagagctgcaggtagaaacggtcatcaacgacaatttcaaaaccaaacggaatttctccattgactatacgatcaacattcctgccgaccgcgacctgcaagtgaccaacaagtttggacatgtggttttaaataacctggccgcaaacggaagctttaaccttagctatggcaacctaagtgccaatgacttagcggctccggctggcaataaaatcaggcttaatcttgactatgggaaagccgatatcgaatcggtcaaccacctggttactgaaattaagtactccaaactattcattggcaaggcagggaccgtacaagcggagaccaaatactccggcctcaacatcgaagaagccgatgagctcgatctggagtcgaaatacgatggggtaaatatcgaagaaataaaaagcttaagagcaaactccaagtacaccaactatgacattgaagagctaggacagagcttaatgcttgacactcaatacggctccgtgagagttgatgaggttggtgaaaactttgaacacattgaaatcaccaatagctacggtgggctcgaaattggcctggatgatgcggactattacctcgatgcgaactgcgattactgcgatatcagatatccggaagatcgtttctcgggcaatcgggagaaacgcgaccacagcattaatttgcagggagaagttggagaaaattccaatcgccgggtgattatcaaaagtcgctatggaggaatcaagctgaaataggctgaaactgctgaaaaaacagagaccgtaagttttaaacttgcggtttttttttacttttaatgtt

SEQ ID NO: 1513 - DNA, 24032 bp, synthetic construct
  misc_feature 1..24032: note = Synthetic
  source 1..24032: mol_type = other DNA
tctgaaccaactccatttttgtgatcagcaatccttgttttcagatcacttgttacaccaatataaaatgtggttctttttgaattactcattatataaacaaatcctcctttcataattgagaacctgaaacaagttcaggttgacgttctaatcagctaaatatttcaaacgtaaagttactgcatttttgtgcgcttcaagttgttcagtagtggccattttctcaatagcggggccaattgctaaaagtccttcttcactaatctcctggaatgttatctttttcaggaaactatccaaatttacgccactgtatgatcgtgcccagccattggttggcagggtgtgattggttcccgaagcataatcgcctgcactttcaggggtgaattctcccagaaataccgatccggcgttggtgattttttcagccagttccatatagttttttgtgctgatgatcaagtgttccggtgcatattcattgattaaatccactcgattagtatcatctgttacaacaatcaagacactgttagaaagtgctttttttgccagttcttttcttggcagttgagcaacttgagtctcaacttcggcaattacttcctttaatgttttttcgttgttggcaaccagcacaacctggctatcggcgccatgctcggcctgcgacaaaagatcggaagcaacaaaagccgggttcgaagtttcgtcggcaactaccagcacttcagaaggaccggcgggcatatcaattgaaacctcattcatgctaaccagttgtttggcagccgttacgtattggtttccaggaccaaaaatcttgtaggttttcggaacggtctccgtaccgtaagccattgctccgatagcttgtacaccgcccagtttgtagatttgtgttacgcctgcaacctttgcagcatacaaaattgccggatggatattaccatttttatcgggtggagaacaaagcacaatttgtttacaacctgcaatttttgcaggaagcgccaacatcaatactgttgaaaaaagcggcgctgttccgcccggaatatacaatccaactttttcgatagctaccggtttttgccagcaggctacgccgggcatggtttccattttcctaacctccggcttttgagcattgtggaaagcgttgatattgtcagtggccatcgtgatggctgctttcaattcctgatctacagcagcttctgcatttgcgatttcttctgctgatacctgaaatttatccagtttaacaccgtcaaaacgttcggtgtactccagaagctttacatcgccctgttcacgaatttcagtcaaaatattttgtacgcgtccgtataattccgatacatcgaaaagtgggcgttttaaaatatcggtccaggtatttctatccggatttatgtaagtcttcatgaagtcgttttttttgttttataccataaaagccaggttgttgcccgaaaatagcaaattattgtcttagccttttataaggattgtgtcaatcgttcaagtttaaaaaatcattttctcgataggaacaaccaaaattccttcagcaccggcttttttcagttttacgataacatcccaaaattcgttttcctcaattactgagtgcatcgaactccagccttcttttgccaatggtaccaaggttggtgccttcattcccggaagcaacgaagtcactttttcaattttttcgtttggaacattcagcaggatgtattttttaccttctgcacgttgtaccgattcaattctgaaaatgagttcgtcaagaatttcctgctttttagctgaaaggtttggattggcaattaataccgcttccgatttcattaccacttcaacttctttcaggcggttgcttaccagcgttgatcccgaacttacaatatcgaaaatagcatcggccaaaccaattcccggtgcaatttctaccgacccggtaattacgtgaatctctgcagtgatgttgttctcatctaaaaattttttcagaataacagggtaggaggtagcaatttttttgccgttgaagaattcgactcccggataatcaattgattttgaaatggccagcgacaagcggcacttcgaaaaaccaagacgtttggcgataaccacgttttcttctttctcggccatttcgttttcgccaacaacaccaatgtcggcaactccgtcggcaacggtttgtggaatatcatcatcgcgcaaaaacaaggcatccattgggaagtttctcgcttccgataccagtttacgtttaccaacactcagtcctattccggcctcgttgatcaggcccattgagtcttcgtttaatcttccttttgtttgaatagcaattttaagtttttccatgtctgttttatataaaaaaaggcctgcctattatggcaagcctttattaattaatatcgttgagtttgaacaaaacaattacagcctacccgatggttggtttccccaatgatggccgtgatgtattgttcttcctgtcatatctgttatttggttgcaagtataattataatattgaattcagcaagcacctgtggtgttaatttaaaattaaagttaagtagttttaatttcctgatttcttaaagatggttgaattgtttgtcgtttgacatgaggtaaccaagggattttaatctaataattccccttggcttcgccatggggttccgctttttctccccgtttgaggggagatgtcagcctttatggctgacagaggggtgaaataaagaaaattcgagtttcagcgatttagctgaaataaagttggcgtattacccttggctttgccacggggatagtaaattttaagaattttctttattgaaaagaatcgatttataagtagggttccaacttcagaagggcaaaaaaatgccgctgtattttatgttgcagcggcattttatgttgttacaaaaaatgttatttcaccttttttgccgtaattggcatttcgccttcaggcgtgcttaccatccctttcatgttttcgccatctacttttagtttcagggtaacataattgtaatctacataaagcccacattttaggccctcttcgctataggcgatctctttcagatcgattttgtatccatcgtccagtttgatatgtccagccagctggccttctttttcttctataactattgttccggcattataaccgtatggcgcactcggaacttcatatttccattcaccaataacatcatcgttggttttgacttctgtcgcctgagccaagttccctgttaaaaacaaaacaaaaacaaagagcagtaattttttcattgcattaattttaaaagtttagaatttcttattttcagttatttagacgaaaacaaatttgatgttttactgcgattattacaaactaaagggatgaattcggctatttggggatgaaaaaaacaagaatcaggacagaatatctaaaaaacgagacgagtatttttctgaaactggaattgttttatcaatggagcgcaaatgcaggtttagtttctttttatttttttgaataaattcgatatttgaagtattaaccatgtaggaacggtgacacctgagaataccttcggaagaataccgggactccaggtttttcattgtatttcgtaaaagctgacgtttgaattttttttcaagcaaaaagttaaccgtaacataattatctgttgactcgatataaagtaaatctttagcaagaatcgaaaatttagttttccctttatcgtctttgaaagctaatcgtttgttttctaaaggtgtagaaagtagattttgcaaagcctctatttgctcgaggtgtttcttgtaataaataattaaaagcgcgaatgaatagggtattagaattccgaggacggtgtattttaatgaaaacagaaagtcgtttatgaagttgccgataggatttccgtaaagaaagatgtataccaggctgattagaataatttcgataaacaaccaaagaagatatgtttttacccgaaagtttgattgtttaaatagttttcgaagtggaaactgggtaaacaaaaataccagagccgtaacaataccataacttgaaagccttagtgattgaataagtggcgaatcggaataccagcggccaatgttccagggcttaaatacatttataaaaaagatgctgaatgcaaggataataacaataagcaagtacctgtcttttttccggtcgagcaaactgaagttgttattcaaaaattttaggttcaacgtattgctgtttatttgtcaatattaaatgtttgtttcaagatttcaaaaaaaacaatttaattattctcttgttggtgattcccaattaatatttattgctttgtggactcaaaggcatggaatttgtaaacacacaactcaattcgttaataacagaaatattaaagtcgtgaaatatacaattatacttctattactcttcgtgctattttttaattcatgcactgaaaaaccggctgataatagtgatttgcctgaaattctgctaaaaaaatcgacagatattttacccatctcaagttttgttgaaaatctcgattacctggaattaaaagttaatgaggcaggaatggaatttggcgatattattaatgttaaagaattggatggtgatttgatcattcatcaacgccgtgcccgggaaatcagttttattcggtttacacagaaaggcgattttatcaatacaatagtaagcaataaagagggaagtggtaaaataaggaaaccactggatattatttcataccaaaaagattttgcagtgttggctgacgacggaatttatagtattggtaaagacggtaaatacaaaacaaaattagtagctggtaaaatgccgggcagtaaattcttcgaatcgaaaaaccagttttttgtggtgaatgatgtaccggattatggtttgtacactgtttattctgaaaacagtaaagcaaaaaatataacgtttcctggagagcgattaaaagatttggggcgttcgaatctagccgtttccggtactaaaagtgtaaagttggtttcgtcgtacagtgatacggtttttacgtacaaaaacaccggttttaaaccggaatacctgattgaaagtgatggttatccgtcgtttgctgaaatgtggcgaaacaccggcgataagaacgatattgagaccttgaaatacattcacaacacacaccactcgaaaataaaaagctacttcgaaaacagcaactatatttttcttacgtattggttaggttcgcaccaaaccacagccttgattaaaaagaatggttgggaaccgatgtattttgatgaggcggttaataatatagatggtggtatttgggacaatcctttatttctttcgcaaaataatgagctttacattcctattacagcctataaagttggtgggcataaaatatcggataagcgtcataatgaatttgagaaagttcagttgcatattgccgctacgggaaacccgcttataatgcgttgtaaactaaaataagtggagtgattagtttattgctctttttttaccagcattagcttattcccttccagttctgaataaccctgatcgtatacaaaataataaacacggccggttttagtggtgtaaatattcgtgaaataggtaaagttgaaaccttgtttcttgagtttactcttgtaagttattcctttttcttccgggtttagttcttccagaatcgagtgattgtttttaagaatgcggttgatttttcggatgtaattggaggccccgcccacctttttattgttgtaggcattgcggcaactgtcgttacaaaatttttgatcggctcgtccttttaacggctctccacattcaaggcaggctcttatttccattttttattgatttagtttgagatgctaaaatgctaatatacaaaaatatatccgtttgtaaacgtttacaaacgtttattgtcgactacaaacgtttaaaaaccggctaagcttcaccagccactctacatttgtttcaacaattgcgttacaggactcgcataagatacagtcctacattattaactaaaaaataaatatcatgaatgcattaagaaacagcgtaagattgttaggtaacctgggagaagacccaaaagtaaaaagattagagagtggaaaagtagttgccaattttaatatcgcaaccaacgaaatttatcgcgatagtaacgggaataaacaaaccgaaacaacatggcaccgattggtagcttggggaaaaaatgcagaagttgctgagaaatacctgaaaaaaggaaaagaaattgccattgaagggaaattgacaaaccgccagtgggaagataaaaatggggaaaagcaatatatgactgaggttgttgttaactccttgctgatgctggataaagcatcaaactagtaaaccggaaaccgttaatctcaaaaaaacagtagtgttaccatttgtaacgctactgttttttttcatcagaaagttcctctccctaaaagttccactctccctaaaacatttttacaggcattggtcctggtggtggcgctgttatatccatgtcatggaattccagtaccattttttttaaaactattttcaaatgccccttccgatgttgcgtttttcttatactgttgattcagtatttctacttactttccatgccgccggcaaaatccatcacacacatggtattataacgcggatgtgaaccgcatgccacaccgatacttttaaaatcaggttgtaagagattcgcacggtgtccgcggctttttacaccatcatcgatcaataggaaaatgacgatttgctgtgctgaagtatttccataagcaatattctcggcaatacgaacctgccattttccatagcgttcaatccgatcttttaagttcgatcgatttcttccggtgtgccctgttttgccggtttttgactggtctttttgatgatctttggccgctttggtcaaaagtttgtcgggatataaaaccggaacagggctggcttttttcaacacacgcacacattcttgtaatgcgctaatgccttcctgggtcattatcgatttgtcgccggggtaatgcagcacctttctttcgtagtatttagccagtggagcaatgtgtttttcggcatattccgaaggattagacctgaacaagttgatctcatatatcacttccttttccagatcagtcaagtaattcgcatcgactgcggtgtttaatgtacgatctcttgttgtctcttcagctgaaactgacagactcaaagcgattaaaaatagtgcgattctcattttcacgattatactttttagaatgaaatcttttatgcaaataccatgctgctatttacttttctatcccagatggtaattacacaccgggtcttattatctacccgctggtcgtgcgttgaaactacaaacgttattttttcatctttattaagttactccattaatatcgggcagattttcggtagaataagaatcaagattggtagtaggctccccggtaagagaaattgtgtcatctgtttttctgatagcgtcgaatggttccggactttatgcgatttcttatgttggaagagtgaacggttggccaatcgaaatattgaatattagacgataaaattcgaataacagaataaaggttaagtataaacaggaaaatagttgaacaattttggtattgcatcaatagttgcaagcaaatgtaaaataacttgttttctttgctcccaattttttaaacagaaccggggcataattaaccccgattttatatatttacgtacatgaagatatttgaaggacattcttttcatatacccgttctgggtgtaggatattcaatagacactcctgtaaacgttgctccatacggaatttcatcagtgatttcgttagttgacgatggaacaattgaaaaaatgcgcgaattttactgcaacaaatttgatattccgtataaggctatatcgaaaaaagtagaagactttagggcagaacgaattacctcctacctaaacgtggtggaagagattgtgaacaggaaagttgaagagcttagaaatgcaacatcgagtgcaagtggcgaattggaaaagtacattgatatgcttcctaatacttcgtcgttaaaatcgaaatttgccgatagaggtcgtattgctgccgacgatttttcaaaatgggtgaaagaaaaattgcatgtggggtcgattgatgtaaacatcatgacaaaactggatcaggcacactacaaaagtggcgagcaattaccgatagaacagaacgatgcacatgctgctttacgtggttatgccaacagtaatttaagttcgtcgctggtactttctgccggaatgagtccgcgtttgtacagctacatcgagaattttaaagactttttccccgatgtgaaaggtaggattaaaaagaaaattattctgaaagtgagcgatttccgttcggcttttatccaggggaaaatgtttgcagcaaaaggtttgtgggtgtcggaataccgtattgaatcgggagtaaattgcggcggccatgcttttccaactgatggagttttatttggacctattttggaagagtttaaacaaaatcgcgaaaaactttttagtacttgtgccgaagcttataaggcggcactcaccaaaaaagaaatgccgcaaccggctgaagagccagagctaaaagttaccgctcagggcggggtaggcaccagcgaagagcataatttcctgcttgatgagtacaatatggacagtgtgggttgggcaactccgtttatgttggtacccgaagtaataagcatcgatacagaaacgatggatatactggctaagggaaaagaaaaagattattactatagcggattatcgccacttggtgttccttttaatagtattaaaggggcatcgatgagtaaaagaaggttgcaacttgcccaggatggaaaacctggaacaccttgtactaaagggtttttacgttataatactgaatttaccgaaaagccaatttgtacctcatcacgccaatatcaaacacttaaattacaacaactggatgaaatgaatttgccggaagctgaatacaaaaaggcctacgaaaaaattattgagcccgaatgtttgtgtataggtttaagtgtttcaactctgctttcgaaaggaatggaaatgaaagatgccgaaaaagtaacggtttgtccggggcctaatttggcttatttctcaaaaatttcgactttaaaagagatggttgatcatatttacggacgtattaatttgctcgataaaggttatcggccgcatatgtttttgaaagaactgaatatgtacctcgatatttttaaggagcgaatggaagcttttcaaaaaaatatggatgatgtgaaggaaaagcgtaacctggcgaagttcaaaaagaacttgatggctggaatcgactattacaaaaatcttttcggcgaaaagaaaaaggatgttgttcaggatatggaaaagctggttcagaactattcagtgctgaacacggaattgtaattgtttttaattaccatacaaaaagcggaattcatttagttgggttccgctttttttgttgacatcagaccttcaaggtttttaaaaccttgaaggtctcgttgttaaaaaaaggcaaaaaaaactcccaccgaggcgggagtacaggaatttttttccttcggcatatagccttattgtgataagatgtaaaattgaattctatgtttttgaacagatgctttataaaagctaggctaatgtaatacatttttattaaaatctatttatatttaacaacataattctttaaaaaccttagaaacgcattgtaaaatggctaaaattttaggactcgacctcggaacaaacagcgttggatgggctgttgtagaaaaacaagatggagaattctctttgttagataaaggagtacgaatttttcaggaaggagtaaaaattgaaaaaggcatagaaagttcgaaagcggctgaacgaacagaacaccgcagtgcccgaagattgaaataccgtagaaaactacgcaaaatagaaactcttaaagcgctgtcggaatatggttattgtccgcatctagcaagtgaagaattagacttatggcgatacaaaaagatatatcccaaaaatattagttttcgtaactggtggcataccgatgaagattcagaaaaacacccttatttttttcggaaactggcaataacccggcaattagatttaaacaaggaggaaaataaatacaaattgggccgtgctttttaccatctggcacaacgaagggggtttttcagtaaccgtttggattcaacgcctgagaatgaaacaggaaaggtaaaaagtagtattaaagagttacaggaaaagaagggtgatagaacattaggccagtatttttatgatgattgttacttaaagggagaaaaaataagagaccagtatacaagcagggaagatgattacctggatgaatttaagcgtatatgtgcatttcagaatatcccggaagaattgcaacaaaaattgcacaaagccattttttaccagcgtccgttaaagtcgcaaaaaggtttgattggcaaatgtgtatttgaaccaactaaagcccgatgtgccgtgtcgcggccggaatttgaggaataccgaatgctttgctttatcaataatattaaaataaagacacccgatgatgaaaagttaaggattcttaatgcagaagaacgaagtaaaatagtgcctcgctttttcttgcaacgcgaacatttcgattttgaagatttagccaaacaacttgcccctaaaaagcaatacaaatattacagggacaggaacaaaaaccctgaggattacttgctgaactattcaatgaaaaccacggttagtggctgccctgtttcagcaaggttcaaggatctgtttgggggtgaatttattgatgaagattttaattacataaaaggcggtaacaacagaactcctaagtttgtttcggatgcctggcatgtactctacaccttcgattcagataagaaactaaaagaatatgcacaaaagcattttgattttagtgaggataaaatgactttattttcgcagaaaattcacctaaaacaagattttgcatcgttgagcctgaaagccatcaataaaattcttccttatttgcgtgaaggtttaatatactcacatgcagtctttttagccaatatggaggagacagtgcctgctcatgtttggaaaaatgaagagaatagaaaaataataagaactactattaaagagattattgaaaaccattctgacaataccacaatcgtaaatatggtgaatggatttattaccaatgcccgtcgagagaatgaggtgtggagcgaagaggctaaacacttgtattttaacgatcttgacagaaaaattaaaacggtctttggagcaaagcgttttgaaaccttttccgagtataaaaagaataatcttatcaatacgacgcaacgacttatagctgaatatatgcctaaaaaccttgggaaaggagaacatgtgaaagctgagcgccttgacgaagcagttctaacatttctgggtgataattttggggaagaaaatcttaatgcaaaaaaattatatcatccttcggcgattgaaacctataaacccgccaaaaggggaaaagatggcaggctctatctcggtagccccatgacatcatcggtacgcaacccgatggctatgcgtgcgctacatcaacttcgtttggtaattaatgaactgataaaagcaggtacaattgattccaatactaaaattaacattgaaatgtcgcgcggtttgttaaatgcaaacgaaagaacaggtttgaggcgctggcaagacgacagggagaaaaaacgtaaagaatatattgaacgaataaaagaacatttctctccagattatcaaccctcggtagatgaagtattaaaatatcaactatgggaagaacaaagacgcatttgtctgtacacgggcaaacctattaatattgaagattttctgggttctgacccccggtttgatattgaacataccatcccacgcagtcagtcgtacgacaattcgcaggaaaacaaaacgctttgtgaaaatgagttcaatagaaagactaaaagaaacagaattccatccgaattaccgaactccgctgaaatattagttcgaatagagcactggaaagaagaaatagagaaactggagaaggagattcaaaaggcggttcgccaatcgaaaggggctggcgataaggatcaaaaagataaagctattcaaaaacgacatcaactttcctacgagcgcaactattggaagaataaatacaaacgctttacaatggaagaagtgccggaaggttttaaaaacagccaaatggtagatattggcatcattactaaatattcgcggctatacatgaaaaccgtttttccaaaagtatatacggtaaaaggcaacaccgttgccgattttcgtaaaatgtggggattacaggatatttacacaaaaaaagcccgtgttaaccatgttcatcattgcattgatgccattacaatagcttgcatggataaaagtaattacgaaactctggcaaaattttatcacgacagtgaagatgcttttgaacgtggacatgaagctaaacctgaagttgaaaagccctggctaacttttgccgaagatgtaaaagatattgaaaaagaggtgctggtatcgcatcatacacccgatgtactgcccaaacaaagcaaaaagaaactgcgaaaacgcggtaaaattcaatacaataaaaatggagatcccatttatttaaaaggcgatactgtgcgggggagtttgcacaaagacaccttatacggcgcaataaaacgagaagaaacaaataaaaagggcgaaatagaggagaaaattaaatatgttgtccgtaagcctttggatatggtggaagatagcaatattaagaatattgttgatgaacgtattcgcgaaattgttgcgaatgcccgaaaagaagaaaagaatctcaaaaaagagatagaagcattaaaaaagaaacttcagaaagctgaagaacgcgaagaagctgggctaaagcaggatattgcaactattgaagagcagatacgattattgtattctctgccgaataaaaacggcactcctgttcccataaaaaaggtaaggttactccaaccttccgtaaccaatcctttacgcattaaaaaacagcgcgataaatcgcaaaagaacccgaaaccctggaaagaagattattttgccaccaacgatggtaattacatgatggcaatttatgaaggaaaggataaaaaagggaagctaaaacgcgattttgagattgttaacaatatgcaggcaggcgagtttttcaaatactctgttcagaatattttaaaagcccaggaattgggagaggctgatagtttatttccgcagaaaaagatagccgggaaaattgatttgccatttaaagccattataaaagtgggcactatggtaatgctttgggaaaatactccggatgaagtttgggatatttcagctgaggaaataaaaaggagaatgtataaggttgttggtctttctcagcagattattcaaggaaaatatttctttgctactataataatgaggtttcatcaagaagctcagccaacaactgaattaaaagttaaagatggtgcattcgaaatgaatgagaattttaagccatatcgaaaaatgaatcataatcagtttaatgcactaatagaaggagttgatttcgaattaacacctttaggcaaaataaaacgattaaaatgaaccacccaatccttcaaggccccaaaaaccttgaaggattacgaaagaaccgaaaaaacacccaaaggtcgtaaagactcttcgggggtgatgaaccaaaacttttccaaagtttctgaaactttggaaaagttactgcaacaacaaacctttcggagttttacaaacccgaaagcatttcaagcccaaaagaaagaaaccgaaaaacaacacaaagtgttaaaaaccaaaaaacaaacagaaccaaccgtcaggttttgctacaaaccgcccggaaatgtcgcgaaccatcgggaaatgccattgaaccacccggaaatggtagaaaaccaggcagaattggaacaaaccaaacagaaatgcaacaaaccggtcagaagcggaaaaaaccgcccggaaatgcaacactaccacgtcgtgtcgcatttctgttccgtttttagcatttccggaagaaattttctgaaaaagcaggactcattgtaatacaattcaataaaacgaccctgaacagtggattgaatggatatttgtggttaacctttacctcattttccaaattttccgatgttcgcccttaagctgccaatagtgcaggatacgatgttaatttttcaaaaagaaacaaaatcatttatttatgaacacgtcagaattgaccattgaagaaatcatttatgaatcgggattacgcattaacaacagtttaagcgaccgaaaagtgttgaatgcggtatcgccacttggatacaccgaaactaaacttaccgaaggagctggcctgttaagcgaggctaccaccttagttgaaacccaaaaacgcgagtatggcgaggttgatgccgcacaaaatgcctacgaaacccagcgagcagaagcccatagcaaatacatggatttgctggccatttgcaaaatagcctttaaaaaggatgtaaaggccatttcaacactcgatttaacggggcgccgggccagtaccctcagcggatggctgaaacaaaccattggtttttaccgggctattttggccaacgacgaatggaaagccgcactggccacctatgggcaaaccgaagagaaaattagtgccgaactggccgaaattgaggccgtagcaagtgcatcggaaaacaaaaagaaagaaatgggcgatgcccaaaatgccacccaggaacgcgacgaaaaactggaagaactggccgaatgggtaaacgattacgaagtaattgcccgcattgcgctggccgataaaccgcagttgctggaaaaactgggtattgtggtgaaagggtaaactcatatttgaatcagatctcagacctttaaggtttttaaaaccttaaaggtctatataaatgaattaaagaaatgaaaactatcccacttgaatacggcaagttctatcacgtttataaccgcggcattaatgcttgtaacctgtttcgcgagaacgagaattatgaatatttcctgcatttgtgcgataagtatatttcaccggttgccaatacgtatgcgtgggtgttaatgcggaatcattttcatttgctggttcggataaaaactacccgggaactaaaccttcaaggtttcgaaaaccttgaaggtttgaaaggaacaaaccgaacttttgtaaaccaacaattttcaaatctttttaacgcctacaccaaagccataaacaaacgttaccaacgcaccggaagtttgtttgagcaccctttccgaagaattaaaattgaatcggatgcccatctgaaatatttggtgtactacatccaccataatcccattcaccatgatttctgtgaacattaccttgattatccgtggagttcgtacctgacagttatttcacctaaaacaacaaaactaagcagggccgaagtgctaaagtggtttactgataagtcgaattttgaaaaatttcattcgcaggaagaaattaaaaagtttgatgaattaaagatcagttgtcagggagacctttaaggtttctgaaaccttaaaggtctggaggtaacctaaaaaaccaattatcatgctaaaacgtacactatttatttcaaacccctactacctgtcgttaaaaaacagccaattacaggtaagcgagcggggagggatggtactaaaaaccgctccggttgaagacatcggctttctggtgctcgaccatccgcaaatctcgtttaccatgaaactggtggaagaactaagcgaaaataatgtggcaaccgttttttgcgacagcaaacacatgccctcatcgatgttgttgccgcttgatgcccatcatattcaaaacgaattgttcagggcacagatagccgcctcggaaccattaaaaaagaacctctggaaacaaactattgaggccaaggtgaaaaaccagggcaggctgctcgataaactggggaagaaaagtgtgcagcttaaaaacattgcaaaagcagttaaaagcggcgacagcgataaccgcgaaggttttgccgcacgcatttactggatcgccctgctgggcaaagattttattcgcgaccgctatggcgagccacccaataattttctgaattacggctatattctgttacgctctgctgtagcccgggcattggccggatcgggactgctggccactctgggcattcaccaccgtaaccgttacaatgccttttgtctggccgacgatattatggaaccttaccgcccttatgtagatgaaattgctttcgacctgaacgaaaaataccccggaacttttggtttggaaaaagaacataaggccgagctacttcaattaatgacagtggatgttaatattggggagaacaaacgcccgctaatgattgctttgcagcaaaccaccgcctcgctggcacggtgttttgccggcgaacaacgtaaaatatgttaccctgtttttgaataatttttttacagaccttgaaggtttcaaaaaccttcaaggtctaaaatgcaatcactatgcatcgcatccgcttaaatgcctatcatattatgtggttatttgtttttttcgacctcccggttactaccaaaaaggagcgccgcctggcaagccgttttcgtaaagacctgatgaaagacggtttttcgatgatgcagttttcggtgtataaccgccattgtgccagtaaagaaagtgctgaagtgcacataaaacgggtaaaaagtttcatccccgagcacggccaggtgagcatacttacggtaaccgataaacaatacggaaacattataaacgtgtggggcaataaatcgagccccttgcccgaaggccccaaacaactcgaaatgttttaaccggcacgaataaaccttcaaggtttctgaaaaccttgaaggtttgaccggaaaatgttacattcgtaaaccgttctttgatattttgacggaatatcaattatacaacatagaataaaaaaaacaatacatcattccgcttccctgccggagaaagggcataatctaccttgtaattttacctgaaacaccagtaaaaacaggagatacccaccccttggttgtggtttgatgtaaaattgaaacgatattcaacttgttttgtgaatacgatttcatgatgtttgttgtggtttgatgtaaaattgaaacgatattcaacttattaactgaatggccctactggtttccggttgtggtttgatgtaaaattgaaacgatattcaacagaaactataacactcgaccacggcaaagagttgtggtttgatgtaaaattgaaacgatattcaaccaggtcgttaaagcggcctccttcagcggtgttgtggtttgatgtaaaattgaaacgatattcaactgctgctcctttttgggctcattgtcaacggttgtggtttgatgtaaaattgaaacgatattcaaccatcgaaaacactgccacctattgaattagttgtggtttgatgtaaaattgaaacgatattcaaccgatgtctgaagcacgaagtatctggtaatgttgtggtttgatgtaaaattgaaacgatattcaacggatccggagaaagccaaacgttacggcaagttgtggtttgatgtaaaattgaaacgatattcaacgctccttttacgcatccagtcgtggtaaaagttgtggtttgatgtaaaattgaaacgatattcaacataaaacaaatgtgtataccacaccgcacagttgtggtttgatgtaaaattgaaacgatattcaacaaagtaactttgaaagtgaaagatgcaatggttgtggtttgatgtaaaattgaaacgatattcaacaaggcataataaatggctattggccgatcggttgtggtttgatgtaaaattgaaacgatattcaacattcatgagttatagctgctgttcgtaatagttgtggtttgatgtaaaattgaaacgatattcaactttacgcatgcatcaaaaagcgctcgaccggttgtggtttgatgtaaaattgaaacgatattcaactttcttttgttctgaaacagtagcttcaaggttgtggtttgatgtaaaattgaaacgatattcaacattcatgagttatagctgctgttcgtaatagttgtggtttgatgtaaaattgaaacgatattcaactttacgcatgcatcaaaaagcgctcgaccggttgtggtttgatgtaaaattgaaacgatattcaactttcttttgttctgaaacagtagcttcaaggttgtggtttgatgtaaaattgaaacgatattcaacgaaaaagtaacagacagttacaccatttcggttgtggtttgatgtaaaattgaaacgatattcaaccataatacaatattaccacagggggcagggttgtggtttgatgtaaaattgaaacgatattcaacgcggcgcaaggatgggagtatgttactgtagttgtggtttgatgtaaaattgaaacgatattcaacttacacgaaattggagaaacaaccattaaggttgtggtttgatgtaaaattgaaacgatattcaacatcatttatttcaatcttagaggctgctttgttgtggtttgatgtaaaattgaaacgatattcaacataacaaatttacacttgtcctataattgagttgtggtttgatgtaaaattgaaacgatattcaacggtaaagcggaaagcctcaaaatctccgtagttgtggtttgatgtaaaattgaaacgatattcaactaaaatatggtgttggtgaagatcccatcagttgtggtttgatgtaaaattgaaacgatattcaacattaccttctcaacagatccacacagacaagttgtggtttgatgtaaaattgaaacgatattcaacaaaacaattcacaacaactactcaggcagggttgtggtttgatgtaaaattgaaacgatattcaacactactaaagcaccccatttcattttcatggttgtggtttgatgtaaaattgaaacgatattcaacaatactgtttaaaggattggatgatccggagttgtggtttgatgtaaaattgaaacgatattcaactggtttatctacttcaatcaatgcgccctggttgtggtttgatgtaaaattgaaacgatattcaactgaactgattttattgtttgaaagacccaagttgtggtttgatgtaaaattgaaacgatattcaactccaaaccataaattgaataacttgaaccagttgtggtttgatgtaaaattgaaacgatattcaacaataagatttgtgctgatggaagatgagtgttgtggtttgatgtaaaattgaaacgatattcaacggttaggattcacaccgtcagaaccgtcgcgttgtggtttgatgtaaaattgaaacgatattcaacactttacgtattactaacagcttttcacgggttgtggtttgatgtaaaattgaaacgatattcaacttcaaaaagtctacaggtacacagcagggtgttgtggtttgatgtaaaattgaaacgatattcaactcacgcagttggattgcagaaataccgagggttgtggtttgatgtaaaattgaaacgatattcaacactaattacagaactaaatttttatgtcatggttgtggtttgatgtaaaattgaaacgatattcaacaaacttcaagagataccttattcggagaaggttgtggtttgatgtaaaattgaaacgatattcaacttgcaatcgaatttaaaaggcattgcaacggttgtggtttgatgtaaaattgaaacgatattcaacctgtaaatttgtttggtcgctacattaaagttgtggtttgatgtaaaattgaaacgatattcaacaacgaccccacttggcgcgaggctatcgaggttgtggtttgatgtaaaattgaaacgatattcaacacctaaatggtgagcaaaaccttcagcgtagttgtggtttgatgtaaaattgaaacgatattcaacacgatgtcgctttaagttcgtaacagtatggttgtggtttgatgtaaaattgaaacgatattcaaccatcgtgcggttttggaggagaatgtcaaggttgtggtttgatgtaaaattgaaacgatattcaacctagaaaaattgttatcaattgaaggaaggttgtggtttgatgtaaaattgaaacgatattcaacgaatggctggtgttgtcgcgtccaaaataggttgtggtttgatgtaaaattgaaacgatattcaacttagtacggttctccatgctcctgctgctggttgtggtttgatgtaaaattgaaacgatattcaactctaaaaacagcgggtcggccattagtttagttgtggtttgatgtaaaattgaaacgatattcaaccaaacacataaaagaggtttgcaggctggtgttgtggtttgatgtaaaattgaaacgatattcaaccgaatttgcggaagcaaacaccccggaccgttgtggtttgatgtaaaattgaaacgatattcaacccattgctggtcgttgcttttttctgccatgttgtggtttgatgtaaaattgaaacgatattcaactgttagaagtagtgaatcaagcaatgcactgttgtggtttgatgtaaaattgaaacgatattcaacgaaatggaatttgtaattgtgccaaacacgttgtggtttgatgtaaaattgaaacgatattcaacctaaaagcaatcatattaaaaggaggtgtggttgtggtttgatgtaaaattgaaacgatattcaacaagattgagaaaaggtgataatgtaacacgttgtggtttgatgtaaaattgaaacgatattcaactctttcctgatttgggcatttgccaataccgttgtggtttgatgtaaaattgaaacgatattcaacgtaccatcagattccaaagaaacccaatcagttgtggtttgatgtaaaattgaaacgatattcaacaagtaactttgaaagtgaaagatgcactggttgtggtttgatgtaaaattgaaacgatattcaacacaccggcgaattaattaacccgaagtaagttgtggtttgatgtaaaattgaaacgatattcaacaaaggcgcggaagtcgcccacaccatcgaggttgtggtttgatgtaaaattgaaacgatattcaacaaatctgaaaactttgagtatacctttaaggttgtggtttgatgtaaaattgaaacgatattcaacccacagaacccgttgttgtttgtcttacaggttgtggtttgatgtaaaattgaaacgatatttatttattcagaccttcaaggtttctaaaaccttgaaggtcttttttttgaattaatactccatttgaaaatagatcaagcttcaaattgtaataatgacataaaacatcccgatgtgatgataatctgtttatatttggcggcaataaaaattctggttgtttttctacactacaaattttaaatcattttatgaagccttgttatttgtcctttctggtgattcttatgttatttattggtggtaatgctaaggccgaaaatgccgattcgctttatgttgcaatgcattacaacgagtcggaatactttatagaaatgcgcgacggcgtaaagttatttacagtggtttatacgccaaaagacgagtcgaaatcgtacccgatgttgatgaatcgtacgtgttacaacgttgacgggacacgccataacaaactccgggcgccatccgcctacctgattcgaggtggatatattttggtttaccaggatgtgcgtggccgttacatgtcgggaggtacttttgataacatgcgccccaacattccgggtaacgatgtgaaaaacaaaaaagatatcgatgaaagctcggatacttatgatacaatcgattggctcataaagaatattaaaggcaataacggcaaggtagggatttacggaatttcatatcccggacattacagtgctgccgctttgcttgatgcgcacccggccttaaaagcttcctcgccacaggcaccaatttctgatttctttttcgacgatttccatcaccagggagcatttctgcaatcgtacatggccgcatttccggtgtttggttaccagaaagattcgttaaccaataaaacatggtacactgataaaatgatgcgcttgtataaagatcgtccggcaaatggttatgaatttaatctggcgctgggacctttaaaaaatattactaaaaaatatcattacgataatttcttttggaaccaggtgtggagcatcccaactacgatgaattttggcagaaacgttctattcttccacatctaaaagatattaaacctgcagtgcttactgttggcggctggtttgatgccgaggatttgtttgggccgataaacatttataaaaccattcagcataatgatccggatgcaaaaagtaccattgttatggggccgtggacacacggtggctggtcgcgcgaacgcggaaaacaaactgtgaatcatatttactttggcgacagtatttctactttctttcagcttgaaatggaaaaagcctttttcgattattacctgaaagatgaagggaaaatgactttaccggaagcctacatgtttgataccggattaaaggagtggaagaaatacgatgaatggccaccaaaagatgttgaaaccacgagtttttcctttggtaaaaatggcaaactattgatgaatactgctaccacggcagatgcagaatttagctatgtcagcgatccggccaaaccggtgccgtatcgctcggaaattgaaggattaacatttacgccgagaaattttattaccgacgatcaacgccatgcttcttaccgccccgatgtgctggcgtttaaaaccgatgtgttggaagaagatgttactattgccggcgaaattctggcgcagctggtagtttcaatgacgggtactgatgccgattttgtagtaaaactgattgatgtttatccggatgatcatccaaattacgagcacaatccaaaaaatataaaaatgggtggctaccaacagttggtgcgtcacgaagttttccgtggccgtttccgcgacagctattccgagccaaagccatttgagcccggagtgccaaccaacgtaactgttccgcttcaggatgtgctgcatacttttaaaaaaggccatcgtattatgattcagattcacagtacctggtttccgtatatcgaccgcaatccgcaaaaatatgtcgataatatttacaaagccgatgaagacgattttatcaagtccgaaattactattcacggcatgtcaaccgtaaaagctggcggtgatttgcctactgttgaattgataaggaagaaagactgagggattgaagtgtgcaatgtgtgaatgctttattgcaggaaggcttttatgattgagctgcgtttttaattggaatagaggcaatttaaaactttgcctattgcgtt

SEQ ID NO: 1514 - DNA, 24020 bp, synthetic construct
  misc_feature 1..24020: note = Synthetic
  source 1..24020: mol_type = other DNA
agcaggggagcggcttcagcatcagaaaaaatctcaggaatcggataggcatatttttcaggcacaaccatatattcagcatatcctccgtttgtatcccgtcctgtggcccgaaaatcgggacacaaattttcttgccccgacaggcagtattcacacgttccacaggctgagaaaatccatgctactccaacccgatctccaacattgaaagttgtttttttgctttttgattcttcaacggttccgataacctgatgccccggaattaccggatattttggcggaggagtgcggccttcaatttcatcaatctctgtgtggcaaacgccgcaagcccgaatacggattagtaattctccggtttttgcagtcggtttgcgaagctctttgaattgtaaaggtttgtcctcttttgtcagatccgaaatcttgttaattacccaggctttcataagcgtaaaattagaggatgttttcagaaaaacaaaagaaggactataaatgaaaaaaccttcaaagcacaaaggccccgaaggtttttagaatatatcaaagtacgtgttttacatcaaaaagcttagcaaaatacctgcacctacagccgaaccgatcacaccggaaacgtttggagccatggcatgcataagcaggtgattggtcgggtcttcttttaatcccatcgtctgtacaacccttgcactgtcgggaaccgcagaaacacctgctgcaccaatcatcggatttattttattttcctttttcataaaaagattcataatttttgcaccggtaactccacctgcagtagcgacaacaaatgaggctgcccccaaagcaaaaattttaatcgatgaaggagtaaggaaaacatcagcttgtgttgaagcaccaactgtaatcccaagtaaaatggtgataatatcaattaaggtattacttgcagtattggccaatcgtttggttactcccgattcttttagcaaattaccaaagaaaagcattccgagcaacggaagtgcagacggagcgatgtacgctgttaaaatcaatccaacaataggaaagagaattttttccagctttgaaaccgcacgcggaggcttcatttttatttttctctcccgtttgcttgtcattaaacgaataacaggtggctgaataacagggaccagagccatataggaatatgcggcaatcgctattggcccgataaggtttttcaccgtagtgccgtcggccaggacattaagcccgttggccagttttgaagaaataaaaatagctgttggcccgtcggcacctccaataattccgatagcacctgcttccggtggtgcaaagcccaaataaagcgctcccaaaaaagtaagaaaaataccgatttgtgccgctgcaccaagtaacattagttttggattcgaaatcagtgacgaaaagtctgtcatggcaccaataccaaggaaaataagtggcgggtaccaaccctgcacaactccctggtagaggatattaagtactgaacccggttcataaatccccagtttcaggttaaaatcagtaacctgaaacattggaatattaccaattagaattccaaaaccaatcggaatcagaagcaagggttcaaagtcatatcgaatggccaggaagataaaaacaaaaccaacgagcatcattaccaggtgacgccaggaaacgtttgcaaatcctgagaattcgtaaaaattgaataaacctgaaacagctccgctgtagtttttgtacactaaaccatcaccggccaggtgtccgttgtcatcaagatataaagcacggtcgggtaaagtaacaatttcatcttttgtaacatagccgccctggttattggggtcggtatttttgtgaagatgagtgacttttaccgggttaaaactaagaagcacttttccgtcttcaaagctgtagtgaccggtgtaacgaaccttggccgagtcaagaataaaggttttgtcttcttcaaaaccgtaggttttaaatcgtctttttgttgttacattttcgtcgtcaccgtcctcgatgtggtaagttggatttggaacataaccatcactatagtttacccatttccctttcgtaagaacattacctatttcttttgattgttcaccgccaaaaacagccggcgaacaaagaaataaaagtagtagtaattgaagtatttttttcatgttaaaaatcgtaaggttatccaatttcaatcaaaacatcatcctgcaacacggtatcacccacgtttactttaatagaaagaatttctccacctttatccgtctgaacctggttttccattttcatggcttccataatcatcagggtttgtccttccgttacaacatcgcctactgatacattaatttttaatatagtacctggcagtggtgctccaatggtatgttttcctgttgtttctttctttttaatttgtccttcgcccggaagttgctcaaccggtttacggattaatttaggtgtttttgaagttttgacttctcctttgatttttacctcgtaaatggtaccgtttacatccacctctgcaatatcttcttcaatatcccttatgtgaacatcgtaatcgttacctctgattatgaatttatattttttcatgttgtttattgttttggccaattttgtgttacactgtaaatttttgaactccagggagaatatgcttttctaactctttttatggttacaatgttactctcttcatcatgcatttcgtcgaaatacaaatgaagcgccatgctgattgctgcagtaacatttccttccacaatataatcgtcttctttctcctctttatgagtttcttcttctccttttttgcgaaacatctttttcagattaatattcacaattttaggcaggcgaagaaacacgaccaccaaaagtgtcagtgcaaaaaacacaattgaaaatccaactatcgtaactgtataaccgaattctaccgaactaaccaatagtgtaaataaaagattcatgggttttcagttttaaagtggaatgtttgaatgttttttcggtggatttatcagtttttttgttgccaaactttgtaatccgcgaataattctgaaacgtgtatttcttggctcaatcacatcgtcgatataaccaaaagaagcagcctgatacgggttggcaaacttttctgtgtattcctcttcgtgttttgcaataaattttgctctttcttccgggtcttcaatgtcctttaattttctgccgtgtaatacttcaacggcaccggaagcacccatcactgcaatttcggctgttggccatgcataattcaggtcgcctcgtaattgtttacacgacattacatcgtgtgcaccaccatacgatttacgcaaggttactgttattttcggaaccgtagcttcaccgtatgcaaacattagttttgcaccgtgtgtaataataccgccgtattcctgtttacttcccggcaaaaatcccggaacatcaaccagcgtaataatcgggatattaaaactatcgcagaaccgaacaaaacgggctgcttttcttgatgcttcaatatcgagtactcctgccaggtaattaggctggttggcaacaatacctaccggctgaccgtcaaattttgcaaatccgacaacgatatttcgtgcataatttctgtgaatttccagaaactcggaataatcaacaatggtatgaataacatctgttacatcatatggctgattgggattttccggaataatttcgtttaatagatcgtccaaacgatcaataggatcgttacactccgtaactacaggatcttccaggttattttgaggaagataacttatcagtttccgaaggatcattagtccctctttttcattttcaaccaaaaactgggcgacacccgattttgaggcatggattttaccacctcccaaatcttcaacgctgatattttcaccggtaacggttttaacaactttaggaccggtaacaaacatgtaggaattttgctcggtcatcattataaagtcggtaagggcaggggagtagacagcaccacctgcacaggggccaaaaatggcagagatttgcggaataactcctgaggccaggatattacgctcaaaaatttcggcatagccggccagcgatgtaacaccttcctgaatacgcgcaccacctgagtcattaataccaattacgggcgctccggctttcatagccatgtccatcactttgcagattttttgcgcaaaggtttcagaaagtgaacctccgaacacggtaaaatcctgtgagaaaacataaaccactcttccgtcgatggttccgtgtccggttactacaccgtctcctaaaaattttgttttttccaaaccaaagtttgtacaacgatgtgtaacaaacatgtcaaactcctcaaaacttccttcatcaagcaacaactcaatcctttcacgggcggtaaatttaccttttctgtgttgcgattcaatacgattgattcctccaccaagttttgcctcagcacgtaaatcaattaatttttttattttatcctgggtactcattatataaaatcggttgttatattaacttattcttttccgcaaatttcggtaagcacacccattgttgattttggatgaagaaaaccgatatttagtccttctgctccttttctggccgatttatcgattagccggacttctttttcttccagttcggctaacgattgatttacatcgtcaactgcaaacgcaagatggtgaattccctggccttttttctcgatgaattttccgattggtccttccggatctgttgattccagcaattcgattttggtttgaccaaccataaaaaaagctgtttttactttctggtctgtaacttcttcaaccgaataacatttcagacctagtttttcttcataaaatggaattgcctcctccaaactgttaactgcaattccaatgtgttcaatatgcgatatgttcatcttatttagaattattttaaagtgtttattgtcagaattttaaagctgcaaagttacttttctgtttattccttaagttcaaaacgaaaaaacatttcatttttgaatatgaatttcagaattaattaatattgacattttgatagcctcaataaatgtttgaaacaaaaaaaaggcagaacccagtctgccttgttatcctaattttttactgttcgtcccaaacaaaatggaaatgaggcccaaaccgttcaaatgctgctttatccaattcttcctgatgttcaggatgagctatggatataatcagttttgcgcggtcctgcaatgttcttccatataaatttactgcaccatgttctgtaaccagccagtgaatgtttgcacgtgtacttactacacctgcaccgggcgtcagaataggtgctattttgctaatccctttattggtaactgacggcatggcaatgattggttttcctcctttacttaatgaagctcccctcagaaagtcgatttgtccgccaacacctgaatagaattttgttccgatagagtcggcacaaacctgtccggtaatatcaatttgtaatgccgagttaattgcagttacttttgggtttttggcaattacattaacacggttgctgtaacgaacatcattcattaaaactcccggattgtcgtcaacaaaatcatacaatttttttgaccccatcaggaaggtagcgaccattttacctttgtcaatttttttgttttttccgttaaccacgcctttgtcaacaagaggcagaataccatcagcaaacatttcagagtgaactccaagatctttgtggtttccaagcattgttaaaacagcatttggaatggctccgattcccatttgcagggtagcgccgtcttcaaccagttcggctacgtaaccaccaattttgcggtcggtttcgctaattgggccgggttcggcagttaccagttcgctgtcgtcttcacagaaaaggtcaatttcgttgatgtgaatcattgcatcaccaaatgcacgcggtacattcgggtttacaattgcaatcacagtatcagctttttctaccgccgccagtgtagcatcaaccgatgtcccgagagaaacataaccaaacttgtcaggaacagaaacctgaatcatggctacgtttacttttaaataaccttcgcggattaaacgttgtgtttcctgaagaaaaacaggaatataatcagcgtaacctgcctgagtttgttttcttacgttgtgagccacaaaaaatgattccaactgaaagattccctcgaattcaggatttgcataatcaactgttccttccgtatggatatgctggattcttacgtttctgaactctttgtttcttcctctttcgcacagtgctttaatcagtgggtgtggtgtcacagcaacactgtgcatgtgcacacgatcatttgattttactacttttaccgcctcttgtggcgttataaattttatatttttcatggtttccggactataaatcaggttttcgaattaagggcgcaaatataaaaaaacaatctgcttttttaactttcgaatatcagaaatacttgttcaaaagcttttgtaaagtatatgttaactttacactttttgccataatgtaaatagttaaagacgtcattttgttcaaattattttttcgaacaacttttatttggtgacttttttttgatttcaggatggaagattcctgctggcggaatatgaagtaatacattgtgttacaatatcagacaaacaacccgaggatttatataaatgaaatactatctttaacaagctgaattaaaccggtaaaattatcatgaggagatacctttattttgtaacttttgtagcggcccttggggggctgatgtttggttttgaaaccgcggttatcaacggtgccatttattatgttgcagaacattttcagctaagcgagtttatgaaaggatttgtagtaagcacggcactggccggatgtgtgattggtgccttgtttatcgggaagcccggagataaatatggcaggcgttatatgttgaaaataatggctgcgctttttttgttttcgatgctgggagctggtttggccgcaaatatctggatgtttgtgattgcccgctttttggggggtattgccgttggaggtgcgtcagtgcttacacccatgtatatttctgaagtttctcctccgaaaattcgcgggaagctggttgcaaccaatcagctggctatagttaccggtattttggttgcttttttttccgactatatgattgacagtttgctgcatggaagctggcgctggatgtttttggccggtgtggttccgtcggcagtcttgtgggtgctgttgttttttatttcgcgcagcccccgttggctggtgaaaatcgggaaaaacgaagaggcccgtgaagtgataaaaagggtgaatccggaagaagatgcagatttacttatgacttccataaaagattccttaaaagaagaggccgcaaataaaagagtgtcgctaatgaaaaagccttatttacggcttgcaataattggtattgctgtaggaatgtttaaccagctggcaggaatcaatgtcattatgtattattcaaccgatattttccggcaggcagggttttcaggcgaagcagctttatttcagtctgtactgattggtttgaccaatttgatatttaccattgttgccatgtcaattatcgatcgcttcggacgtaaatttttgctttatgtcggagcttcgggaatgtcagtttttttgggtttattcagttgggcatttataaccgatactaaatcgggatttattcttttatcgttgttaatcggatacattgctttttttgctttttcgcagggagcggttatctgggttattctttcagagatgtttccaaacagtgtccgcgcaaaaggaactgcaatgggctcattctcgcactggatatttaactttgcaattgccttgttgtttccggttgtttcttccatgattggagttggctacgtatttgttttctttactgttgctacattgttgagccttctgttttaccgctttgcattaatcgaaaccaaaggtaaatcactggaggaaattgaaaagttgatattaaaaaagtagatttgccttattaacagaacttattcccaatgagtataaattttagctaaaacaatcgttatgaaaagatatattttatttactgtatttattgcaggatttattgtcgcacaggcacagcagtcagaagagtcaaacctttgtatggggcattattttacccagccggaaggcaaaacgtttattgaccagttgaaaaagcagtacaccacaaaagaagagtggttaaaacgggctgaagtaatccgtcagggaattctggagggagcagatttgagccctttaccggagaaaacacccctgaaaccccggtattcaaaagaaagaaaatacaatggttatacggttcggaatgtagccatcgaaagtttgcccggtgtttttgttaccggtagtttatatctccccgagaaaatggatggaaaaacagcgggtattctttctccgcacggacattttggcgatcggatgcagtcggcgcgggttagctccgatattcaaaaccgctgtatttcttttgcaaaaatgggtgctgttgtttttgtttacgatatggttggttatggagaaatggctgcctacggttgggaacacaatcattccaaagcattaaaacaacaaatatggaacagcattcgtgcgctcgattttttattgtcgctggataatatcgaccccgaacgaattgcggtgacaggcgcatccggcggaggtacgcaaacatttatgttaacagctgttgataagcgtgtaaaagtttcggcgccggtggttcaggtatcagcgcatttttttggtgggtgtgtgtgcgaaagcggaatgcctgtacataaaagcgaccatcaccagaccaacaatgtggaaatagctgcacttactgccccgcggcctttattgctcgtatcagatggtggcgactggacattaaatacgcctaaagttgagtttccgcatattcagtacatatttaaactgatggacgttgaagaacgggtagagaatgttcattttccggatgaaggacatggttaccagttctcaaaacgtaaagccgtttatccctttttagcaaaatatttaaaccttaacctaaatgctgttctcgacgataagggggaaataaccgaagagggaaatgtcattgaaccctatgaaacattaaaaatatttaccgcttccaatccgctgcccgactatgctgtgcgtacaaacgacgatgtggtttggtagcgtttgaagagaggttttattcagacactttgaggtctggccgacgctcaaaggtcgcggatatattttcttaacctttttgtttaatggttattcttctggtttttatcgtgttatttgcttaacccgatagatatatcttttttgcccctccccgtttggaaggagtttgagggctttaggcatcagacactttgaggtctgacagacgctcaaaggtcgcgcaagtttgtattttcaacctttctgttgggtgtttattcttctatgttttttcgtgttatttgctaaactgccggatatattctctttttactcccctcctttggaggggccgggggaggctccccctacaaataaaaactcccaccgaagcgggagtataggaattttttccttcggcatatagccttattgtgataagatataaaattgagttctatgttattgaacagaagtttaacactttacagcgctaatataagaaaataaccattgaagtttttatatttaacaacatattacaaaaatctttaacctttaaatgcccaaaatcatggcaaaaattttaggactcgacctcggaaccaacagcattggatgggctgtggttacaaaagatgatggaaagtattccttgttgaacaaaggtgtgagaatctttcaggaaggcgtaaaaatagaaaaaggtatagaaagctcaaaggcggcggagcggacggagcatcgcagtgccagacgtattaaataccgcagaaaactacgtaaaatagaaacgcttaaagtattgtcggaatatggatactgtccgaagctaacgaaggaagagttagatttatggcgttacaagaagatttatcctaggaatgttagttttctcaattggtggcttaccgatgaaaataacaacaaacatccttattacttcaggtatattgcaataactcaaccgttaaatttagaagacgaagcagatagacataagctgggacgcgcattttatcatatggcgcaacgccgtggttttctgagtaatcgtttagattcaacaccagagaatgaaaccggaaaagtaaaacgtagtattaaggaattacaagaaaaaaaaggtgataaaactttaggtcaatatttttatgaagattgttatctgaacggtgaaaaaatacgggaccaatatacccatcgcgaggatgattatctggatgaatttaaccgaatatgtgcatttcaaaatattcccgatgaagtgcgaggtaaattatataaagccattttttatcaacgccctttaaaatcgcaaaaaggattgattggtaaatgcgttttcgaacccagcaagccccgctgtgcagtatctcggccggagtttgaagagtacaggatgctttgttttatcaataatataaagataaagaccccggatgacgagaagttgagaccgctaaaagccgatgagcgaagtaagataaaacctcggtttttcttgcagcgagaacatttcgactttgaagatttagccaagcaattagcccctaaaaaacaatacaaatattttaaagaccgggataaaaatccggaagattatttattaaactattcaatgagagcgaccgtgagtggttgccctgtttctgctcgttttaaggagttatttggctctgagtttattgatgatgactttttttatgtgaatgatgataatgacaagacacccaagaaattttcggatgcctggcatgtactttataccttcgattctgacaaaaagctaaaagaatatgcaggaaagcatttcgattttactgaagagcaaacgattttattttctgagaagattcgcttaaaacaagattttgcatcattaagcctgaaagctataaacaagattctgccttatttgcgtgaaggtttaatatactcgcatgctgtttttttagcgaatatgcaagaaatagtgcctgctcatatttggaaagataatgaaaacaagaaaattataagaaatgtcatcagggagctaattgaaaaccatactgatgatacgaccattgtaaacctggttaatggacttataacaaatgcccggcgagagaatgaaatatggagtgaagaagcaaaaccatattatttcaaagagttggataagaaaataaaagcagcttttggtacaaaagaatatgacggtttcccggaagaaaaaaggaacctgctcacaaaaaaagcccaacaattaattgttgagtatatgccgaaagaccttggaaaaggtgaacacataaaagcagagagaattgatgaagctgtaatatcctttttaaaagataatttcggggaagaaattattaacagcaaaaagctttatcatccttcggcaatagagacatacaaaccagccaaaaggggagaaaatggcaagctttatctcggaagtcccataacatcgtcggtacgcaatccaatggcaatgcgtgctctgcatcaacttaggtcgctaacgaacgaacttatacgagatgggataatagacacgaatacgaaagtgaatatagagatgtcgcgaggtttgctaaatgcaaatgaaagggccgggctgaaaagctggcaagacgccagaaagaagaagcgaagggaatatgcagcgaaaataaaagaacatttttcagcagattatgagccattggaagatgaaatattgaaataccaattgtgggaagaacaaaaccatatatgtttatatactggcaatacaattgggcttgaagattttctgggtgcggaccctaaatttgacatagaacacactatcccccggagccagtcttacgataattcgcgagagaataaaacgctctgcgagaataaatttaaccgaagcataaagaaaaataaaattccgtctgagttgtcgaatcattcagaaatattagcccgcatagaacattgggaaaatgagattgagcaactcaacaaagaaattgaaaaagcggttcgccagtcgaaaggagctacagacaaggcacaaaaagaccgagccatacagaacaggcatcggcttaccaatgaacgtaattactggcggaataaatacaaacgttttacaatggaagaagtgtccgttgggtttaaaaatagtcaaatggtagatattggtattattaccaagtattctcggctttatctaaaaaccgtttttcccaaagtttatacagtgaaagggaatactgttgccgattttcgtaaaatgtgggggctacaggataattataataaaaaatctcgggttaatcatgttcaccactgtattgatgccattacaatagcttgtatggataagagcaactacgagattttggctaatttttatcatgatagtgaaaatgcattcgaacgaggttctgaggctaaacccaaagtggataaaccgtggtcaacatttgcagtagatgtaaaagatatcgaaaaagaaatactggtttcgcatcatacgcctgataatttaccaaagcttagtaaaaagaaacttcgtaaacggggcaaaattcaatacaataaaagtggagcacctatttatttgcgaggcgatagtgtacgcggtagtcttcataaagacactttttatggtgctatagaaagggaagcgttaaataaaaaaggtgaagttgaaaagcaaataaaatatgttgtaagaaaatcgcttgatggtttagaggatgctgcaattaaaaatattgttgacgacaaagttcgcaaaattgtaagcgatgcccgaatgcaggaaaaagatttgcaaaaacaaattgaagccctcttaaaacaacgtaaaaatgcagaagaaagtgaagaggctaaaatcgatgataaaatagaagagataaaactgcaggttgctgaattgtactgtttgcctaataaaaatggagcaccagtaccgataaagaaagtacgtatatatcaaccatcggtaacaaatccattgaccgattttaaaaagcaccgcgatttatctgaaaaagagtataagcaacagtataacgtggtaaacgatggaaatcatacaatggctgtttacgaaggatttgaccgtaatgataatataaaaagaagcattttaattctaaataatctggaggcgggtaagttttataacgggaaattagaagaaagcccttttcctgacaggcaccccaaaaatgggttatatctcaagtatttgctgaaaacaggaacagtggtgatgttttgggagaaatctcctgaagaattaaggagcaaagctgttgataaaattaaacgactttataaggttactaagatgagtaaaaacggtcaggttacatttaagtatcatcaagaggctagaaatgatgaaaacctaaaacttgattacgaaaaagaacatgggcaaaagccccctaagtcgttaacaaacggggaatcatttattgattttattaacccgtttccaaaattacttttgagtcctcctaaatttaattttgttgttgaggattacgattttagaataaaacttacaggcgaattaatatggttagatgactaggttaaaatattcaatccctaaaggtttttaaaacctttagggattattaatgaacctgcttttaaaactaccgcgcagagaaaatctaccggaggttcaataagaaaaccgataaaagcagaaaagaacaaccgttaaacagtataagatgttaaaaaccaaagcgaaacacccaggacgaatgcgggaagcaaatgtccggttgcggaaaacaaaatccgggtacggaatgccattgtaccacctcgaaacgggattgtaccacgaagaaatgttactgtacggcagcggaacgctaaattctcctgcgaaaagatacagtaccttgtacattggtatttcgcagcggtacggagcaatccgctatggttttacataaaatatttaattttttcatttaatctgttgatgattaacgaccctgaacaacagacatcaaaaaactccggagtttttccgatttttttttatgtctttcctgttcgcccttacactgccatcagcgcagaatgtttacacctgtttttctaaatttttaaaactatttttatgaacgcttcaaaaatgtcagttgatgaaattttgtatcagtcgggactgcgaatcaacaacagcctgaacgataccgaaatccgggatgccgtatcttctatggggtatcctgaaacaaaactagaagaaggagccgctctgttgagcgaggcaaacacgctggttgaaaaccagaaaaaagagtatggtgaggttgatgaagctcaggccagcttcgaagaagatcgccagtcggcgcataagacctacatggaaatgattcagatttcccgtatagctttaaaaaatgatgtaaaagctatatcaactcttgatttaaacggacgccgcgcccgcacacttagtggctggttaaaacagacactgggtttttatcgtgccattttggccagcgaagaatggaaaaaggcattggccggttatgggcaaaccgaagaaaaactaaatgctcagcttgcagccattgagcaggtttccgctgcttcagagacagttaaaaaagagaggggtgatgcacagaatgccacccaggaacgcgacgagaaactggaagagttggtagactggatttcagactatgaagtgattgcccgtattgctttggccgacaaacctcagttgctcgaaaaattgggaattgtggtaaaaggataatttaaatttaatcagaccttcaaggtttcaaaaaccttgaaggtctgtaaaccataaaagatgaaaaccatcccactcgaatacggaagattttatcatctgtacaatagaggaataaacggctgtaaccttttttgtgagcatgaaaattatgaatatttcctgtatttgtatgataaatacatctctgcagttgccgatacatttgcctgggtattaatgcgaaatcattttcatttgctggtacggataaaaaaggaaggggaaattaactcattttttgaaaaccttgaaggtttccgaaaccttcaaggtttaaagactcggaatagggttaatcagcaatttgcaaatttatttaatgcctacaccaaagccgtcaataaacgctttcatcgcacaggcagcttgtttgaacatccctttcgccgtattccggtaatttccaacgatcatttaaaatacctggtatattacattcatcataaccctgtacatcatggcttttgtgaacactttttagattatccctggagttcgtatttaactatgctgtcgcccaaaagaacaaaattgagccgtgcggaagtattacgttggtttgatgataaaaagaacctgattcaataccactcaacagaacaggttgaaaaatataacgaactgaaaattgaccaattaaacgattcctaaaatagagaccttgaaggttttcaaaaccttcaaggtctggaaaaatagaaaccatgctaaaacgaaccttatacatttcgaatccttaccacctttctattaaaaacaaacagttggtggtttccgaaaaaaacgggatgcctcttaaaactgccccggttgaagacctcggttttattgtgctcgaccatccgcaaatttcgtttacaatgaaactggtggaagaattgaacgaagtgaatgtggccaccgttttttgcgacagtaagcatctgccttcatcgatgcttttaccactggacgccaatcacattcaaaacgagattttcagagcgcaaatcagtgctactgaacccctaaaaaagaatttatggaaacagaccattgaggccaaaataaaaaatcaggcccgtttgctttcgaaactggggaaaaacagtatcccgttaaaggctgtcggcagaaccgtaaaaagcggcgatagtgataaccgggagggatttgccgcccgcctgtactggatggaattactgggccggaattttattcgcgaccgatatggcgatcctcccaatccttttttaaactacgggtacatcctgttgcgttcggcagtggccagggcattggcaggatcgggactgctggcaacgctgggtattcatcaccggaaccgctacaatgccttttgcctggccgatgatgtaatggaaccctaccgtccttatgtagatgaaattgtgtttgaaatgaaaaagagctggccagatgtatttatgctcggcaaagaacataaagcagagctattacaattgatgactgctgacgtaaaaataggggagaccaaacgtccgctaatgatcgccttatcgcaaaccactgcctcattggcaaaatgttttaatggcgaacaacgaaaaattgtatatcctgaatttgactgatattttataaacactgaaggttttggaaatcttcagggtcttgaaattggaaattatggcacaaacccggctaaatgcctatcatattatgtggttatttgttttttttgatctgccagttaccaccaaaaaggaacggcggcaggctacccgttttcgcaaggatttgttaaatgatggtttttcaatgatgcagttttcagtgtataaccggcattgcgccagtaaagaaagtgccgaagtccatatgaaacgggtaaaagattttgtgcctgaaaaagggcaggtgagtatccttacggtaaccgacaaacaatacggcaacatatgtaatttttggggtaaaaaatcagatcctttgcccgaagggccaaaacaactggaaatgttctgattcgcttattgttctttggactttcaaggtttttaaaaccttgaaagtctgcctgaataaacgaaaatttatctacttttataaggttctttgaaatcctgaaacaaaattcaattttaaatttagaatagaaaaaatgtacgcattaaaccacttctttgtggtgtaagaggaaaaaattgaatgtaactccggtgaaaataccagtgtttacaggtctttccttccccttggttgtggtttgatataaaattgaaaagagatccaacccggggtggaagcggatgtacaacggcgaagttgtggtttgatataaaattgaaaagagatccaacaatattgaattgttaagcgatgcgcttgagttgtggtttgatataaaattgaaaagagatccaacatttttcagtttatggttagagggtgacaagttgtggtttgatataaaattgaaaagagatccaacccgcagcagtcggagcggtcgaaatagtcagttgtggtttgatataaaattgaaaagagatccaacggcctgtttgctctttgtaaactatatcgggttgtggtttgatataaaattgaaaagagatccaacagatatggcaggaagggtatgttggcgttagttgtggtttgatataaaattgaaaagagatccaacttcagaaaccgtttatgcaaacgatgataggttgtggtttgatataaaattgaaaagagatccaacaccaaaaaaaagtctcatgcataccgccgggttgtggtttgatataaaattgaaaagagatccaactagcctctgtgttgagtttcaggccctttggttgtggtttgatataaaattgaaaagagatccaaccaagctgttagacatggcagacatggaaaggttgtggtttgatataaaattgaaaagagatccaacataccgaaattggttgaggcggcactaaagttgtggtttgatataaaattgaaaagagatccaacgataagcgtaaactgatgcaaagtgttgctgttgtggtttgatataaaattgaaaagagatccaacacacatgcccggaaacaaccacttaaaatggttgtggtttgatataaaattgaaaagagatccaaccggaacgcttgtcgtaactgataagcgactgttgtggtttgatataaaattgaaaagagatccaactttatggaaattttgttgctccggcgaatagttgtggtttgatataaaattgaaaagagatccaacctgtgcgactattacagcaatcatccaaccgttgtggtttgatataaaattgaaaagagatccaacaagcggtcaaaacatagcttttccgttatagttgtggtttgatataaaattgaaaagagatccaacagcgaacgtaattgagcctgaacgagattggttgtggtttgatataaaattgaaaagagatccaacaacaagcttggtgtgttgcttacgaatttagttgtggtttgatataaaattgaaaagagatccaacagctttgtattgctttcaaacgataaatcagttgtggtttgatataaaattgaaaagagatccaactatcataaatatcaaccggcccgtcgctgagttgtggtttgatataaaattgaaaagagatccaacaaatgagtgaggaagaacatggattaatagttgtggtttgatataaaattgaaaagagatccaaccttactttgtaatcatcagatacaactctggttgtggtttgatataaaattgaaaagagatccaaccaattaaaccttttcggcttagcttaccaggttgtggtttgatataaaattgaaaagagatccaacataccgaaattggttgaggcggcactaaagttgtggtttgatataaaattgaaaagagatccaacgataagcgtaaactgatgcaaagtgttgctgttgtggtttgatataaaattgaaaagagatccaacacacatgcccggaaacaaccacttaaaatggttgtggtttgatataaaattgaaaagagatccaactgccctgaattcgcctgttggttttagcagttgtggtttgatataaaattgaaaagagatccaacagctatacgcctgttacaccggaagcgaaagttgtggtttgatataaaattgaaaagagatccaaccagctggagccaaattacgcgcatcaattagttgtggtttgatataaaattgaaaagagatccaactgaaggaggttggtatatttctgtgtttctgttgtggtttgatataaaattgaaaagagatccaacaaatttgaaacacagtgcagaccattatcagttgtggtttgatataaaattgaaaagagatccaacccttgctttctctgcctgatcgaaatgatagttgtggtttgatataaaattgaaaagagatccaacaatttcatcttttttgcaggatagtactaagttgtggtttgatataaaattgaaaagagatccaaccgtacgtttgtgcgcccggctggcgtagcagttgtggtttgatataaaattgaaaagagatccaaccaaactgatgaaacatataaacgagttatgttgtggtttgatataaaattgaaaagagatccaacattttttctgttctgtttttgttcctttcagttgtggtttgatataaaattgaaaagagatccaacgtttttacagttgaaatgccgcaagctaatgttgtggtttgatataaaattgaaaagagatccaaccttaccgacattgctgttgtcgatagtattgttgtggtttgatataaaattgaaaagagatccaacttctgtatttttataagtatctcaacatccgttgtggtttgatataaaattgaaaagagatccaacgttacacaaggcgaagccggtttgaatggcgttgtggtttgatataaaattgaaaagagatccaacaaaacgaaaaagaatgaaaaatctgatcttgttgtggtttgatataaaattgaaaagagatccaactcagtatggtgttgtgtttgttcagtatgggttgtggtttgatataaaattgaaaagagatccaacatcgagggaaacgaatacaacaccgaagaagttgtggtttgatgtaaaattgaaaagagatccaacaaaacagaagaacttgcaggtacctgtgtatgcatgtgaataggaatctcaacttacttttaagctttgcggttaaaaaaggatcgcaccatgttgatgtcccatttattactattttcacgacgcaaaaaaggagttgtccttttgccaaaaattacaaaatcaatttataacctttacatgatgaaattagcttttgttattctcataccgtttttattttttgtttcctgctcgcagcaaacttcagttccggaacctgattacacaaaatatgtcgatccgtttatcggtgcagcggagtacggtcactgttttccgggggcctgtgttcctttcggattaattcaggtgggctctgaaaccggaaatggcggatgggaatactgtagcggttatcagtcaaccgactcaaccattaacggatttacacaagacaggctaaacggaaccggttgccccgatttgggcgacttgttgatgttgccgtttacaggagaaaaaccggaggtattcaaaagtacgatcaacaaaaaaaccgaaactgccagccccggatactatgctgttcagttaaccgattttaatattgatgctgaaatgactgcgactccccacgttgcgctgcatcgttataaatatccggctggtgagaagaccagcctgcttgtcgacttccagagttcgcagtgttcaagtcagaatcaattgcatgcacatgtgcaggacgcagaagtaaatttcgaaggagataaaatgattacgggttactccaacaccagcgtgtggttaaaccgtacttattactatgttattgaattcaataaaccaatcataaaaaaggagttgcttcccaaccgttctgaaaatgaaaaagcacctcgttatgtgcttgagtttgatttaggttcggatgaggaactgatgataaaagtggctttatcgtcaaccggagtggaaggagcaaaagcaaatctggcaaaagaaaaaagcgactggaattttgaaacaacgatagaaaaagcgaaacaaagctggaacgagttgctggccagagtagatgttcagggcgacaacgataaaaaaacaatgttttatacgtcgatgtatcgtttgtttattcagcccaataatattgctgatgttgacaaagctcctttttattccacactttcgttgtgggatacctatcgtgcagcacatcctttgtatacgattttggctcctgaaaaagtagatgattttgtgcattccatgttgcatcaatacgataatcagggatttttacccatctgggcactttggggaaaagaaacattttgtatgattggaaatcacgctgtgcccgtaattgttgatgcgtatctgaaaggatttaaaggttttgatgcagaacgggcgttcgaagcggtaaaaacttcattaacaagcgatcatcaaaaatcttcatgggcagtgtacgataaatatggctattatccatttgatgtggttaaggaagaatcggtttcacgcacaatggagtcggcttacgacgattattgcgccgctcagtttgccaaagtcctgggaaaagaagatgattatatgttttttttagaacgttcaaattactggaaaaatcttattgatccggaaacaaaactcgcaagaggaaaaaattctgatgggaactggcgcacaccctttaacagtttttcattgtcgcatgccggaacgtcgggcggtgattacaccgaaggaaacgcctggcaatacacctggcatgtgcaacacgatgttgatggtttgattgatttattgggaggaaaagaaaacttcaccacaaaactggattctctttttgagatggaagaatcgagtgaaggaaccggttttgttttggatgttacaggtttaattggccagtatgcacatgggaacgaacccagtcaccatgtggcctatttatacgctttggccggcaaaccatggcgtacacaggaattgttgcatgaaattgtaaaaacaaaatacatcaataaaattgacgggctgtgtggcaacgacgactgcggtcagatgtcggcctggtatatttttaccaatctcggtttttatccggtaaatccttgtggcggcgaatatattttgggtgctcctcaattacccaaagcaattgtgaatttacccaacgggaaaacttttacagtggaagcaaagaatttctcagacgaaaatatatatgtgaaatctgtagaattaaacgacaaaccctacaacaaactgtccatttctcacgaggaggtgatgaatggcggaacattgatgtttgaaatgggaaatgtgaaataaaattttgaccgactcctgttcattagagatttcttttacaggtattttgggctgaaaatcagactccgcacagaatgaaattgtgattattaatggaattaaaatccgccaaataatccattcttttgcatctgcttgtcaacttttaaattgataatttcagctatttgccgctgtccttcaggagttaaatgaatcccgtcggaagtaatatttttgaaagtgtcttttatttcagaatagatatctataaaaatacaattttctttgcgggcagtttttttgaatttcttctgtaaatacttaattcttttggcgccacctttatattttgctatcagcatttcgggcgggccgaacggcggaggtgaaacgataaaaatttggggttggtattgcctgtaaacaccgtgttgttttatttttaaaatcagtctttccatgtttagaggaacttgttttaaactatcggcaaatatcgctttgcaatcgttggtcccaagcattattaaaataacatccattccagctaattcagtatctcctttgttcaggtaggaatttacattccgaagggtatttaattcctttctgttcaaattatcaaatccagttgtattccccgaaatggctgtgtttacaatcctgtcgcttaaacggattttttgtaactgagccacccagccaaaatcaaattcaccgttggaatcgccgatggcaagtatttttaactgagaattttgagcaatagtaaatgctccccaaaaaacaagaatacaaacggtgaatacttttttcatgcttaaaagtgttgattcagaaagataaaagtagtaaacattggcgggcaaaccttgattttcgtgaaattgctttaaatttaatccattcatttatgaaggacgttgaggcaaatattgttaatgatcatgctcctgttatccgatcttccaaatttcggttttacgaggaactcaatgattttttgcccaaagagcggaagaaagtaagctttgttttttcatttacaggaacaccttctgtaaaaaatgttgtggaagcgattggtgttccgcatgctgaaattgatttgattctggtgaatggagaatcggttccatttgaatttttgttaaaaggcaatgaaaaagtttcggtttacccggtttttgaaacatttgatattttttctgtgattcgactccggccggagccgcttcgaaaaacacaatttgttatagatgtgaaccttggtaagctcg

SEQ ID NO: 1515 - DNA, 23930 bp, synthetic construct
  misc_feature 1..23930: note = Synthetic
  source 1..23930: mol_type = other DNA
aaaggtggattgcctccgttatttataatgtttctgtaaaagtcgattgattgtcttatagcgtaagttatcggttcccttccataagaagagattaactttgctacaacggggttgcataaaagtttatcaacagcgggaaggcttttataggcctccggtgatgtattcataaacgattaaaaaatttcataaaaattaaattccaaattctaaaaattaatcaattatcaatggtttttctttaaaacacagtccgtgaatatcaggaaaccattgtcatagccctgcagagagagcaggaatcgaacctgccacagccggtgttatccgtctgctgccggttttgaagaccggttggaacaccagttccgttctctctttatattttgtaaatttattaaaatattcattttaaattactacaagcttgttttttatcgcataagccataagacttatcgagtttttggaatttgtttttgtcataagatttgtcttatgaccaagaacagtcctctcgcttacaaacaatgcatctgctatttctttgttgtttaagccttcgcacaaaagttgaagaatttctttttcacgcctggtaagaaccaattcttccttagccgaagctttttctctggttatttgttttgtaaagaattcaaacaattcttccgagtaataattgcccccgttgtgtactgtctgaattgccttttccagagtttctttattaatattttttataagaaaaccttttgcccctacatcaatcatgctttggatatattcatcatcgccaaacattgtgagtgcaattattctgagccccggttgtttagtgagagcaatttttgctgcttcaatgccgtttaactcaggcatttcgatgtcgagtagtacaatgtcggcagtgtctgaatcaagatagttaataaattccaacccgttggttgcttcaccgcaaagttccacgtattttaatttgccgagaaccatttttaatccgttacggaaaatttcgtggtcatcaacaataagtattcttatcttcttatcattcatagatgcaaatctaaataattatttcgattttaatattaaatccgtcatcaggatttttcccaaaataatatttaccgtttatggacttaatcctgctgatgatattttttaatccggttcctccgatatctgacataataatcttctcggcagcaaagcctattccgtcatctgaataagaaagacttaacacattatgttctttttctaaaagtatatttacgctttttgctttggcgtgttttatagtattgttaataagttcacttataaccctgaacaggataagctcgagattattatcaaatttatcttcaatatttctggtgttaaagttaataataagctgatttgtcttgttcactttgtcgcaaaatgtctgaacagccttattaagcccgtatgattgcagaattgtaggcataaggttgttcgagattgttcgggtggtgtttactgcttcgtcaatcagttcgttgctttgagcaataagcattttcctctcttcttcgggcatagaaatggactttagctcgttaacataaagctttagtgcagaaagcaatggccccagcccatcgtgcatttctctggcaaatctttgtctttctctttcttcacctttgattacagcactcagaatctgccgctcaaattcaacgcggctgcttatatctcttacaacgcttaaaataaaatcttcgccgtttattttaaaaactctgcttgtaaattcaacctgaaagagttccccggatttttttatgtgttcggattcaaaaaagtaaattcctttttcaaatatgtttttacggttttcagtaatctgggatttgtatttgtcagattttatctcgctgattttcattttcagcaattcttcccgggtgtagttcagagactcacatgccgcggtgtttacttctacgatattctcgtttatgtctgttacaaaaatatcatcgccggtactgtcaaataatttgcggaatctttcttcggattcttccagtgcaacgctgattgtgtcaatttcttttctggatttttgtaactcgttaaaggaacgtgaaattctttcggaattaaaaatgtagataaatgcaagaattaaaagcagggcagcaaagcctattataacagccccttttatcaaatcgctacggaattcttctgtctctgtatcatacagaactgctgtaccaacataaagttcgtattgcttaaagtaatcgaaggccattatctttctttgtccgttaaaggaatatttaataattccctgttttgattctttgatttgtttaaacaaggtgctgtctccccagttctggccttctctttcgggatgaataagtaaaaccccgctctgatcaaaaaccagtggataaccgcttttacctattttaagcttatataaaaatgtttttaagttttccagatctttttctttgctgccaacataaagagccccgattacctcgttgttttttattataggttcataagcggtgatataccactcatcgacaacaaaagcacgtccgtaatatgtattgccgctcagcaactgacggcttacttctgaatcttcgggaatataggttcttaaagctctctggttgttttcattcattacatttgtagaaattctgacgaatccggagtctgctttctgaaaaacggtaaccgtgccaccgaacatggcctgcaggctatcaacaaatttattgtcagtgaaaagatcttcaccgtttattttccagttttttaaatagcaaaaatgttttgttttgctgatctgattggttatctcggttttaacggaatccccggttatcttaaaatcactgcttttaaaaaacgaagaggcaactttaagatcagactttacctgatctgattttaatgcatattctctttcgagcatatttaaaatggttttaacctccagatgtaaattgttttccaactgagtgttaaattctttaatggacttatttacaaagtaaaccgtcagaataagaatgatagcagttacaaagccaccaacgggaatgaaaagtcttagtcttagcgggatgttaagtttcttcacaatatgtattgattacatttttttataatggtcaatacaaaaatacaattttttatgtaatatgaaattttcccggtaatcaaattatttaacagggatagaaactgagaatgtactgcctacgtcgggtgtactttcaacattgacagtcccgttatataactcaaccattttctttgcaatggatagcccaagtccgcttcctgaaataaattttgttttttgatttttaatacggacaaaatcctggaacaaaagagaaatgtcctgctggctgattccgattcctgtatccctgaccgaaatttcgattttttcggtagttttacagatgtttataaatactttaccgttttcgacattgtatttaacggcattggaaataaaattgtttaatattatttctatttcgttactatcggctaacatgtacagcatttcgtcaccctgtaaggaaacagtaatatttttttgtattgccaatggctgtacagtatttatgacatgttttgcgatttcaacaatatctattttcttcagatctctgagttttttgcccgactccatacgggtaaggtcaagtaagtccattataaggtttcgcatgccgtttatcctgtcaatagacctgtccaccattatcatgtagtcgtcaatattatcgccgagctgtttttgtttcatcatgttcatatatccttcaatagcatttatcggggattttaattcatgcgataaaacagataaaaactgaaaacgtatttgtttgccgtcctctttcattttacgtgtcattcttttaagaaagaggttctttgttatgttttcaattgacgttttaagttcctgtggagtgaatggtttcgggacaaaattgaaagctccgttactggttgcttttattgcaaggtcaagagatgcaaaagatgtaatcatcattacggcaatatccatctctttttcttttatgtattccagaacctcaacaccttctatgcctggcaatttattgtcgagcagaataatatctatttgagttgagtcgataatttcaattgctttttcgccggtttcggcttccagaatttcgaaattaaaatcttcatccataaacgggtagcctacggtgaaatcacgcaatattctgatggcaccggatcttatatgcggttcgtcatcaactatcaataattttagagtgctcatatcttaatatttttaatttattcttggtaaagtaattttaaaagttgttcctgtcggggccttttctttatcagtatttgactcaacagcaattttccctttatgcattttgattattccgtaaaccagaggcaagccaagaccggtaccttttcctatctcttttgtagtgaaaaacggggtgaataatttatccatgttttcggcttcaattccacaaccgctgtcctttatttttatttcaacttcttttgcatttcctgtaacgaaaaactcaagaagtccgccgtccggcattgcctcaactgcatttttttcgatgtttgtaaatgcctgcagcatttgttcggagtcaatcataacataagggtcatgcaattccgatttgattgaggtttttatattatcgggaataacaacagagttaaggctgcttcgtacaaattccactatatcaatttccactactttaagcttgttttttctggcaaaatttaacaagccaccgactatgtttttacatctttcagcctgagttacaattatctgcatatcatctctcagcggatcgtcaggttttaattcgtccataacaatattgctgtacattgttataacaccaagcgggttgtttaattcgtgagcaattccggcagatatttgtcccatattggctaattgttccgagcgtttaagagccgactcggcagatgccagtttcttattcgagatttgaagagcattaaagtatttatacagcttttctgttgtaaacctgtaaatgaaaatcaaaagcaggaaaattgagagcgccgccactaaaactgctcctttaattgaatcgtgaaccatatcatggttttcaacatctttatctattgtggcagctatataaacttcgaatttgtcaaaataaagaaatgctacagtcttgttcttccctttatgttcataatcaattacaccttctttcttgcctttaacctgatcgtaaaaagagcattccggccatgtctggccttccagataaggatgaataagaataagtccgttcttgtcaaaaacaaacggaaatccgctgttgcctatatgcaggctgtttaatatttctttaagttcagataaatctttttctttatctccgacataaagcattccggcagtttctccgttaatgattataggctcataagcagtagtgtaccatttatctacaactattgccctgccgtaatatgttttacctgccagaattgactgaataaccggggattcatttggaataaatgttcctatagctcttgtactgtcaggttttcgcacattggtacttatccgtacaaatccgctgtcagatttctgaaaaacagttattgtccctcctataatggtttcaagtttatcaacaaaatcattgctgtcgtttagtatttcgttacctcttatccattttttcagatatacatcagatttttctccggtttcctgattttccacactcatacgaacggaatcatcaagaacggtaagcttttcctgataaaaaagttcgtgggctacttttagattagactgaactttatcaagtttgagtatgctttcgcgctcaaacatcttcgaaatggttttaacctcaagttgcaatgtgctttttatctgatcattgaaacctgaaattgatttgttaataattattgttgtggacaaaacgaccacaataataattattaatgataccggcagaaacagtttaagcttaagcggtatttttatttttggtttcattttaaattaattttaaagaacaatttgccgtcagagactgaaaactcttgaaaaacaaacagagtaaggaatttatccttactctgtttcggagttgaaattatttaatgtgtttttttacttcttcaataattttggcaccttcaaccggttttctgatgaaacctgctaccgggaaccagtgtgttttgccgtcttcgcctttgtaatcaatacctgctgatccgtcgttgatgttttttacaagcaatacctgtaaatctttgaagttaggatctttgcggaactctctggccatttccaaaacactgagttttgatgttaccaggatgtcaattgaagactggataaggaaaggaatttctttaaattccgggttgttcagcatttcctgagctaattcaaatccttcataaggagtggtcatcattacatcgaggatagcgagatccggtttaatactgcgaagcttttcaaggccttcttctttatttaacgctgaagttacatcgtaaccttcttttgttaatactgccgttactacggtgattacatcaatgtcgtcgtcaacgatcaggattctttttttagctgttgtttccattttgagtgttttttaaagttaataatttatgttaattatgttttgttttctgatgtaaagataatatgaattcaaatacaggtacagagatttagctacgtatttttctgtaataaacaattgattatttcggataaaaaccgatacttttctgcaattcaggtacatataaagctgaaattaagaatttatcgttttgctaacatgttgattgttagtgttttatgcttttgggggattttgggtgtgtttcgtaaaactgcaatcttatgcaaaattttatatgccatatttttacatatttaaaattttttgagatttttcttttgcataatccgggtgtttcataccttaataatcgctcagacttgcataatttttcaaatcgctgaaatctttttattatttttgcagaaaaaaagatgatttctcatagcgaagcttataatattgcccttaattcagctttttccaaactggttgtaaaggttaatgtaacagagtgcgtaagcagaattctggctgaagatattttttcttcattcaatatgccgccttttgataaaagcatggttgacggatatgccattcttaagtctgatatttcgggagaattatcggttgacggaattgtaggagccggtgatggttctgataatattgtaaaacccgggcattgcattaaagttatgacaggagcacctgtgccggaaggaaccgaaatggttgtaatggttgaagatgttgaaagttgtggtgacggcaaaataagaattacaaaccagaaatcatcagttaatatatcgccgaaaggagaggatattttaaccggagataaagtgctgacaaaaggaactcttttaaaaccttttcattgcggtattcttgcaactctcggttatgcagaagttccggtttttgaaaaagtaagagctggcattatagttacaggtgatgagataatagaaccgggaaatgaattgttgtcaggacagatttataattcaaatgcctaccagttaattaataattgcaagacactgggaattattccggagtattttggtattgcaggagatacatacgaagaaattgaaacagcttttaattcaatgttgcttaataacgatgtccttataattaccggtggcgtttctatgggcgactatgactatgttgctcctgtaatgaaagcttcaggattggatgttaaatttgacagcattgcagctcaaccggggcggcctctggtttttgctacagacgggaataaattctgtttcggaatgccgggaaatcctgtttccgggcttgtgctttttgaaacaatagtaaaaccctttttgtataaaatgatggggcacgactttaaaccgtgtaattttccgtttaaactaaatggtaaaatttcaagaaaaaaagcacagcgtaagtcttattaccctgttaaattaaatgatgacaacactgtaagtgcaattgcatatcacggttcggcacatataaacgcttattctcaggctttcggtataatcgccctggagataggagttacagaaattgaagaaggagaaatggtttatgttagacagatttaacagggaaattacatatttaagggtgtcggttacagaccgttgcaacctgcgatgtgtgtattgtatgccggaggagggcatcccccttaagaaccataaagatattttaagttttgacgagattgttgaagtttgcaaagccggaatagattcaggaataaataaaatcagaattaccggtggagagccgttggtgcgtaaaggaattgtaagtttaacagaatccattgcaaaacttccggggcttaaagatttaagtatgaccacaaacggaatcctgctggaccagtttgctcagagacttaaagatgcaggactgatgagagtaaatatcagtcttgatacgttagatcctgacgaataccggcaaataaccagaggtggcgaaattacagatgtgataaaaggaattgtggctgcacaaaaagccggtttggaaccggtgaaaattaattctgtaatttttgataaagacagtgattccatgaaagaaggactcaaagattttgcaaataagatgggcttgcaggttcgttttatttcaagaatgaatctggaaacgggagatttctctgttgttgaaggtggtaccggaggcgattgcaaaatatgtaacaggttgagattaacagctaacggttatattaagccgtgtctgttttcggacagagaattcagtgtgcgcgagcttggtgcaatagaagcaattatgaaagcagttgaatttaaacctgaaaaaggagtttcatgcatgcatggaaatttttataatattggaggctgaaaataattaaatatgccactaaggcacaaagaagaaaattcctttagtgttttggtgttttagtggcaatgataaaaatataatattttagtaacatagaaaaaacttaattagccacgaaagcacaaaaccacaaaaaaaagaaaaatctctttagtgttttagtgtcttagtggcaaaaaaaatatagtatgacagaattctcacatatcgacaacaaaaccggcaaagctaacatggtggacgtaggtaacaaacctgaaagtatcaggatagcaattgctgaaggttttattaaactgtcagccgaaactgtaaaaatgattgaagataacacaatcaaaaaaggagaggtgctttcaattgcagagtttgccggaattatggctgcaaaaaaaacacctgagttaataccgctttgtcaccagttgaatcttaccaaagtagatgttgctgctcaaaccgaaaatgacggagtaagaataactgcaacaacaaaatgtatagggcagaccggtgtggaaatggaagctctgactgctgtaagcattggcttgctgacaatttatgatatgtgtaaagccgtagataaaaatatggtgataggagaggttaagttggtaaataagacaaaaactaattgctaaattaggagaatcatataattaaacatactaaaaataaaaactcccaccgaagcaggagtacaggatttttatccttcggcatatagccttattgtgataagatgtaattttggatattattccaacacaaaaatatttaaatattttgattattcaaagtattttttttatttttaaaaaatatttttgaattatataaaatcacaaataattatgacaaggatattaggtctggatttagggacaaatagtataggatgggctgttgttgataaagaaaaaaatcagttttcattgattgataagggagtaagaatatttcaggaaggagttaaaatagaaaaagggatagagagttccaaagcagcagatagaacgaagtatagaagttcaaggaggattaaatttaggaggaaactacggaaaatacaaactttaaagacacttgtagaattcggatattgcccgggtattgacattgaagaattgaatatatggagatataaaaaagtatatccacaaaacgaacaatttcgggattggtggaaaacagacgatgagcataatataaatccatatttttttaggaatcttgttgttacagaaaaacttgatttgactaaaaccgaaaacagattcaaaataggtagagcgttttaccatatttcacaacggcgcggctttttaagtaatagacttgagaatacaaaagaaagtgatggattagttaaaagtagcattgaagaaataagtcttgcaaaaggagacttaacacttggtcaatatttttataagaaatatatcagttcagaaaaaatacgtgatacttatactcatagggaggaacactacctcgaagaatttgagagaatttgtaattttcaggggttaccgatagagtttgttgataaattgagaaaatcgattttttaccaaagaccattgaaatcgcaaaagggagcgattgggaaatgtgtttttgagaaaaagaaagcccgttgtgccgtttcgcacccattgtttgaggagtatagaatgctatgttttgttaataatattaaaataaaaacaccgaatgatgaaaaactaagatttttaaataaggtagaacgagctaaagcaatcgaaagattttttcttaaaagggagcattttgattttgaagatattgtgaaatatctcgcgcctaaaaaacaatacaaattttacaaagacaggaacataaatcaagaagattatctgtttaattattcaatgaacactactgtaagtggatgtccggtattagcaagatttaaagatttatttggcgaaacttttattgatgaaagatataatataattgtttccgatcatggagatgttgcaaaaaatgtacaggatgcatggcatgtcttattgacatttaactctgaaataaaactaaaagagtttgcaataaataaacttgggttaaatgatgagcaagtatctgaatttgtaaaaataaaacttaaacaagattatgcttctctaagtcttaaagcgattaaaaacattttacctttccttcgtgaaggaataatttattcacatgccgtttttattgcaaatatgaaaagtgctttgccaaaaacattgtggattcaaccggagaatcaaaaagaaatatcagatcagataaaaataattattaatacccaaaaagacgaaaaagatttagttgaaatcgttaatgggattataaagacatgccgtgaaaacggagaatgctggagcaatgaagcagagatttattttaaacaggatttgataaaacgacttgaaggattttatggaaaaaataagttcaattctttcagtgaaaaatttaaaactgatgtcgaagataaatcttttagattgctgaagaaacaaatgttgttgaataatagcagaggggaatttgcaaaagttgaaacaattgatgaaagacttaaacattatataattgatacttttaaggtgggggcggaaaatttgagtaaaatatatcatccttcagcaattgaaatttataaacaaccaataagaagcgaagacgggaatatatatcttggctctccaatggtttctgctgttcgaaatccaatggctatgagagcacttcatcaattaagaaaagttattaatgaactgataaaaaatgaggtcgttgaccagaatactaagattaatatagaaatggccagagatctcatgaattcaaatgaaagaaaagcataccaaaactggcagagggatagagaaaatctgagaaaaacttattctgatcggataaaggaatactatagatctcaaaacataaatttagaaccaagtgaggatgatattttaaaatatcaattatgggaagaacaaaaacataaatgtttatatactgggaaagaaattttattaagtggttttttaggtgcaaatccgaaatttgatattgaacatacaattccaagaagtctgtcattagataattcgcaggctaataaaacattgtgcgataatgtatttaatagaagtgtgaagaaaaatagaattccatcagagcttgaaaaccataaggaaattttatcaaaaatcgttgattggcgtaaaaaagttgaagatttggaggaagacatttcaaaagcagtcagacaatcaaaaaatgcagcagacaaggatgggaaagatcgtgcaattcaaaaaagacacaaactaagctacgaaagggattattggcgtaataagtataaaaggtttgaaatggaagatgtccccgatggatttaagaatagtcaaattgttgataccggaattattaccaggtatgcaagaatgtatctaaacactatttttgataaagtatatactgtcaaaggtaatacggtagcagattttagaaaaatctggggattacaagaggaatacgtaaagaaagagagaattaatcatattcatcattgtgttgatgcaattacaattgcttgtattacaaaagaaaattacgaaaatcttgcaaaattctatcatgagtgggaagaattagaacatgctggcgtaaagactaaacccgtatttgaaaaaccttggagaacttttactgaagatttaaagaccattgaaaatgaagtattaatttcacataatacttcagacgtgttattaaaacaaacgaaaaaaatcaaacgtaaacgtggtattattcaaagaaatgcagatgggaaagttgagtttgaaaaaggtaatacagctagaggtagtctgcatttagaaacattttatggtgcaatagaacgaccgattattgacgaaaatggtaaggaagaaaggcaaataaaatatgtgttaagaaaatctattctgaaattgaaattaaatgaagtagataaaattgttgatgagattgtgaaagaaaaagttaaaaattctattgcagataatacactaataataacttcaggagagaatcagcaaaatatactttctaataccatttggatgaatgaagaaaaacgcattcaaattaaaaaagtcagaatttatcaggcagctgtgacgaatccaattaaattaaaaaaaaatagagataaaacagttaaacaaaggaaggagtataaagaatatgtaaatgttttaaacgaagaaaattatgcattaggtgtgtatgaagccatagttaaagataaagttaaaaaaaggtttgaggcattaagtaattttaaggcaagttctgcattagaatttaaaattgataaaggtctgtttaaaagtaaaattctctttgaacagagtaaaataataaatggcagagaatacaagctcaagaacattattaaagttggtaatttagtaattctttatgaaaattttcctgaggaaatatgggatttagatcttgacacattgagcaaaagattgtataaagtttatggatttagaggagatgatggtagggttaaattgagacatcatcaagaagctcgtccagataaggatcaagacaaagcagtaagtcaaattgatttcaataagtcaaattcaaaacttataatatcacttgggaatttaaaatgtttagtagaagggattgactttgtcatgtctgttactggaaagattgaacagaaaaatataaatatatgttaaaacgcactcttttcttttcaaccccttaccggcttagtctaaaaaacatgcagttggttgctgaatctaaagataacggagaggttcgcactgtcccggttgaagatattggttttgtagttttggacaatatgcagatttctgttagtttacctttaattgaaacattggttgcaaataatgttgctgttgttttctcagattctaaacacatgcctcaatctatgctgttaaatcttgattcgcacagcattcaaacagaaattttccggaatcagattgatgcaagtcttccactaaagaaaaatctatggaagcaaacaatagaatgcaaaattgccaatcaggcaaaattattgaaaatattggataggcaaagtgcggatattctcaatctggcaaaagatgtaaaatccggtgaccccgataatcgcgaaggaactgctgccagattatattggcccagacttttaggcgatagttttaccagagacaggttcggcgactttcctaacgagcttttgaattacggttatattattttaagggctgccgtagcaaggtcacttgtcgggtcaggattattgccaacattggggatacatcatagaaataagtataattcgtattgccttgcagatgatattatggaaccatatcgtccttatgttgacagacgggttttttcgttagttaaaaataatccggaaatgttttttctggaaaaagaacacaaagctgaacttttacaggttttaacagatgatgtaatgattgataagatgcgcagacctctaatggttgctttatcaatgacaacatcatctctgtcaaagtgttattcgggagaattaaagaatattaaatatccggaatttaagtagtggaacagttacgacttaatgcatatcatattatgtggctatttgtttattttgatttgcctacaaatacaaaaaaagaacggaaagcggcttctttattcagaaaaaatctgatgaaagatggtttttcgatgatgcaatattcggtatataatcgtcattgcgcatcaaaagagagccttgaagttcatgttaagcgggttcaatcttttttgccggaatttggtcaggtaagtttgttgaagataaccgataaacaatacggtgatatgataaatttttggggaaagaaacaaactatcccaaaaaatcaacctgtgcaattagaattattttaattttgcttgttctttgacatattggagtagaattcaaaatttaatgcattacttcacttcatagttgcaattagaatgtttttttgtgatagaaaccttctaaaagccttggtgaacaaggcttaaggggcgctatgttgtggtttgatgtaattttggaacacacaacaactcaagcttataatcattgtatgatagaatagttgtggtttgatgtaattttggaacacacaacaacatacccaaatttatataagactgttttttagttgtggtttgatgtaattttggaacacacaacaacgatagatcgtttgcaggaaacgcatcaatagttgtggtttgatgtaattttggaacacacaacaacgcaatcaaattgaatttgcaaagcttgtaagttgtggtttgatgtaattttggaacacacaacaactatcaaacttagaatatacattttaggatagttgtggtttgatgtaattttggaacacacaacaacatatattcgatcatataataccggtacgcgttgtggtttgatgtaattttggaacacacaacaactgacaaaaaaattaagctatacagctaccagttgtggtttgatgtaattttggaacacacaacaacaatcatttaaacggcgttaaacttgcgcagttgtggtttgatgtaattttggaacacacaacaactcaccccaagttgcaatatctggaatgccagttgtggtttgatgtaattttggaacacacaacaaccaataagacagtttccgcagccagtaattgttgtggtttgatgtaattttggaacacacaacaacttcaatatcggagattatctattcacaattgttgtggtttgatgtaattttggaacacacaacaacaggttattatatagtttgttcatgtagagagttgtggtttgatgtaattttggaacacacaacaactttcaggttgcgaagtcattagtggcaagggttgtggtttgatgtaattttggaacacacaacaacgaatagaagcaggattaataggacggctagttgtggtttgatgtaattttggaacacacaacaacaacagatccgtcacacgttacatggcatggttgtggtttgatgtaattttggaacacacaacaacacaaatctctgtaatagtcgtcagatattagttgtggtttgatgtaattttggaacacacaacaaccattaaagcaaaagatacactcatcgggagttgtggtttgatgtaattttggaacacacaacaactgaatttgttctcgttgacatgaatgatggttgtggtttgatgtaattttggaacacacaacaactataattattagcatcgtcattgatcataagttgtggtttgatgtaattttggaacacacaacaacagactgattcgtcttgatgagccctgccgggttgtggtttgatgtaattttggaacacacaacaacgaaaccggcaaatgccgatgttgtaacgaggttgtggtttgatgtaattttggaacacacaacaactgattttattataaatcaatatagcggtggttgtggtttgatgtaattttggaacacacaacaacatgcctgaaattattgcagcaaacccaaaagttgtggtttgatgtaattttggaacacacaacaacgaaaattgcattactatgtatgattaatgagttgtggtttgatgtaattttggaacacacaacaactgttttttttgctcatcatcagaaagaaggttgtggtttgatgtaattttggaacacacaacaacatcacagtctttaacttcgatctgatcaaagttgtggtttgatgtaattttggaacacacaacaacaaacgtttaagctattgaaattcgacgctggttgtggtttgatgtaattttggaacacacaacaacgctttagttttttgttttcgagaacttttagttgtggtttgatgtaattttggaacacacaacaacatcgtcaagttttaaaacttcgcgattatagttgtggtttgatgtaattttggaacacacaacaacgctttagttttttgttttcgagaacttttagttgtggtttgatgtaattttggaacacacaacaacggctccgtcaagtgctatttatgagggaaggttgtggtttgatgtaattttggaacacacaacaactttgcgaaattgacaaagattattttgatgttgtggtttgatgtaattttggaacacacaacaacagatttttctgaaataatagcagaatccggttgtggtttgatgtaattttggaacacacaacaacgcaaaagcaaatttgataaatgcaaaagctgttgtggtttgatgtaattttggaacacacaacaacgtaggctgtccaatgtctccagcttctatggttgtggtttgatgtaattttggaacacacaacaacacttttatttgaagttccgtaaactttcttgttgtggtttgatgtaattttggaacacacaacaacttacatttaataaattattattaaaaacaagttgtggtttgatgtaattttggaacacacaacaacaaagacgataaattaattttcatttgtactgttgtggtttgatgtaattttggaacacacaacaactatttgatatgtacacacctgatatcataagttgtggtttgatgtaattttggaacacacaacaacttttgccatcaccgcaataatgattgtagagttgtggtttgatgtaattttggaacacacaacaacccaatgtgtttttttgtataggtttttgtaggttgtggtttgatgtaattttggaacacacaacaacaagatgcttctttataataaaatttaaacggttgtggtttgatgtaattttggaacacacaacaactatcggggctgtaactccgtagaagtttgagttgtggtttgatgtaattttggaacacacaacaaccttttagttgaacttatttggtggaggaaagttgtggtttgatgtaattttggaacacacaacaaccttttagttgaacttatttggtggaggaaagttgtggtttgatgtaattttggaacacacaacaactgaggtctattagcatccctatgtgtgagtgttgtggtttgatgtaattttggaacacacaacaacacggcttatgaatctgtcagaggacgaagagttgtggtttgatgtaattttggaacacacaacaactggtagtaattatgcttataaagtatttcagttgtggtttgatgtaattttggaacacacaacaacttttggtgtttttataaggaatgacgtatggttgtggtttgatgtaattttggaacacacaacaaccttttagttgaacttatttggtggaggaaagttgtggtttgatgtaattttggaacacacaacaaccaaattcaatcgttaaattatctattgcagttgtggtttgatgtaattttggaacacacaacaactgatcttgtgcaacttatggacatgtcaggttgtggtttgatgtaattttggaacacacaacaacgcaattttagaattattataagccatacagttgtggtttgatgtaattttggaacacacaacaactagaattcaaacacagagacccaaactgggttgtggtttgatgtaattttggaacacacaagaattttggtgagatacgcattacagaaatagctattcataatttataagagtgtaaatttttactaattttgcaaaaaaataatcattatgcaattcacaataaaatccctcaatatttctgagaaaaaaggaactttaaaagttcctgtaaacgaagtggaaatagattttaccggccttaaaaccgatgcacatagcggaaactggcatcgtcaggttagtttgctggcaaaggaaaatatagatgaattttcggttcagtataaacagaattttaaatttggcgactttgccgaaaatattacaactgaaggaatagactttcgtaaagttaaaattctggatattcttgaaaatgagaatgtcgaaatgatgattacccaaaaaggtaagaaatgtcatggcggtggttgtgcagtatttaatgcagtaggacattgtgttatgcccaaagaaggaatatttgcccaggtaattcgtccgggaaaacttaaaaccggggataacatgaattacaggccaaaggtttttaaagttgcggttattactttgagcgatcgtgccagccgtggcgaatatcaggatttgagcggacctgcaattgcagaaatggccggtgatttttataaaggtattggaagactttgcgaaatcagttcttatgttattcctgataatgctgaagaattaacaaaacttatcagcaaattatcaaaagaatgtgatgctatttttactacaggcggaacaggcatgagcgaaaaagatattaccgtagaaacagtttcgcctatgttatcaaaagaattgcccggaattatggaaatggtaagaatgaaatacggacagcaaaatcccaatgctttgttaagccgaagcattgcaggatcgataggtaaaactttggttttctgtatgccgggtagtcctaaggcagtccgtgaatatatgacagaaatatttacaattctggaacaccttacttatatggtgtacgggtttgataatcactaataccggagctaacgttcctggtttttagtgtatgtgttctttgtccccggataagatttaataaacagcgatcttttttacctccggattattcccgaactttatgtaataaattccgggagagtaatctgatatgtcaatactaagattgttttcaatcaaaaacatgtcaactttagtcccgatagaattatatatccagacttcagttttagtattatctgcatcagttgaaatattaatatacccggaagccggattcggataaacagagaatgaatcatatacctgtctttcaactgaagcaaacacgtttatgttacaggcaaagtctttaagtgttactgtacatgatccgtttgcaagaataacattaagcctgatccaaccatataaagtgtcttcattaggtttaatcataaatcctatataatgatcttccgaactgttccatgtatgtacgtaagcaccacttgaaaaaccaccattagttgaccaaagataaccagcagtttgattgaaaacagaattattgttaatagtttgcccgggattgagagtgtctgcaacgttaaccgtgtaaaaaacatcgccgggatatccctcagatgtctcttcatgagttattattttagacccttggtttaatgagtaaactcctgcgctgccactacagccacctaaactgccggtaccatatccggaaatcaggaaatccataattccgttttgatcaacatcgattgaaaaagaaccttcgctatgcatgtttgtcaaatatgctgctacactaaacattgaatccggttcagggtttgtgtaaatatcacttcccccgacttcacctgttattgagaattgtgaaaatacgaggttgtttattcccgtaagtaaaaacaatgcagatattacaataaaatatctgattaacgatctgcttaaatctctgtaatacataatcttatttattttaagtatatattttatgtgtaaagataacctgtttttatgtataaataaattttaatgattaattttttatgaaattcctgatttattataaaatttgttactaaatttgataagcaaaaaaaatcttatgtcatcaaaagttcctgtgtttaaacaaactgcgttaatatcgtcaatccctcaactttcggtattggcgggactaatccttttgttttattttttaaaaactgaaaattattttatttacggagcagtaagttacatttttatttcgttttgtttgcgaaatatacttgcccggcaccacagaacaggtataaggctggtaaagcagaagaattttaaagcagcaattcaggcttttcagaatagtgtcgatttctttaccagaaatagctggatagataaattcagataccttacaattttaagttcttcggcaatgtgttacagggaaatgggactctgtaatattgcatactgttatagccagataggagaaggagaaaaagcaagagaatattatgagaagaccctggcagattatccaaaaaacggactcgcaatttcagcaataaatatgatgaattctgtcgaaaaacaaaacgtaaaaaatatagaatagttgcgatggttatttatagttgtttttaaaataaagtaaagaaagtttggtttgttatagtaaatgtcaaagctgcgaaccttgtcttgctcaagacttttaaagtcaacaaaatatttataataacaataaattaattattatttaaatataattttgtattgctgatatcatataaatataattttacgacctgttattgtaaaactttcttaataaaaaaattatgaaacaaagattattcgggttatgcttattgtttttgttattgttgccggcttcggttgtgttttcacaagtagtttcgggcactgttcttgacgcaaaatcatcccaacctctttcgggggctaatgtttatgaagaaaactctaaaaaaggaactgttacagatgcaaaaggtcattttaatataaatgtatcttctgatcaaaaagaagtggaattaaaaattagttatataggttataaaacaattgaaaaatctgttaagattaaaaatgaaaatgagttaataatttacctgagtcctgaagctttttctattggagaagtcgttatctcagaagaaaatgaaggccgtgaaggtagcgggtaccgtgtggaaaacggagatgtcggtattatgggtaaaagaaaaatctcagaaattccttattctgtacaggttgtttcacaggatcttattgacagccgtcaggcaaaagatataattacagctttaaatacaaatccggaagttgttgcttcgaaaacaccgaacaacgatgaaagaggtctggcagacataaaaatgcgtggatttgcagcagcggttcttttaaatggtttgccggtaaacagttatcatatgccttttgtggaaatggccgacaggatagaagtgttatcaggattttcaagctttttttacggtttctccgggtctaacggagtggtaaattatgtgtctaagaaagctccggaacaatttaaaacgagtttttcaacaggtatttataacggaggggtaaaatatcttcatacagatgtcggaagtcctgttgataaaaataaaaaagtcggtttccgttgcaatgcttatcttgaagatggaaatacttttgttgacggacaaactcagaaaagattaatgttttcgggactggtgagttataaaatagcaaaaaacacctcgttaacagttgaggcgtttcatcagactcaggatatgacaggtcagcaagctatttttgaagttaaaacagccaacgatattttggtgcctgatgccggtttgtttgatttaaggaagctttacgggcaaaaatggaccagcacggaaaatgaatattctcagattgcggcacactttaaatcagatgttaacgaacatgtaagtttccgtgcaggttacagctacgctgtcggtttttgggattataattaccttgtagcttcttttactgataataacggcaattattcgctcaaacacatagaatctgctccgcaggacagggattatcaggccggatatgcctttgcggattttcatgcaaaaaccggattcataaaacatgatctgagcataggatacaacgggaattttacagggatacattttggcaataatcttacaaccaatatggggagttttaatatttcgcagacagaatttgttgcaatgcctgataccgcggaagtcgcagcacttttatgggattatacaaattataacacatatctttacaataattttcttgccggcgattatcttaagtttgcaaattggctttccgtttttgccggggttaattatgctgtgtatgaaactcaccgtacaaccgggaatttaacacaaagcggagctgcagattatacccagtcgaaattttcgcctaccttctcccttataataaatcctgtagagaaaatgacattgtatgcttcatatatcgaggggcttaaagttggcggaacggctcctgccggctctgccaacgaaacagagtctcttaaaccatcttcgtcagcacagtatgaagcaggtttgaaatacaatctcagaaaaatagacctgtacgcttcagtctttaatatcaatgttataaacgagtatgtcgatcctgccgacaatgtgtttaagcaggacggaagacaggttcataaaggaattgacttgtcggcaagcggaaaaatagttgatgatcttacagttgcaggcggatttacgttgatgaacatcgaaatagtcaaagctgacaataatcctgaattggttggtaaaactccgcaggatgttcccgaatcacaggcaaaattattcgccgaataccatctgccctgggtaaaaaagttggcattgtacggaaccggatcatattgcggacaaagaccagttgatgctttaaataaatcatacatcgaaggtgttgctctttttgattttggggtaagatatt

SEQ ID NO: 1516 - DNA, 19646 bp, synthetic construct
  misc_feature 1..19646: note = Synthetic
  source 1..19646: mol_type = other DNA
cttagcttgacggctatggccggcgggcaggtctgaaatctggaatctgaaatctggaacctaaaacccacctacggcgggcaggcctgaaactaacttatcggtaatgagatataaaatgtgcttccttttttaagttctgagccaacccagattttacctccaagaatctgaataagtgcattaactatggttaagcctaaacctgttcctccaactttaatactcatgttttcgtcgccctgagtaaatgggaaaaaaattgcatcaatcttttcctgcggaatcccaatacctgtatctcttacataaatgattaaattcgatttttcaatcttataacccagcgttatggatcctttttctgtatataaaattgcattttttagcaagtgaggaattatttttgaaatgatgcttttatcggtatgcagttctacttcaccatttttctcaaaaatgatttctaaatcttttttggttttgtatacagggcttgatttagctttatcaataatattctcaagtacagggagtattttaaaatttgtttttctaacattatactgatttgttgaaaggtgagcaatatcaacaagattttcaatagtagaaattaaatcatctgtatttttattaatcatggtgttaatctgatcgagttctgagtcagaaaggctttttgatttgatcatttctgaaaatccaacaataccattaagtggagtgcgtatttcatgcgaaatggtctgtaaaaatttactttttagcttatccgattcttcagccttgttttttgaattaagaagctccttattcaattttttaactttaaaaagatagattattataaaaagacccacaaagaaagttaagctcccaataaggattaacaagctgtttattgttttttgttttgctagttttacttcatacaactcattttcttgttgttgctttttaagtttttgttcaagcgactttacattgttgatttccttaaaatcaaacaatttgctataaatactaaaaaagagatcgaaattttcataagcttctctatatttattttggttcgcatagattttagcttttaattgataagcctcacttagtacgccttttaaattaatcgatttagcatattctaaagtcaggtcaagatgtgccaaagcgttttcataatcattggataagaaataatattcactaacactcataagtgtataagtaattcctattctgttatttgcttttttatttaaatctgttgctttgaaaaggtagctccttgcagaatccaacatttctttacgcataaagattcgggcaattatggtataagagtttcccaggctaccatacaaattgtatttttcttccagtttagttcctttttcaaaataaattaaagattcgtcaggtttattttgatcaaacagcaatttcccaatatttgagtacacaattcctgcgtaagcctcattatcatgtgctaaagcaagttcggctgatttttcgaaattttcttttgccaaatcatattccaataaagtttgataacttaaagctaataaattgtaaacctgataactgtatagagctttttcctgattttcaacaaggtcttttagttttaatgcgttttccaaggcagtactgtaattacctgtaattcttaaaacttctgataaatgcatataaaatctttcgagatgctcagcattttctatttttaattccagtccctttttataattgtaaatagcactatcattaagatttcttactttataatattgacctaaataataataacttaaatatattccttcgttaaattttaattgctcagactgatgcagagtttgcttaatcaaaccaagcaaactgtcattttcaggagataatcctgaacgaataaactcgagattttttttgacaaaattaatatctctcgaaatgatagtcgtatcattagtctcaggatttaaactacttgcatggataagggatgtgataaaaagaataagtaagaggaagtatgttctcaacgtgctaagtgtttttaaattttaaatgaaaattagggtattccaaactattttcaaaaattaagtgatgaaattttttaatattttgatgaattgatttcatttgcattgtaataatattcgcgtatgataagttttttgcaggttgagaatttaagaaaatcgtttggtgatttggttctgtttgagggaattacctttggaattgataaggatcagaaggtggctttaattgccaaaaacggaacaggaaaaacctctcttttaaatattattgctggaaaagatactcaggatgaaggtaaaataacgtttcgcagggacttgaagatcggttttcttgaacaaaatcctgtttttaatccaaacaactcaattattgatgaagtttttcatgcttcggaagatgtaaagattgcaattcttgaatataatacggccattgaaaaaaacgataaagatttactttccgcatcgatggaaaagatggatcatttgcaggcatgggattatgaggttaaggtaaaacaaattcttaccaagctaaagattgcaaaatacgaccagcaaatatcgaccctttcgggtggtgagaaaaagagagttgctttagcttctgttttaatcgaggaaccggatttattgttactcgacgaaccaacaaaccatctggatctggacatgattgaatggctcgaaaattatcttaaaaatacaagatcaaccttgttgatggtaacccatgatcgttattttttagatcgggtttgcaatgaaataatcgaaatggataattcccagatctatacctataaaggaaactacacctattttataaataaacgcgaggagcgcatagctattgaagaagcactggttgaaaaagcgaaaaatactttacgaaaagaagaagactggatgcgccgaatgccaaaagcacggagccataaagcaaaataccggatcgataattatttccagttaaaagatgttgccggaagcggccgccaggatgaagaagttcgtataagtgtgcaatcgtcgcgaatgggaaagaaaattatcgaagtaaagaatttgaataagaagtttgataaactaactgtcttaaaagactttagctataatttcacacgtggcgaaaaaattggaatcgttggtgataacggtacaggtaaatcaacttttctgaaccttattactcaaaaccttcaagctgattctggaaatgtggatgtggggcaaactgttgttttcggatactacaaacaagaaggaattatttataaagaagatcagcgtgtaatagatattgtgcaggaaattgctgaagtagtaaccttaggaaatggtcgacagatgggagtaaaggagtttctgaatttctttcttttccctttcgatatgcattatactctggtttctaaattaagtgggggagaaaaacgcagactatacctggttaccgtattaatgcgaaaacccaattttttgattctcgatgagccaaccaacgatctggatattatgacactggccgtgttggaagagtacctttcaacattcgatggttgtgtgttggtagtttctcacgatcggttttttatggatcaggtggttgatcatttatttgtatttaggggaaatggcgaagtaaaagattttcctggtacctattcacattatcgcgagtggctgacaaaaattgagaaagatcaaaaaaaggaactaattcaaagctcaaaaaaggaatctttaaatcttacaacagataattccagcacagataaagccaaaacaaaactttcctttaaagagaaaaaggaatatgaacaacttgaaaccgacattgccaatttggaaactgaaaaggaaaatcttgaaagtgaaatcagcagtggaactttaaccaacgacgagctgattgaaaaatcaaatcgaattggagaaattattacactcctcgataaaaaatcggatcgctggctggaattaggtgagtttatatagatttataaaacttttttataacatactcaatttattacaaaactctttgttactaaaattgaattcagtaaattcgttatagcatagtacttattcttatttaaatcatttaatgattaacacttaatttattaacatgaaagaaagaatattaattgccttaacgattttagcatttggttgtactgatgatgttaatttgccaacagttacaacaactccaataacagaaattacctgggaatatgcacttaccggtggtgaagtgattgacaatggaggtgcacctgttattgcaagaggtgtatgtgctagtgaagattctaattaccttagttcattagatgattatggagtttggtatactatggatggttcaggacttggaagttttaccagtgcgatcaaagtccaatggcatggagcagcaatgaacttaagaagtacacattacgtcagggcatatgctaccaatagcgaaggtatagcatttggcaaaatattatctttttacccgggtgataaacctctttttgataattcgctggatattaaaactattgaagtcactgctacaacagctacagttaattataccttctattaccagatcttctcaaccgttcgggaaatgggaatgtgctatgcaacttactcggagcctactgttaatgatgaatgtattgtgatttcagacatttctgatggtgaaaatacgcttactattgagaatctagtacctaatactaagtattatattcgaagttatgatattaaccaggcgggagtttattatagttctgtaaaaagttttactaccgaaaattaaagtttaaaaatgaaaaaatatattattctaatagccatattgatattgattaatataggtattaaggcacagaaaatagaagttagttacggaactttaatgggactgaattattcatttgtaaatgttaattcggcaaccagtaaatattatacatttgatgaaaaagatcaaaattttacttttgataattcttataaaggtaaagccggatatgatattggtattttctttaaattaaatcctgttaaaagccgattcaatttagaatctggcttaattctttcaaaatatagtaacagctatacagttttcttaagttacgataattatgcaactacttcgtctattgaaacctggactaaagaaacagctgaagaaacaattagtaatgattttagtgtaataaaaatacctctatttattgggtttaatttattgaatacaggtaaattccaattggaaatacaaagtggaatatcggtaaatatttgtatggacgagaatcataagtttatggatcttaataatgaagaagatcagctttataaagattattttgcaggttttcaaatgggtataagagtttattttaataaaataatttgtcaattaaaatacgaccgaagttttaatatacaagaaggttccagtaggacttatttcccatgggaaatggaggtagatggaatttatttaagttctgttaacatttcggttggatatatgttctgattggagtatagagtttccaatcttgatattacatcaaacttcattggaaaatatctgttaaagttgttttaatttacttataataaattacttgctacatgtatttgctatgtcacaatgcttaatatccttcagctaaatgggtaatttttttcacatttaaattcataaggttttctcacaaatttcttcaattttttgaatgtgctatcctttggtgcaaaaaaactcccaccgaagcgggagtataggattaatatccttcggcatatagccttattgtgataagatgtaatactcaaagttagacaaaaaacagatacaattaaataatttgcaatatttttttgtaaatttatgattatcaattacaaattgtaaattatatcattatgagaaaaatacttggattagaccttggaaccaatagtattggttgggctgtggtagaaactgaagataacaagagttttgaacttaaagaaaaaggggttcatatatttcaggaaggtgtgaaaattgaaaaaggaatagaaggttctaaagcagaagaaagaacgaattatagaagtgccagacgattaaagtacaggcttaaattaagaaaaattagtacacttaaggaattaatcaaaaatgattattgtccaaaacttacagaacaggaacttaatgattggcgatttaaaaagaattatcctgaaaatgaagattttagaaaatggttgttgactaatgaaaataagaatccatatttcttcaggaatattgcagtaacagaaaagttagatttgtctgttagggaaaatagatacaatcttggaagagctctttatcatttagcacaaagaagaggttttttaagtaatcgattagaaggaacaaaggaaagcgatggcacaataaaaaaagcaatttctgaattaactgaaaagaaaggtgataagactttagggcaatatttttatgaaaaatataatgttggagaaaagattagaaatcattatacacatagggaggaccattatttagaagaatttaataaaataagtgaggtacaaaaaattgactctaacataaaggatgctattcaaaaggcaatattttatcaacgaccattaaaatctcaaaaaggattgattggtaaatgtccatttgaaaagaataaggcaagatgcgcatcttctcatcctttatttgaagaatacagaatgttatgttttataaataatattaagattaaaactcctaatgatgaaaagttaagattccttggtaagcaagagaaagagaaaattgctccgttgtttcatagaaagagtaaagagcatttcgattttgaagatattgctaagcaactggctcctaaaatgcaatataagttctataaagcaagtcaaaaaaatcctgaagactatcttttcaattataccatgaaaactacagttagtggttgtcctgtttcggcaaggtttgaaagtatttttggagaaaattggaaagaacttaaaattgaacataaaagaaaaaaagatgatagcacctctattattaatatttatgatgtgtggcatgttttattcacttttgataatgatgataaactggaacagtttgcaatgaacaagctcggtttaaaggatgaaaaactaaaggagtttataaatcttaatttaaaacatgactatagctcattaagtttaaaagcaattaataatgttttaccatatttaagagaaggtttaatttattctcatgcaatattcttagcaaatatgagtgatgctatttcaaaagaaatatggagtcaggaagagaatagaacattgatacaaaaagaagtgcttgagcttattcaaactcaaaaccaagaaaagctaattattgatgttgttaatggattaattaagaagtgtagggaaaataattggtactggagcgaaaaagcaagacttcaatttgaaaaagatatagaaaagaatattatttctgtctttggtaaagatttttggagcaaatatgatgaagaaaaacaaaagaacattttagattatgctattaaccattttcaaatccaaattcaaaaaaataatggcaaaggtgaattcttaagggtagagacaattgatgaaagggttaaaaatttcttagaaaataacttcgatgttgataaagaagacttagagaaactctatcatccatcggcaattgaagtttttaaacaaccgattagagcagaagacggtcgtaaatatcttggtagtccaatggtttcaagtgttagaaatccaatggctatgcgagcactgcatcaactcagaaagttgattaatgagttagttaaacaagatattgttgatgaaggcacaaaaataaatatagaaatgtcgcgtgatttaaaaaatgccaatgagcgtaaagctttacagagttggcaacgtgatagagaaaatctccataaagagtattatgaaagaatccaggagcagtttaattcttcgggtataaaaagagaaccatctgaaactgatattttaaaatatcaattgtgggaagaacaagaacacaaatgtatttatacaggtgaaagtattgggatatctgattttttgggaaacaacccttcctttgatatcgaacacacaattccaagaagtttgtcatttgataattctcaacagaataaaaccctttgtcagaataggtttaatcgtgaaattaaacgaaataaaattccttctgaactcgcaaatcacagtgaaatattaggaagaattgataaatggaaagagaagtatgaagagttagataataaaattcaaaagttaagaaaagtaacaacatctgataaaatttcaaaagatcgagtcatacagattaaacataaaacaacttttgagcgtgactattggaaaaataaatacgaacgttttacaatgccagaagtaaaatcaggttttaaaaacagtcagatagtagatataggtataattaccaagtattcgcgtttgtatcttaatacactatttgataaagtttatacagttaaaggaaatacagttgccgatttcagaaaaatatggggtttgcaagatgaatataaaaagaaggcaagaatcaatcatgttcaccattgtatcgatgccattacaattgcttgtattacaaaacagaattacgaaaacctggcaaaatattatcacgattcagaagaaatgtttatttctcgaagcgataaaaaacctcaggttccaaaaccatgggaaacatttaccgaagatgttaaagaaatagaaaaggaagttttggtttcgcatcatgctcccgataatttgcataaacaaagtaaaaagaaactcagaaaaagaggcgtagttgtaaaaaataaagatggaaatatcatttatcaaaaaggagatacagtaaggggaagtttacacaaagaaactttctatggtgcaataaaacgagaagtagttaataaagaaggagaaaaagaagaaaaaattttatatgttgtccgcaagccacttgaatattctgattttggatttaaaactgtgaatgatttaaataagattgtagatgaaggtgtaaaaaatattattttaacctcagttaatgaaaaagggataaaacaagctttaagtgaacctatttggatgaatgaagaaaagcaaattccgataaaaaaagtacgttgttatactccaacagtaacaaatccaatacatcttaaaaaccatagagatgtctcgaaacacgattacaaacaatcctatcatgttacaaacgatggtaattatttaatggcgatttacgaaggaaaagacgataaaggtaaaattaaacgtgatttcgaaattgtaaataacatcaaagcaggagaatattttaaacaatcagttcgggatgccttaaaagctcagggaatagaacatcttgaaggtttaattccagattcaaaagaaagtggaaagcttacgttaccacttaaatatgttctaaaaacgggtacaatgataattttttgggaaaataacccagatgaaatttgggatttagaaaatgaagatataaaaaagcggttgtataaagttgttgggttatctataaataggattaaatctggcaataaatattatgaatttggaatggcaatattaaggtttcatcaagaagcaactccagcaggcgaattaaagacaatagatggagcgttccaaaaagatgagtcatatatttcacaaagaaaattaagccacaatcaatttaatgctttagttgagggttatgagtttaaaataaatgttcttggtcaaatcgaaaaactatgattataagtagtctcggcgtgtcttaaagacacaccgagactaataaaaaaagatatacaatgcactttgaaaaggaccatatataccatatctataatcaggggaataaccgccaaaagattttttttaacagagataattatttgttatttcttaaaaagataaaaactcatataacaccttattccgatattctggcatggtgcttaatgcctaatcattttcatttaatggttttggttaatgaagtaaatttgcctgcaagtagtctcggcgtgtctttaagacacaccgagacttttaaacaaccaaacatcgagacagaaaaaagctttaatgcatcaattggaattatgttaatgggatacacgaaagctttaaataaacaacaaaacagaactggaaagctttttagagaaaaaaccaaagccgaatgccttaactgcctgaacggtattactccatcattttataatacgaaacacattacacagattcaggttgataatcaagaatttcaatatccacaagtgtgttttaattatatccaccagaatccggtaagggctggtttagttaagactgaaatagagtgggaattctcatctgcacaagattatgcaggattgcgcaatggaactcttgtaaataaaaaagtagcacaagagcatataatagtaaaatagaaattgaatagtctcagcgtgtcttaaagacacaccgagactgataaaaaatataaatatgttaaaacgtacattgtattttacaaagccagcttatttgtctcttaaaaacaaacagttgcttgttgaaataaaagatgaaaaccagtctaaaacgattccaattgaagatattagttttatgttaatcgagcatatgcaaataaatatgagtatgcccttaatcgaagaattaatgaataataatgttgcagttattctttgcgatagcaaacatcatccgcaatcgatgttaattaatatggaagggaatcatcaacaaaccgaaatttacagacaacaggttgcggcgtctgaacccctgaaaaagaatttatggaaacaaacggttattgcaaaaattgaaaatcaggctaaagcattagttaaattgggaattaatgccgatccattgccttatttggctacacaggtaaaaagcggggacagcgacaatcgcgaaggaatggcggcacgtatttactggaaaagactttttggcgaagattttaatagggaacggcatggcgattggccaaatgccatattaaactatggatatattgttttacgtgcggctgttgcaagagctctgacaggatcgggactattgctatcatttggtattttccatagcaaccgatacaatgcattttgtttggcagatgatataatggaaccatacagacctgttgtcgacttggcggtttgggatatttgccaaaagtatcccgacattgatattgtagaaaaggaaattaaagccgaattactggaaatactggcatcggacgtggggatgaagaagcaaacccggccactgatgattgctattacacatacaacagcatcgctggcagcgtgttttgcaggaacgaaaaaacaaattgagtttcctgcaattgtttagaatatggaatataatcgtttaaatgcatatcatatcatgtggctttttgtttttttcgatttaccaacaaacacaaaaaaagaacgaaaggctgcggccaggtttagaaaagaccttatgcaggacggttttaccatgatgcaatattcagtttacatacggcattgtgcaagtaaagaaagtggcgatgtacatgaaaaaagaataaaatcatgcatcccggaaaaagggcaggtaagcattttacgaataactgataaacaatatggtgatattatgaatttttggggaattaaagaaaaacctttacccgaaggccctaaacaattagaaattttttaataacttagctagttctttgacatgttgttaaatttcatttgatttgcaaaatagaatcgtgattttgtatatcaaaatcacttcctgtggactaaaagtattagaaaaaaaacgctgtttaactctaatatcaaggctaaataaggcttatagaaacccaggttgtggtttgatgtaatttcaagatcataaaaaactcgcgccacttctgaaccctcggagttgaagttgtggtttgatgtaatttcaagatcataaaaaactatttgatgatgatcctcaagcaattattgttgtggtttgatgtaatttcaagatcataaaaaacgttcccactgaaaaatcctttggaggtactgttgtggtttgatgtaatttcaagatcataaaaaacaaagaatcaaaacttaaaacaaaaacttatatcattataagttgttcatatcttatgtgcttgaatttgaatgaattgtttaaagtacgattgaatttaaaaactgaaatgatttttgatgaagaaaaacaggtagttaaaattcttttatttcttcattaaaaaatcgaatcctccttttctcaaattgataccgtattcaacgtatgcttttaaacaagctaaaaaattcgcccatccttctgtgttgttttttaaccaatttatcccggtttcatcattccgcatgcttttttcgcttatgctaactaatgttgagttatttttgattgaatccagctttatttctaccagaagatcttttttatcaggcccttcccaggtatatgaaattagattgtactcctcaatctgtacaacctgtacaggaaatttaatatcaaattcaggaaatttccaaactacagtttttcctttttccattcgtccggtactttcagaaataaaataatttttcattttatgcggatcaacaattgcttcaaaaacctcatgaacaggttttagtatttgaagtgctacttttatttcaagtgtttcagggttcattcctttttctttttctttttctttggttttggttcaggaagttctgcaagtgtaattcttactaaattactaagccattctctgtcttcaagcttttcatcgattaagaaacttgattttgctccagggtatggtggagcttcaacgggggtttttataaagattctcccagcttcagtaggtttaataaatagcttattatcgcatatgagtgcgaaaatttttttatttgagaatacaccaaactccccaaacatcttttttgctttgatttcaccagcattctcaatctggtcaatgataaaatcaacgaaactttgatctgaagccattttttacaattttattattgtatattattttgtggtttctcctcccattttagtaaaaacactgtcaacaggctcccataattctaatttatttccttctaaatccataatatgaacaaatttaccatattcaaattcttcaatttcgtcgacaatagtaactccgtttgctttgagttttctaatcaaaccttcaatattctgaactctgtagttaatcataaattctttctctgatggatcaaaatagctcgttttttcgtcaaaaggactccagttgaggtaattaatttcatctggccggttagcatttctaaactcaaagggtgaaccatattcatttatggctaatcctaaattttttccataccattcccttgtttctttaggatttttagaacggaagaaaatacctccaattcctgtaacttttggtgttgtgtcgttcataatcatttctttttgatcggttactactgcctgattatttttcttttgaaatcttgtatccttacaacttgtgcacaagatgatgcaaaataagatgttagttaaaactttcatttcataatttttgtcattataaagataacaataatgaggcttattggtttacgaagtccattacttaattaaatcaaaagtgaaagaaaacaaacaaaagttgtacaatgtaaaacaatgttgtatatttgaaattaaaagcattaattattatgacctattttactgatgttaaagagaaaagagatttaatatctaaataccgcagattgtctttactctatcatcctgataaaggtggcgttttggagaaaatgcaggcaataaatgaagagtataatatgcttaagcataattttggcaagttccctagtgaccttagaaatgtcagggttggaaattatgtttatgtaaattcatcaacctgccttgtaacagaagttgaagagaaattgtttgtagctaaatcccttgaaacaaaccgggttgccatgtttgctaaagataccggatatggagtgtttaactttaaaatcagggcatatgcaaactaacgaaaaaaataacgaggagttaaaagtccatactgggtttagattaacaaaaaaaaattataaactcctggaaaatctcgaaaatgatttaggaattaataaaacaggggtgataaatatgattctttctttaattgaaaaagataaatctgtactaataaaccttataaaatctgcaatttcaaaataattcatttgcgaaggattccataaaataatcaatatccctaaaagattttgaagacaactgaatattctgtactttcatttcctaaaaaaagggaattatgaattcgtttggcagaatatttaaaatcagcatttatggtgaatcgcacgggcaacaggtcggagttctgattgatggttgttcggcaggattagctatttcagaagatgatttcaccgacgatttgcttcgccgtaaaagtggagcaaaaggaacaactcccagaattgaagatgatttacctgttattgaatcgggcgtttttaatggttttacaaccggggctcctcttttaatttcgtttaaaaataaaaatacaatctccgacgattataaagatttattcagtttccctcgtcccggacatgccgattttacggctaagatgaaatatggaggttttaatgattatcgaggaggaggtcatttttctggtcggttaactcttggattagttgcagctggagttatagctaaaaagctaatttaccctgtttcaataaaagcaggattggttgaagctggaggacaaacagatattgaaaatgctattgaccaggctgtaaaaaacaatgattcaattggtggtatagttgaatgtattgccgaagatttatctattggtttgggtgagccatttttcgattcggtagaatcattgttaagtcatgcagtattttctattcctgcaataaaaggaattgaatttggttccggatttcaggcagctaaaatgactggaagtgaacataatgatcaattcattgatgccgcaggtaaaaccctaaccaatttctccggaggtattaacggaggaataacgaatggaaatccgctgatttttcgggtggctgttaaacccacatcgagtatttcaaaagctcaacaaacttttaacttgaaaacaggaaaaaaagatgaattaatcataaaaggacgtcatgatgcttgcatagctttaagagtgccggttgttatcgaggctattactgctattgttctgactgatttaatgctgctggaacaaaaacttccccgtgtaatttcagataactcttcacgataatttctatgcatatctaactaaactgtaatgagaaaatccttaatcattgtaatcatcagctttataattgtagttctacttgtaaatcagtttgttgatgcaccaatttttgatgatcctaaagataaacttgagtttgtaattaaggaaaaaagaaatgatcgtttggatttaatttatcttgatattcttaccaaagattctttaaacattgattatcactacggttttataacaagtaatttttcaatggctccggcttacagaattattgatgaaaaagacatcacagatatttattggaattacacagattctgatgataaacttgaaagtgatattggtttttatagtttaggattaattgcttcaatgaacaacgacagagataaagctcttttttattttactctggtaacgaatgataaattaaaatatttaaacaattcaattggcagggtatacgacgaatcaaaaaattacgaagaggctgaaaaatattattataaagcaatcgagaataatggaaatttagagggtgcatattcaaatttaatcagtttatattattctcagcaacgatttgatgagctttatactttattaaaagaccgaaaagcaaggaagtattttccatcgcagataaagcgttccatgtttttatctaattttaatcttctaggatattttgaatcagtaataggacatacttaccagaatcaaaatttagttggttttctgggagcccttttggtcatgttaagctggtttttttatttgcgccggatagatatttatgaacctgaaaagtggaaatatctgcttcttacatttttgctcggaatagtattttcagaatttacatttttgttaagcgatttaaattcaatgtttacaggctttaacttaaatggaggagtattaaatgatttgttgtattgcatcattgggatcggtgttattgaagaactggtaaaaattattcccgttttattgattttaaaatacactaaagctattaatgagccagtcgattatctgatttatggttcaatttcagcactgggttttgctttttctgagaatctcttgtatttcaataattacggaccacaaattatcatgggcagagctttaactgcagtggtatttcatatgtttttaacatcccttgcagcttatggacttatgttatctaaatataatgcaagcaagggctttttaggtgattttcttaaatatttcttgatagctgcaataatacatggtttgtatgatttttggttaattaaccaatctgtcagtcaatttgctcttttttcggttattatattaatattctgtttctctttttacaatacacttttttctaacgctttaagcaattctgaattttacgatgagcacattcacttaaacagaaaaaaacttcaaaattatctcatttacactctatcgttagttttgatgtttcagtatctcgctatttcattcaagtttggtcatgaagaaggctggattagcttacgaagctcattagtctcagggagttatttaattatctttataacagcaaacttagggacgataaatattaagcaccggaaatggaaccccttacaactaaaactccctaaattttttcttaaacttgagcatgaccccaatgatgttatacatgagaaatttgaaatagaggcaatttcgagtaataaagacctaaaaaaattattccccaataaaggtcaggtaataggaagagtaacggtttcaggaaactccgattggtatcttttcgaattggaaaacaaaaaagaaatacttgatttttgtggttctcatatattaatcagagcaaaggatctttccagaccaattaaaacggaagagaaaaatgagattgctgtttttgtatttctcagcgaagataaaatttatgccgaagaaaaactcagagaagactttctgtttaaaggctgggctaaaataagttaaaaagatgcatctcacattctataacatttgtcattaactcactttatttctaataactactatggggttactaattattttactttagtcatcaggtttttcagttagtttgttgttttaattgaatatatgcccaaaaggagttataaagttttactaacttaatggtctttaataataaaatttaagatcatgagaaaacttacacttttagcattattaatcttttgttttaattttctatttgcacaatcacccggttattttaactatcaggcggtaattcgagataatggaggtaatttaattaaagatcaggatgttagttttagagtttctgtaattcaaggaactgcttcaggaaatgcaatttatgaagaaaaacatgctgctcactccaatgattacggattgtgtaatcttgagattggaaatggaacaaatcaaaccattaattttaatctaattgattggagtaccggaaatttttatttgaaaattgagatagacgaaaatgcaggtaccaactatacagacatgggtaccactcaactcctttccgttcctttttccatgcatgctaacacagctggtctggctaagtttatcgataacgatatcatgtattttacagattcagacactctttttgctgttaaagacagagaaggaaatattgtttttgcagtatttcccgatggagcagaaatttatgtaaacgaagcggcaaagggaaaagttggaggctttgccataagtggtcgcagcccatcaaaaggaattgatgaggactattttgttgtaaccccggacagcacaagggtatacgtgaataagccaacggttaaaggaaaagttggtggctttgccataagcggcagatctccttcaaaagaaggtgaagaagaataccttgtaattacccctgatagtacaagagtctacgtaaatcaggatgcaggtaaaggaaaggttgggggctttgcaataagtggaagatcaccttcaaaggaaaccattagtaattttatggatataacaccagagaattattttattggacatggaagtggaagcaataatacaacaggcttatacaattcctttttaggatacgaagcgggaatgtataattctgaaggaaacagtaatgtatttattggatatctgtctggtaagtttaatactacaggcaggttaaatacatatgttggtgaacaatcgggaacaaataatacgacagggtataaaaatgtatttttagggacattaagtggatatagcaataccgaaggtctggcaaatgtttttcttggttgtaccgctggactatataatacaactggtacccgtaatatatttattggacaggccagtggatggtataatgataccgccagtttcaatatatttattggaaatcagagtggagtaagtaacaagggtggtgagtataatgtttttcttggtacaaattccgggcgtcaaaattatactggagattataatgtttatattggtgaacaaactggctatgcaaatcaaacaggtactgataatacatatttaggccataatgcaggaaacgaaggtgaagatggaagttttaatacttttttgggtagtcatgcaggatttaaaaatgcaggttcagaaaatacatttgttggtcatagtgcaggttttgaaggaccaactggagaaaataatgtttttctaggtagtttttcaggactcaataattcaggttattataataattttattggaaactattcaggctttcttaatacgagcggtgttggtaatatatttattggttcttatgcggggtataagaccttaggggataataatatttttataggttttggtgcgggatctgaagatgaaacagcttcagataaattatatattgataattcagataccagtgaacctttaatttatggtgagtttgataatgatttgttaaaagttaatggtacattggatatgtctgacgatccctaaattagatt

SEQ ID NO: 1517 - DNA, 15941 bp, synthetic construct
  misc_feature 1..15941: note = Synthetic
  source 1..15941: mol_type = other DNA
caaataaccagtggtacatagccgtaagggcaaattgtgccctcgaccagttcactaatgataaatctgcaaattcaaccataattattcttttggttcagttaatatttccaatacataatcgctccgttcctggtcggtttcgaaattggtttttaaaaagtcggggaaaaagaatactttgagtatagcaaacataatgaataacttgattaggataattagccagacttgcttaccccaagtccccatattccggaaaccattgacatagaaactccagacttgtcggatgatatttggtgttttgtttgtcatttgggattaaaagtaattgttttagcagaatattcccgcattttgatgtccattttattggcgaaatggttttataacatttaaaggctatttggtattcttgttttctcggtgctgaaattatgttatgtaagtacttttgggtgagatgaaatcgctaaaataaattttgaaaatattttcgaaatcattttgttttaatcatttgttctttagctttgagatattattttaaacaaaagtttaatcgaattgcgatggaagacacaaaattaaagaccgacgttctggtgattggtagcagtgctgccggtttggtaagtgcgctaacaggaaagagagtttatcctgaaaggaaatttaccgtggttacacgattcccgaaaacgctaattccttgtggaatcccttacattttcggctcggtaggaagctctgacaaagatatccttccttctgaaaaaatgtttgaaaccaacaatgttgatatgcttgttgacgaagcagaatcaatacagttaaaagaaaaaacagtccgttttcagtcgggaaaagttattggttacgaaaaacttgtaataggaacgggctcgcttcctattcagccccaatggcttaaaggagccggcctggagaatgtttttaacgtgcccaaaaacaaagtgtatctcgatgaaatgcacgaaaaactgaaaggagcaaataaaatagttaccataggtgctggttttattggcgtcgaaatttcagatgaactcagaaaagcgggtaaagatgttactctggttgagaaacttccccgaattttagggcttgcctttgatggtgatatttcggaaagggcagaggagttgctgaaaaaccgtggcgttaaaattcttaccggcgcttctgttgccgaaatttcgggcaatggaaaagttgacggggttgttttggaaaacggagaacgaattgaggctgacgcagtaattctgtccatgggatataaacccaattcggaactggctgccggcgcaggattacctgttagcgaccgtggttttataaaagtagatgactatatgcgcaccacagatcctgatgtgtttgcggtgggcgactgcgcagaaaaaagagattttatcacccggaaaccttctccggtaatgctggcttctaccgcatgcgccgaagcccgaattgccggcatgaacctctttaaactttctgctataaaaacatttatcggaacaatttcgattttttcaaccgcaattggcactaccggatttggtgttgccggaattaccgaaacacaggctgaagctgagaactttgattttgttaccggaacatttgaaggaatagatcggcatcccggtgcccttgaagatacccacaaacaatttgttaagctggtagtaggccgcgagtccggcgttattctggggggcgaagtttacggtggtttgtcggcaggcgaactaaccaacactctcggaataattgtacaaaaccgcatgaccctgaattcgttgcttacagcgcaattcgggacgcatccgctactcacggcttctcctgcaggttatccgcttgtaaaagcagcagaaagcgcagcgggtaaaattatgtttaaatagcttaccgccgggatgtttaataaaaccggtagctaagcagtacttgactggatgagatggctggaagcattatattggtggtgatggcagctctggaagttaccggtttttttttgaattagtttgtagtaaattgaaggaaaggagacttttctttactcaagtttaaacgactttcggagtgtgagaccaacagtcagcgggtcgccgagtaccgctgcgtagtgcccggcgtttcctcctgcgggcagtaattgttcaaaataattggtgttggccaggttacgtacccaaatataaacggttaatccgtggaaatctctgaatccggcctgtgcattaatcagtgagtaagaattgatgaccaggtatttggagggggaggagcttgaagagaattttgaacggtagaacagttcagtacccataaaatagttcccgtcgcgtgagaagaaagttccctttttcgagaaatcaatccctccggaaaatgcccatttcgaaatgcccggtaactcttgccccgagacatctttgaaagaagggcctccagtttcttcgagtggcggtggcgcatttttaaacgaaacgtatttgccatcggtgtaagctgctgcggcattaatagaaattagactgttgattctgaacttactgtcaagctctgcaccggcaacacgaactttttctgcgttggccaggtatcctctatttacagacagatcggctgcctgcacctgggtctggtagtctttaattgacgtgctgaacactgtgaaattcaaaaaggaagaagcaaacggggatgatttcagtcctgcttcataatgaataactttttctggctttattaccgccaggtcggtcatggcttctccgttctggcggggcaggccgcccaggttcaagccaacgggtttaaagttggttgccactgtggcaaaagtatttaactttttatttgccttaaagtttactgtcagttggcccgatatattggttttgttgatgtttgcgttgaatgcctgttcattataaactgaatttttaagggctattaattccgggtcatcagtctggagtccgccgtaggtttctcgtctgaaatcaatttttttgtggtcgaagttaattcgcagcccgggcaataagtgtatttttctggtaattgcccagtcaatttggctaaataaggcaccgctgaaggtttcgagattggggtaagtttttaatccgtaaccttcgagcaatccgggggtttgccaaagcgcgctttccgagttctgcgaaaatctccactggtccttccccgattcctgggtgtgggtaccgtcgggtgcaagtttctggtaaatggcaaacacaccggcaacaccacttagttttcgggagaagtcgccggcatatcgtatttcctgcgaccattgttgatgtttcgatggagcctgcgaaagagtgagcgcctgcaacccggtaaaatctctgtcgtttgaaggcccccaattccagtaacgccaggccgaagtgcttgttaacatgccgtctgtggtttcaatatttacgtttaccgacgcacctccgaaatcctgtttcgacctccagggagtgtcgtggtcgattaaccggtcgaaaggattgcgggatgggagttcatatttcaagtcggcaataatttgttcaaactgtctgtattcggggcgcagagtcggggctactcctgcaaaaaccatcgcgtatccgttagggcgctgcctcgttacatcggccgcaaaagtaatttcagttaccgatgagggcttgattaataactgtccgcgcactccgaggttatttaaatcgtttacatgttcctgacgggctacattataaattgttccgtcgcgctgggtgccggaaaaggaaagcctcgcagcaaccgattttcccaaaggaccgcttaacgatgcctttgcctgaataaagccgtaatttccgtagctgacttcaaatttgccggtaggcgtgaattccggttttcgtgtggtgatattaaaagctccggccgtggtgtttttcccgtaaagcgttccctgggggccgcgaagtacttcaatgcgttccacatcaataaaatcgagagtagttgcagctgggcgggcgtaataaaccccgtcgacgtaaaagccgactcccgggtcaataccgtcgtttgtgaggccaaaagtagaccctagtcctctaatgtttagtgttgtgtttcgggggttggaagagtataattgcacggaagggatgagctcttttacccgatttacattgaatgcatgggcattatctgcttgagtgcccagaattaccgaaatcggaaccggaatttctgccaatgattctgcccttcgtcgggcggtgacaataatttcttcgacggtgttgtcggacagaagtacgatttttaccggctcgtctgtcggagcagcgatttttacttcacgggggatcattcccacggaacgtatttgaagaaagatgggaaagttcatttctgtttcgagttgaaaccgcccctttaaatcggtaactgcatagttttgtgttccttttatcagcacagtggccgacacaatagaaatgtcgtcagtgtctgttatagtccctttaactggcgtgcccgaaagtgcaaaatatgctatgcagattacaaaagctgtggtaaacagaaattttattttcattttttgattgattaatacaaaccgcgtgttcccgttgccggaaaactttggcaaaagtattttgaggggaggaggctcacaacagcttaaaaacgtaatttgagactacgtataaaaacgtataacgggcattacaaattcaggtaaccgtttttaatcgcataaaccacaaggtttgccgtatttttcgaaccggttttctgtaagaggttttcgcggtgtttgtcaatcgtacgtttgcttacttttagcttttccgaaatttcattgttggttaatcctttgcagatcagaacaagtacttcggtttcccgttcggttaattcatccagaagtgaactgttgtttttgggtggatttttaagaatctcattcagcatttcaatggaaatgtagcttttgtcgttatacacatcaacaatggctttttccacttcctggaaactggaattcttcagtaaaaaaccacaagcgccggcttctaccatgctcaggtaatagtttttgtcagaatacatcgacaatgctataattttgatgtcaggttggattgcaacagcttttcgagccgcttcgattccattcattaccggcatttcaaaatcgagcagagcaatgtccactttattgtgcggaaggttttcaataaattgctgtccgttttcagcctcccacactttgttaatgtaatcgaggttagataagagcagtttcaacccctgcctgaagagcaggtggtcgtcaacaatacatactgaaatttttttcattggagcggaaagtaaaagtcaatggaaaagccttggtcctgattgtttatgctgaacgttccgttgagcgattttgcccgggaaataatgttgttgaaccccattcctttcaatttccctttttgtagcagttcggggttgtttattccactgccgtcgtcgctgtactgaatgacgaacaaatttccggacaccatcatttttaggcaaacagcgcttggttctgcatgtttcaggctgttgttcatcagctctgtaactatgcggtaactgctgttttttaagtcgtcagacagaagcttttcatccacatccagttgaagctcgggggttatgtttgaagagctgaaaagcttttcggcaaaatcttcgatggcagtttttaagccgtaattcaccaaaatgtgtgggctcaggttgttggaaatctctttcagagtagcgattgaatcgtcggtggcgttgtatgcatttttaataattttctgatttagcgagttcaggctttcggggtttattgcgctcagcgacatttttattgaagacaaaaccggccccatcccgtcgtgcagttcgcgggcaaaattttgtctggctttgtcttcagcctttatgatggccgataaaattctacgttcgttgtctttcctgattttttcgatgcggtattgcaggttaaatatttcgcggataaaaatgacaccaaccagcattaacaccgagattaatacgcctacccaaccgttgatttcatcgctcgggaataattttgaatcccagaacaatgacgaaaaatcgaatagacgcctgacggccattaaaacaaatgccgacgagatgagaatccatgatacattaaaacgggtgcgcttaatcagactgatggcgtaaattgttgcagccagctggattaacatggaaagtagcagagcatatttaagcacggcagtgatttttagttttcaatatgaatgcgatgtaacaaaagtaccaataatctgcattcaattaaaaagaagatgaaaacggagtaaaaccgtactaaaaaccaacgccaacgctcagagaatctgcgttggcgttgttggtaattttataaaaatctatttcggactgagttatgcctcagttacaattcgcggatttttatgtttctgaaccaaaccgggtatccgtggtcttgcaggccgatgtatccttcttttgaaattccttcggtaaatcccggaaagttcttgaatttgctgttttcaacgagtttatcccattcgggagtccagtgcgtgtaggaaaccacttcttttccgttcatttttactgttgcgttcccgttttcaactttaataacacacgtgttccattggcctgccgggttaacggtttttgggtcggccggaagcatgtcataaagagaacccgccaggtggctgtcaattttattgtcggtggcatttttgttgtcgagcacctgaatttcaggggcagcgtaataaattggtttgccgggtatttctctgatgtagtagaaaatacctgaattggccatgttgctggctttccagtcgatggaaagttcaaagtttttgaatttcttcgggccaaaaaggatgtcaccaccggctccctgtcccggttttttgccttcgccaataagcactttcatggcattgtcttcaatcgtccagtttgcaggcatagcgtcgccattacattgccgccatccatcaaaattttcaccgttgaaaagcaattcccatccggcttttttttcttttttagagagttgattcagtttttgtgcgaaggaaggaatagcgaaaataaccacggctaaggtagtcatcaaaaaatttttgttcatcgttcgagatttttttagctttattaagcaattaataataggtttattgataacaagttgttctatgttgttcaggagaattttgctcccctttactttccttttcgccagcggcgccatttgcggcttaccgtttttacatggaaaaccccgtgactaaccgatttcacatcttcaatggaatagaaagctttcggattggttgttttaaccaggtcttctactttctgaatttcatttcttttaataatactgtatatgatgcttacattttcggtgctgcctttggcttcgtggtaggtaattccgtaccccgcatcttttaggttggctattagctctgtagcactgtttcgggtaataatctggattttaacaattcccatggccaggcgttcttccagcaacaggcctattaggtttccggttgcaaatcctgctgcataggcaaagtagcacacccagttgtcgaggttctcaaaaatacgggagatggctattaaccaaattaaaatttcaaaaaaaccaagcagtggagccaggtatttttgccctttcgaaaccatgacaatacgtatggtgcctatggttacgtccattatcctggagagaaatatcaggaatggaagcagaaaataggtgaaaaatgcagtattagcaaaatcagctgcaagcatcatcttttcaaaatttccagtaaaagtacattaaaattccgaagtaaaatgaaaacgaatgtctttgaattcgtcttgtgccatttgcaaaataaactgggagtcggccagaaacacgtcgcgccccagcttgtctttagccatcttttgatgttttctttttttaaattccgtaagagcctggttgttatctgattcaatccagcaggctttgtgtatttgcagcggttcaaaccggcattttgcaccgtattcatgttccagtctgaactgaataacttcgaactgaagctgcccaacggtcccaataattttacggccgttaaactggctggtaaacaactgagctacgccttcgtctgtgaggtgatcgactcctttatgaagctgtttcgacttcatcgggtctgcattttcaatgtagcggaacaactccggagaaaaactcggaagccctttgtaatggatctcttctccttcggtaatggtgtcgccaataataaaactgccattgtcgggcacgccaatgatgtcgcccggataagccttttcgattatttctttttgttcggccataaatgccgtggggctcgagattcttacattttttcccagccgcatgtgtttgtaaacattattacggacaaatgttcccgagcagatttttataaatgcaattctgctccggtggttggggtcgatattcgcgtgtattttaaacacaaatcctgaaaagccagactcttcgggtttcaccacccgctcttcagcagttgcaggttgtggcttcggggcaatttccagaaaagcgtgtagcagttcctgcactccgaaattgtacaatgcacttccaaaaaatacaggagccaggtttccttcgaggtagttcgcccggtcaaactcagggtaaacgccttctaccagttccagttcttcgcgcagtgtttcggcatcgtcgccaatgtgatcttccagttccggattcgaaatatcttcaaagtcaattccctgttcaatggcctgaatgctgggatcgaacagttttaagctgcggtcgtaaatgctgtaaacacctttaaaatcggggccgttatttattggccagcttaacggcctcacattaatttttagttgttcttctatttcgtcgagcagggtaaacgagtcctgagccggacggtccattttgttaatgaaaacaataaccggcgttttacgcatccggcaaacattcatcagcttttcagtttgcggctctactccctttgcagcatcaataacaataataacactgtcaacagccgtgagcgtacgaaacgtgtcttcctggaaatcctggtgcccgggtgtatccaaaatatttactttgtacccgttatattcgaaccccataactgatgtggctaccgaaataccgcgctggcgctcgatttccataaagtcggaagtggctccttttttaattttgttgctttttactgcccctgcaatatgaatggcaccgccaaacagaagcagtttttctgttaatgtggtttttcctgcatcggggtggcttacaattccaaatgtccgccggcggtttatctcatcctgaaatgccattctttatcgttttgtttttgcggctgcaaaattaaaaaagaagtttagagatcagtgtttaacatcaaaagtttcagaaatattgccgctcaattggtgaaaaaataacaaatagaggcttcaggttagccaaataaaaaactcccaccgaagcaggagtacaggaatttttttccttcggcatatagccttattgtgataagatgcaaaattgatttcaatgttattgaacagatggtctgtctttctattgggctaaggtaggtatattctgattaatatttatatatttaacaacataaaacgaatcggaatctaaatccccgtcaacatggctgaaaaagttaaggctccggctacaatacataatttttacaatcgattattttgtacaaacattgaacgaggattaacccgttgaaaccaatttattatggcaaaaattttaggactcgacctcggaacaaacagcatcggatgggctgttgtggagaaagaacgcgattgtgaatttcaattaacagataaaggcgttcgtatttttcaggaaggcgtaaaaattgaaaaaggaattgagggatcgaaagcagctgaaagaaccggttttcgcagcgctcgaagattgaagtatcgccgtaaacttcgaaaaatagagcttttaaaagtattatcggcatacgggtattgtccaacgcttacaaatgaagaacttttgaactggcgttataaaaaagtttatcctagaaaccaagcttttctaaactggcagtcaactgacgaggcaagctcaaaaaatccatatcattaccgggctttggcagtggagcaaaagtttgatttagagaaggaagaagaccgatttaaaatcggacgtgcattttatcatattgcacaacgtcgtggttttttaagtaaccgtttggagggaacgaaggaaagtgatggtgctgtaaaaaaatcaatttcggagattaatagtttgaagggggataaaacgcttgggcaatatttttatgaaaaatacaggaaaagagaaaaaataagaaatacatatacacacagggaagaacattacctggatgagtttaaacggatttgtgagtttcagaaactggatagtgaatttacagctaaagccagaaaagccattttttaccagcggcctttaaaatcgcaaaaaggtctggttggtaaatgtgtctttgagccgaacaaaccgcgttgttctgtttctcgccctgaatttgaagaatacagaatgttgtgctttgttaataacatgaagataaagactccaacggatgaacaccttcgttttttgacagaagaagaaaaaaagaaaataatgcctcagttcttcagaaagagcaaagattatttcgatttcgaagatttggcaaagcaattggcgccaaaacatcagtataaattttataaaagaagagacaagtatccggaagactggttgtttaattacagcatgaagacaattgtaagcggatgcccggtttctacccggttaaaagatttgtttggtgaagatattatggcatttaatataccatatataagagaaaaagacggaaagaaatcagtaattgatatagacgatatatggcatgtgcttttttcttatgattcggaagataaattgaaagaatttgctgaaaaacgcttgcaattaacggaagatcaagtcaaggattttttgaaaattcgattgagaaaagaatatgcttcgttaagcctgaaagcgataaaaaagattgtccctttcttgaaagaaggactgatttattcccacgccgtttttctggcaaatatggaagatgctatccccaaagagatatgggaaatagaagaaaacaggaatattataagaacagaaatagcaaacataatagctaatcagaaagaagaaaaacagatttgcgaaattgttaacgggataattaaaataaatcatacagatgaagcagtatggagtgaagctgcttcagaaattttcaaaaaagatttgttgagaaaaataaaagctcattttggcgagaagacctataatgctttttcggaagaaaagaaaaacagggttgaaatcagcgcttttgaactgttgaaaaagcagatgcaaaaaaatagtggaaggggcgaattcgttcctgtgcatcgtattgatgataaagtaaaagcatttatttccgataattttgatgttgagccaaaatcgctggctaaaatttaccatccctctgccatcgaagtatataaaccgcctgtaaggaaggacgatggcaaactatacttaggcagcccaatggtttcttccattcgtaacccgatggcaatgcgtgcgctccaccaattgagaaaagtcattaacgaactaataaaaaccgatgttattgattcgggaacccatattcatattgaaatggctcgggggctgatgaattccaacgaacgaaaagcatggcaaagctggcaaagagaccgggaaaaccttcgcaaagagtacgccctgaaaataaaggaacatttatcttcggatgcagagccttcggaaaccgatatcttgaaatatcagctttgggaggaacaaaaccacaaatgtatttataccggaaaagagatagccttgtctgaatttttaggagctaatccttcttttgacattgagcacaccattccgcgtagtatttctttcgataactcgcaggtaaataaaacactttgtgagaacacttttaaccggtctgttaaaaagaataaaataccttatgagctatctaatcatctagaaatacttgccaggatagagtgctggaaagagaaatatgaagagttggataaacaaattgcagcttcggttcgacaggcaagagttgccatcgataaagagtcgaaagacagggcaattcaaaaaagacataaattgaagcttgattttggatactggaaaaataaatacgaaaggtttaccatggaggatgtgccggaaggttttaaaaatagccagctggttgataccggtatcattacaaaatattcccggttgtatctcaataccttgttcgataaagtatatactgtgaaagggagcacagtcgccgatttcaggaagctatggggtttgcaggacgaatatgaaaagaaagcacgggtaaaccacatccatcattgtatagatgctattaccattgcatgtattacgaaagaaaactatgataatctggcaaaattttatcatgactttgaagatttgaaaataaaaggagtggaacaattaccgcgagttaagaagccttggaaaacttttgctgaagatgtaaaggctatagaggatgaagttcttatttctcattatactccggatgtgctgccaaaacaaaccaggaagaaacttcgggatagagggcggattaaaaaagataaaaatggcaatcctatttatcaaaacggagatacagtaagaggaagtttgcatcagcaaacgttttatggcgcaattgaaaaagcagtaattaataagaaaggggaatcggaaaaagtaataaagtatgttgttcgaaagtcacttgatagtctagaagacagcagtattaaaaatgttgttgacgaacgagtaagagaaataattcaacatgcccggttagaagaaaaaaagctgaaaaaagaaatagaggttcaaaaaaagaagctggaaaaggctgaggaagaagaggagaatagcatttgcactgaaatagaaaggctgaatagccagatatcagaattgtatacgttaccaaataaaaatggcgctcctattccaataaagaaggtaagaatttatcaaacttcagtaacaaatccgttgcatataaaagaacagcgcgataagtcgaaaaaaaagctaaaatcgcacaaagaattttttcatgtggcaaacgacagtaattatgccatggctatttatgagggtaaagatgcaaaaggaaaaattaaaagagattttcaattgttgaataatatgcaggctggtgagttttttaaattttctgttcaaaaagacttaaaagcacaaaaccttaatcaaatacacaatcttgttcccgacaagatagttcaagggaaggcagagttatcttttaaagccgtattaaaaatagggacaatggttgttctttgggaaaactcaccggaagaagtttgggatttgactgtggctgaaattaataagagactgtataagattgtagggttatctcagcaaataattcaaggaaaatacttttttggtacgattgtaatgcgccatcataaagaagcatcatcagcttctgatttaaaaacatcagatggaaaatttgaaaaaaatgaatcatataaagcgcagaggaaaatgaatcataaccaatttaacgcattagtagaaggtgtcgattttaaaattgacccacttggaaacatcaagcgaataaactaaattcattcccctttttcgaagcttctaacctttgggagaggggagttgataaccaccaataaaacgagacaacatgttaaaaaccatcacaacatgccgggtacgcctgcgaaaagccaatgtacgggagcgaaatgccgtttcccgttgcagaaagccgctgtaccgtagcatagtggctccgtaccacagcgaaacgctgctgtacggctgcggaatgcaaaattctgttgcgaaatggcactgtaccctgtacagaggcattccgcaacggtacggagtaatccgctatggatctgcataaaaataataccgaatagtttaaccacaggttggttaatgaccctgaacaacggacacatcccaaaaaattccggattatccccggtattttgagtgtctttcatgttcgcacttatactgccgtcagtgcaggatattttcattaatttttcaaaaacttaaaatttatttttatgaatgcctcaaaaatgtcgattgaagaaattttgtatgcttcaggattgagaattaacaacagcctcagcgaccggaaaatactcgatgccgtgtcgcccatgggatatcctgaagcaaagttgaacgaaggagccgcattgctcgaggaaactgtcactcttgtggaaacacagaaaaaggaatacggcgaagttgatgaggcccagtcgggctatgaggctgtacgcaaaacggcaaaccaaacctatatggatatgttgcggattgccagggtagctttaaaaaatgatgtaaaagcaataactaccctcgaccttgacgggcgacgtgcccgcacccttagcggctggctgaaacaaacgctggggttttatcgtgctgttttggccaacgacgagtggaaggcagcaatggcagcatacggacagccggaagagaagttcagcgcacaggtaacggccattgaagaggttgccacagcttctgaagccattaaaaaggagatgggcgatgcccagaatgccacgctcgaacgcgacatgaagctggaagaactggtggactggattaacgactatgaagtaatcgcacgcattgctctggccgacaaaccccagttgctcgaaaaactgggtattgtggtaaaagcatagcctgtttataaggatttaaatcttcaaggtttttaagaccttgaaggtttagtttaaaaagtactacggagttagtaacaactttttaggtgctttgcaggataaaaaaagatgctttttagactcccgaaggtcggaaagacacttcgggggcagcggcaaacctttcggtgtcttatatacccgaaagcgtttccgaaaatctcgaacgtttttaaatgcaaataaatgggaccagtatcactcgaatacggacagttttatcatatctataactgcggaatcaatggttgtaacctattccgggaaaatgagaattacgagtattttcttcacttgtacgataagtatgtttcgccagtggccgatacatttgcgtgggttttgatgagaaatcattttcatttcttggtaagaataagaaaggaggaggaaatatctttcatgggaactcagactccgaaggtcggaaagacacttcgcggtcaccaacaaacctttcggtgtctaacagacccgaaagcgtttccgaaaacatcgaacgtttttaaatgcaaataaatgggaccagtatcactcgaatacggacagttttatcatatctataactgcggaatcaatggttgtaacctattccgggaaaatgagaattacgagtattttcttcacttgtacgataagtatgtttcgccagtggccgatacatttgcgtgggttttgatgagaaatcattttcatttcttggtaagaataagaaaggaggaggaaattccttt

SEQ ID NO: 1518 - DNA, 15749 bp, synthetic construct
  source 1..15749: mol_type = other DNA
  misc_feature 1..15749: note = Synthetic
agacttttgggttcttataatagtgtgtgaaatatgagtgacctcgcggaaatatcctgtaccagggaggagtacatcatctcatctatatcctgtaaatcttgttaatcctgtcagaatattacacggttagtgaatcaatgcctattagaaagatcaatttcaaggagtaaatcatgtccattctactcccaattttccatctcaaaatccctctttcaccacgttattctatgccctcaaaaatttctagtaaagaaaccttcggtttgtagtaaagaaaccaattgtttctagtaaagaaatgaagcattggtagtaaagaaaccgggcaagactagtaaagaaattttaagattaaaggaggaagagtggtgttgattgaaaataaaggcattaacaaagaggggccaaaagataaaagaaacctccaaaatcaggggcccaacaccgtttttcccaggagtcaaaaagcattcaatttcgcaccttctcaatttttcaaattctcaccttttcaaattctcatcttttcagtttcccacctactcaattttttcatcccaactgcttaaggatttttctggccctgttttgttcccctttgctaccatacggaatcaactcttccagtacgatcttcaattccgggattaattcgggatagatcttggttaggttgaagagtatttgcatgcagtgcgctttcacggcaatgggcgtgtcttgttgggtgagccaggtaaaacaggcatccaggaggcggccatcggccagttcactcaagtcatgttgtaccaggatacgggcaaaatgccgcttcacactttggttggttaatgcgggtaatgcctctgctatccgtggcagataaggtgttaccatctcaggtgccaggtcatgtatctggtcgaccaggtaggccgaccgccaggctattttatgatttttatgtgttgtcaaactaaaaagcttcgccactacttctgcggagtggcaattgtcttttgctatctggttaaatccggcagaattccagcgatcaatcaattgttcttcaaaatccatctattctatacttgcaggtatccggcctggtctaatgcataagtgagcagataggccaagctgaatgcaatgataggagctattagccaaaccacaaaaaaattattcacttgtgtgcgcctgaaaatatttttggcacctagttttgccacaccaataccaaggatcgctcccacatttagttgtaccaatgaggttggtattcctttggttaccgaagcaaccagcaggagggaggcagtgacaaaggcgatgatgatggcttcaatttttccgaaaaggatgatctccttaccggtgttttttaccagtttgtgcccaaagaaggaactgccaatgccaaagttgggggcgacaatcaatgtagaaagcatcatgatgagtataaaattggattcgttggcgtggattcccagttcattcatggtcattgacgcaatgggaccagccgcgtttgccacgttgttggcgccaatggagaacgagacgtacaacgccatgatgatgattaataccttcaaagaggggtgattggatatggtgccggagaggaaatagccgcgtttgcggatgggcttatagatgaatcgtccgatgccatagcagatgaaaaacgagagtatgggcagaatgaaccaggtaggaatgatttcgaaaaataattttgaggtatttaacttgcccagatagagggccggagcggtcacggctaagatagtagcctggctggtggattggggaatgcccaaaaggttggcaaacagaagcgacagacttaccgaaaaaagaatgacgcttaccagggagtaattaagtaattctgccagcaggaggcctttgccaatggtaatggcggtgttttttccggccaggatagcgcccaggaataccattattccaaacaggcccggaatcaggcttttctttatgatgttggctccataggctacggagaagccgggggcagtgccgctaccacccatgttgatggctaaaaacatggcaattatatatggtatcagcaggtgattaaatattggtgacatggtagttcttttatgattatacaatagatgatttctgtgttcaaaattataggcaatttgattacttttaatgcgtataaatactgatttatcatgacagtggttcgttaaactttagtaattatctaagaatcaatttgtgattgtttcattgctcatgttgttatgaggttaccaatgagtcagatataaatcagtctaaggtctattatctaaaatttaacgatctattatcatgatacaacgagattacatactaaggattattcaggatctgatcacctttattgcccgtatgttgcggttaaaacaaaacggtaatctggaagaggcttatctggaggttgtcaaaaaaacagagaaacttttgaagatggattatgatgattttctggccctggacgacacagaaaagcctgatgtgacaatggatggggagaatgccgactacctggatgcctgtggccgtttctttatgttagccggcgaaatttgcctcgataaaggattacgggaagagggaatcaggcattaccggtatgctgaagccagctttctgaaagccgaacaaaaattcaagactttctcttttcaacgacaagtggaactggaaaaggtggcgcaggtattatccatgaatggttaatggattctttaaaatgatagatgagaagacaattgagaaacgggcaattggtgtttaatccttagcctggataagccagaaaggtaaaaagtatcaagatgatttactgctcgccaaaatattttaccactaaatacatcaatatcactggtaggatactaatcattatgagcataaacatcaggtttgcagtcttcctcgcctttcaggagaaggaatagctcactgcggttggttcatctggtatttgatttatttccaaagggggtatggtgattcctatttgtttttaattattcaacaagttttcaatgttatcatgatgtcaatattgacaacggccatctctgtctattatctaaattctaatgatctattatataatctaattcctattctatgaaattgaaatcgttaatattactcgtcgggttgttctctctttgttatgtaaatgcccaggaaataaggctatcagtagaacatgaagccgtatcatctttattggattggtttgaaaaggatcagccttctcagttggtggaaggaattgttaatctaccggctaatcaaatcatggaacagatttatcaggtgcatgaaaaggatgccattgcttttaatgacgccctgtgtcaattcaatcccatggatagcttgacggggcaaccataccggttaagacatgcctatgagcaccggtctgagattaaagtattgcaggattcccttcagacaattgattgggcggagagtatttttcataagtctatagcattctatccaaagcattttaatagcagcgtgaattacaaggtttttctctgttttaccggatggaaatggggcgatgccatgcaatttcaatatctgatggaggatgggaaagtggtgttatgtgaggaaggttcacctggcgtacttgttaacctggccattgtgaatgacaattatggtaacacctgtcagcagaaaattaaaacgttaacagaggtcatggcacatgaattatttcatgtattgttttatgaatatgtacaaaaacattggagcaaaaaagaggccgaaggtattgttgaagagttgaagtatctcatgatgaatgaagggatagcccattatatagcggaaaaagagtatttgctgcaaacctatggaaccgatcagctatgtgagaaggaaaagagtgcttttgagcaattaatcagcaaccatacaattatggctaatgactcattaccggaagaagagcggattcatgccttgaataagggaacctatggcagttattggagtaaatatgtatgcatcactggtatgtttatggcttatcatattgagcaaacatttggtcctgaaaagttgtcggactgtattgaaaaaggcgttgattactattttcaaacctatcgtgaggcctgtaataaaaatgaagctattccccggttacctgaagcactaaacagtacaacctggtcaggtgtatgattatggtttggggaaaagttgtaattcaattagtcatcgagtctgtacatgccagaaaagtattcagatttgggtatcacgtatcaagactttaaacaaccagaaaggggattctttaccaagagaaacacacaaatttcattgaaatgacgctaaatccagggcaaacttcttgtttttacatccctggatttacgtgtttcagcgcctccgtgtttagattcattagtttttgcgtccttaacgtctaagtgttatgattagaagcctccaattgtaaaagttgttgctttacctcaagaccgtaggcataccccgcaagctttttgttagccccgataacccggtggcacgggatgatgatgggaatcggatttctgttattggccatcccaatagcgcgtgccgctttgggattacccacggcaatggcaatatccttatagcatcggctttctccgtaggggatgttggtgagctcctgccaaaccttctgttgaaaatcagtgcctccgggattgagtttcaattgaaagtttttccttttccctgcaaagtattcttcaagctgatgcctggcgttggcaaaaaagctgtttgataaggtccattcttcagccaggtgaatctctttggtaccgttatcaatcagcaattgggcaatgccagcttcatctcccacaaggattatttcaccatacggtgagttaaaaatatcgtaaaacatatgaaacgatcatgatttagctttaaatatacaagaggatgattaaaaaatctctgtattcatcagtcctttgtcttgatatttaaatcttgatactaaattttagctgatgaaataatgaatggaaactctgaaatgcgacggttttatccgccaacctttttagccttgtagccatcgtttttcagcaggtccatgattttatccctgaaatcgccttgtatcagtatctcgccattctttacggtaccacccacgccacatttcgattttagttttttacccagctctttcaggtcatcatccgttccaatgaatccggtaatcagggttacggctttaccagcccgttgttttttgtcgagcatcacccgtaagtcctgctgttggggaggaagggtttcctgaacctcgtcgtcgtcgtattggtaattatagtctgtattggtagagaatactaccccgtcgcgatttttcctgtttttctttgacatggtaatttatttttcagcaaaaataagcgcttggtctgtatggaaaaagtgaaagggggtaaaagctgtgaatttttcagatggagcagttgttagtatggatcttggttgtggttaattctgataatcatcaaagggataagttggctgttgggcaataataagaagttgcggtattgcagtaattagtttcttgtggagggtggttcggaagtgagaagaggcctttgggaagaagccgtaagtttgtattaacgctttttaggatatttaaatgctatttaatctgttttggctgacttcttgcattaaggagctacagcaactgaaaaaggaagatggatgataacgtcagaattgagttttcttttaaagattatgaaagatgaatgattgccccataaaatagtcaaggcattaatggaattattgatttgtatgcggtaatttaagattgtttaaaaaaaggaagaatccgctcgtcatattcggtgaatgcatttgtaaatctaaaacgattagtaacggaatgtttaagagtagggaggaaggtaaagagttgtgtttttaatagagacttaaccaaaggtttaagcgaaaaaggaagaagttatatggtgaaatactgcaaacaattaaaaacctttatggtgataccgttagtaacgggcctgttcttagtttttttatctcaaaacaaattgtacgcacaggaaagtgtcgcttttgtgcaaggtgacggccaaattctttatgccgacatggatcattggtggtcgcgcactttcaaagagtccggtctgattggcggaaaaaccatccattactatgagccggggcccgccggggatgaatatcaaaaactggatgcccctattccggagctaacgccctggtccacctccaatgtgaaagcccgggttggcgtgacggcaggtaatgtatctgtttaccgggagcccaggggagaggggtattgtgcccggctggagaccaacctgaagaaggtggtggtacttggtgtggttaatgtaaaagccatagcctcgggtagtatgtatttgggtgatatggtggatcccatcaccgagacgggtaccccccggcacaatacccatatgggcatagcatttaccggaatcccttcggccctgcgtttcgattataaagcggtggtgggacaaaaaaggaaaatggccactggtggcttccgggtaagagatgtgaaagggcctgatatggcagaggtaattgtgttgctacaaaacaggcaggaagacgaaaacggtaacttctctgtgaagcgcatcggaaccggttggctgcgcattgctgaaactaccaaccagtggatcgaaggctttgaaatatccattgtgtatggcgatataacaagtaccggtgattatgaaccatacatgggacttattacccatgatgatcctttttatgccaaaaatgaaaagggaaaggctgtgtcgtatgaggaaagtgagtggggcaataaaactgatggcgttacacacctgattgtaattttttcagccagctaccagggcggtaattatatgggatcacccgagagtaaactgtgggtagataatgtggagctggtatatgattaggtgcttaggaagtaacttttatcaatatgttgttcaaattggatagaaatacctggagacaggtagaaacaaatggaaatacatggaaacagattgaaatacctggagataaaaggaaatatatggaaacagatagaaatagacagctcttatcattgtcaatctcgaacaataatcagcttgaggtaacatccctcgaagaggcttttttcagactaatgctgaaaaaacatagtgtcttatcagtgatgttcgtgtttatccaataggcaaagttgttaatggtataaaatgagagtaatgtaaaacagtctaatgtctatcatctaaaatctaacaatctattgggttaggcattaccatcacaggccagtacccggaaatagataaacgaataactaactctaaacaataaaatatgtcaaaattcgattttaattcattacctgtaaataccttgtttggaagcaggtggagtaactttaagcagatcgccaaagggcgggagattgatgctaattataaaaacaaataccgtttaaccaagtcactctgtggtctgttgagtatgacacatcccattgaggatttgaagtatttcaagcgggtggatgccctgcccatcgaggaagatccggtttttatcctggggcattggcgcagtggtaccacctttgtgcacaatatttttgcccaggatcagcatttcggttataacaccacgtatcaaacggttttttccaatgccatggtatgggggcaacccttttttaagtcggttatgaataagataatgcccgataagcggcccactgataacatggaactgatggtggatcagccacaggaagaggaatttgctttgtgcaatatcatgccttatagtttttataacttctggttttttccgaaagataccctggaatactgcgagaaatacctgttgtttaatgatatttcgaaggaggagctggctgtttttaagagagagtttacacgtttgatcaagacggcgctctataacaccggtggaaagcagtttttatccaagaatccgccccacacaggccgggtaaaagagttggtgaaaatgtttcccaatgccaagttcatctacctgatgcggaatccatacacggtatttgaatccacccggagcttctttaccaagaccattcaaccattgaaattccaggatttcagtaatgaagagatagaggcgaatatcctggaagtttacaggcggctctaccataaatacgaacaggataaagtatttattccctccgataaccttttcgaggtgcgcttcgaagattatgaggcggacgctttcggtaagaccagggagatctatgaaaagctgtccctttctgactttactaaagcgtcggagaagataaaggactatgtggataagaagagacaacatgtgaaaacgcggtatgagtatgcgcctgaaacaatccaaaaagtcaatgataactggggatttgccctggatcaatggaagtatgaccggctatagaagaacaatgtttgatgcagacccgataggattttatagaataaaatcctatcgggtctgattgtttaatgacgttcccttgacacacctccgcagatacctcaacttgtcatcagttcataattctttgatgcggtaaccgatgaaaccaaggctcctggcaataggcgatattcatggctgcttcaaaccattccgaataatggttgaagaagaaattcgtttgtcaaaaaccgataagttgattttgttgggcgattacatcgataggggccaacaaagcaaagaggtggttgactacatcatgaggctgatgggggatggatatgatatcgtggcgctccgggggaatcatgaggatatgtttttaaagggcttggtggaggattattatttattcaattggttaatgaacggcgggtacgaaacaatggatagtttcaatattacccatcccgatcaaatgccagctgattaccttcgtttttttcgaaacctcaagctgtattatccttaccaaaacttcctgtttgtgcatgccggctttaatgacgaagcagcagatcctttcaaagatgaataccacatggtatggcgccgcctttattactacacgcacccgttgttaaaagacaaaaccattgttcatggccaccgggccgaagggctcgaatacctccggatgtgtatagattccaatgcccgggttattgatgtggatacgggttgtgtttataccgatatcccggagttgggacacctctcggcggttgacctgacaaaccgtaaaatctattccgtgcggaatgaagaagtcggatgaagctgtaggtggaaaaattctctccctttcttgtggtatatagaagttgtcaattggcaatattgtgtgactttgggtttggtttaaaggttctgggttgtggataaaaaaactctgcgactctttgtgttttctttgcggaactttgcgttataactccctttgtcgtctttaccctggctggtactaaatgtagaggtaatttattatgattttgaaagcatagtggagttaattcgttccattatcaaaatactaagcatggctttttaaaaggagctggcttatggaaaatacatggtgtcataaaaaagaaactcccaccagaagcaggagtataggcgtttaaaccttcggcatttagccttattgtgataagactctaaaaagaatatattattttctgacaccaaagatagaaaaagattttattcctcatacctgttcaatattttttttattttagtagttcatttttcttaaaccttctcgcttttaacatgacactcatttaagatgcctctttactggcgggattagcacaaaatacccaatatgagcaatagaatattaggactcgatttaggcaccaacagcattggctgggcggtggtggagaccgaaaataaacaacattttcagctgctggataaaggtgtgcgtatttttcaggaaggcgtgaaaattgaaaaaggggtggagggctccaaagctgctgagcgtaccggttatcgcagtgccaggcgcattaaataccgccgtaaactgagaaagataaatacattaacagtgcttaccacctatgattattgcccgccattgattcctgaaatgttgaaccagtggcgctacaaaaagatatacccggcaagtaaactgtttaaagagtggtggctgaccgatgaggcaaccgataagaacccctatgcctaccgcgccctggcagcagagcagaaattggatttgacaaaccgggaaaatcgctataagctgggtcgtgctttttatcacatggtgcaacgccggggctttttgagtaaccgcttggagggcaccaaagagagtgaaggcgccgtgaagcagggcatcaaagagatttcggaagcaatcggaaatcaaaccctcgggcagtatttctaccaacaatataggagcggtgaaaagatccgggatcattatacccaccgtgaagcccattacctggcggagtttacaaccatctgtcagttgcaggagttacccactgaaatggtagccgcgctcaaaaaggccatcttttaccagcgtccgttaaaatcgcaaaaagggttggtaggcaaatgtccgtttgagcccaataagacacgttgtgctgtttcgcaccctctctttgaggagtttcgcatgtggtgttttgtgaacaacatcaaaatcaaattgcccgaggatgagaagctgcgttttttaaccccggaagagaaagcaaagattttaccccagtttttcagaaagagtaaagagcatttcgattttgaagacatcgctaagcagctggctcctaaaaagcaatactgttactataaacagggcaacaagcatgcggaagactggctgtttaattacagcatgaaaaccaccgtgagcgggtgtcctgtttcggcgcggtttaaatccctttttggtgaccactgggccgccttccaaaagccttatacccgcgaaaaagacgggcaatcatcaaccattgacatcaacgacgtttggcatgtgttgtttacctatgattcggacgaaaagctgcaggcttttgccagggagcggctggagctggatgacgaccaaaccaaagaatttgtgaacattcacctgaaacaggattacggttccctcagtctgaaagccatcaagaaaattcttccttacctgcgtgaaggcttaatctattcgcatgcggtttttttaggcaatatgaaagcggttattccggccgaagtgtgggctcatgatgaaaataaaacactcatccggcaggagatagggcgtatcattcaatcgcaaaacgaagagaagcatatcaccgacattgttaacggggccatcaaacgaaataaggagagtgatgccacctggagtgcggaagccagtgagatctatcgcaaagaactgttgcaacagataaaatcattttttggggagaaccgctttaatgcctttagtgaggacagaaaacaacggttggaaaacagaacctatgagttgtttgagcaacagatggagaaagattatggccgcgggaaatatgccaaagtgcaacgtatcgacgaccgcattaccttgtttttatcagataactttggggtgaatggcaccatcaaccacctttatcacccctcggcacttgatgtgtaccagccacccaaaaaaggcgaagacggtaactattacctggccagtcccatggtagcatcggtgcgtaaccccatggctatgcgtgccctgcatcagttgcgtaaggtcatcaacgaattgcttaaggccggcaagattgatgcctccacagccattcacattgaaatggcgcgtgacctgatgaatgccaatgaacgcaaggctttacaaagctggcaacgcgaccgggaaaacctgcgaaaatcctatgctgccgccattaaaacccatctggaggagaacggcattcaccgcgaggccaccgacgatgagatactgaaataccagttgtgggaagagcaaaaacacatttgtttgtataccggtcaaaccatagggttacacgatttcctgggggccaatcccctgtttgatatcgagcacaccatcccacaaagtctttcgttcgataattcccaggccaataaaacactttgtgaaagtcgctttaaccgggctaccaaacgtaataagatccccttcgagttgagtaaccacgctgccatctgtgaacgcatagaatcctggcagaaagaggttgaggagttgaataaaaagattaacggtgcagtaagacaagccaaaggagccgctaccaaagaggacaaagacaaggccattcagcgacggcatcgattaaccatcgaacgcgattacaagcgtgagaagtaccagcgtttcaccatgaaggatgtgccgacgggttttaaaaacagccagttggtcgacaccggtatcattaccaaatatgcccgtctttacctgaaaacactgtttaaacgcgtggataccgtgaagggtaatacagtagccgatttcaggaagatatgggggctgcaggaggcatacaacaaaaagcagcgggtgaatcacatccatcactgcatcgatgccatcaccattgcttgcatgaccaagccgcaatacgataaactggcccggttttaccacgactgggaagagtggcatcaccagaacattgataagaaacccgtttgtgagaaaccatggcgcacatttaccgaagatgtgaaggccatcgaacaggaggtgtttatctcgcactacacgcccgataatctccccaaagccaataagaaaaaactgcgcaagcggggtaagatacaactcaatgatcaggggcagcctatttaccagaccggcgactcggtgaggggtagcctgcacaaagagaccttttacggtgccactgaacaggaaacggagacgaaaaaaggagaaaaagagaaggtggtgaaatatgtggtgcgtaagccattggattcgttgagtgatgcggatattaaaaatgtagtggacgataaggtgcgtgagatattgcagcaggcacggaaaaacgaaaaagggttgcaaaaacagtgggagaccctgaaaaagaaactggccaaggccgaagaagccgatgagccggccatacgccgggagatgcaaaccattgagcaagaaataaagcagctttattgcctgcccaataaaaacggggcacccgttcccatcaaaaaagtacgtgtttttacccctacggtgaccaaacctattccgttgaaaaaacaacgtgatcaatcccttaaggaacataagagggattaccatgtagccaatgatggtaactatctgatggcgatttacgaaggaaaggatgccaaaggaaaggtgaagcgcgattttaaaattgtgaacaactatgacgccggtaatcattttagagatgaagtgcagaagacacttcggccgcagggtattggtaagcaggaagggttagtggaaaaagagaagcaaaaaggcaaacttcagttacccctcaaggcgattattaaaacagggacaatagtcttgttttggaaaaatacccctgaggaaatcaaagaattatctgaagaagatttaataaaaaggctttacaaagtgattaagatgaataaggatggaagagttgcatttaaatatcatcaagaagccagaaatgatgaaaagctgaaagaagattatgaaaaaaaatataaaacgaaagctccaaaatcattaactaatggcgaatcttccatcaattttgaaacgccatatccgaagcttttattaagtcctttaaagtttaatatgctcatagaaggaattgattttacactatctcctctaggagaaattaagtgattgcaatagtctgcgaacctaccacctttccaaagttcaaagcattggaaagggtggttttccataccaggaataatgaaataacgatcctcccggacaagtcgggcgtttaaataattaaaatcaaccctttaatcctgtttttagatcttttccaaagttcaaaaccttaaaaggtattatctccaaagaaacgaagaaagattccattagtttaaagacaaaaggggatcattccgtagcgaagagctataaaccagggcgaaatgctccaaatcggtgcgaaaagcccccttaccggtgcgaaacgcttcaaaccggtgcgaaatactactttaccactgcgaaatgatacccaaccactgcgaaacgctccaaaccggcgcgaaatggtatgcgacgaccgtttagtaccttttcgcacaggttttatcctcttcgctgccgttttcaggcagattacccatgtttttatgtatttgccacaggcaaatcttttatcgtttaatatttactctaaaattttaagaaaatgaataaaacaaaaatgacagtagccgaatttttgtttcagtgcaaccttcgcatcagtaacaccattaatgatggtgctatccaggaaaaagtagcacccatgggctataccgctgagaagatgcaggaaggaaatgtcttgttggagtcagccaaagattcttgccaggcgtttgagaaagaacatggtgatgtagaccatgcctttgccgaccgcaaccgtgagaaggaggctgctcatattacctacatgcagatggttgagattggcaaggtggccttaaaaaatgataccggggcccaatccactcttcaactgactggacgtaggcccaccacctggagcgggtggattaagcaaacccgtaacttttaccataacctgatggaaaatgaaccatggatggccgccatggccgggtttggtatgactgaagaaaagatgcaggccgggctggaacaggtgctgagagtggagaaatttgccgaagtcatcatgcgagaacaaggcgatgctcaaaatgccacccagcaacgtgatgccaagctggaagaacttcacgaatgggtgagcgactatgaagtaattgcccgactggctttgaccgaatctccccagttgctggaaaaactgggtattgtggtgaaagcgtaagccgacggggtaacctttcgatcttttccaaagtttcaaactttggaaaaggtcttaaagatccttctttccattcaataaccttcaaaattcaaccaccatgaaaccactccaacctaattgcacttaccatatttacacacacgctaacggctacgataatttattttccgaagataggaactaccgtttcttcctcgataaatacaaaaaacacatttaccccatagcaaaaacattggcctattgccttatgcctaatcaccttcacctgttggtgaccatccgggaggagcaagatatgaatgcgcttattaatgaaaagatggcctctggtcatgagtctcctaaaacgataacaggagagtcaatggagcagtacctgtccaaacaatttgccaacctcttcagctcctacacacaagcctataataaaacttaccaccgcaaggggagcctgtttattaaaaacttcaagcgtaaaaaagtcaccaatgagcactatttcttgcggtt

SEQ ID NO: 1519 - DNA, 13463 bp, synthetic construct
  source 1..13463: mol_type = other DNA
  misc_feature 1..13463: note = Synthetic
ctaccaactgagctacactcgcatttttttattgtcccgtaccgggcttgcggggcttaaattagggaaaaagttttatctttcaagtttaaaaattgtaaattttaataaaaaagtttctgggggatttctgcttaactaagcagaagatttatatctctatgatttcccgcagtttaccgacaaaacgtctcactttgcagttaatgacatttttataaaaaactagaacggcttgataattttgatgccggaaaactgattttttaccacttcttcaacagattcttcaaatagaatttttacgtttggaccggcatcaattgtgaaataaattggcaaaccttctgatcggagctgatgaattttatgaattgttgctacagtttccggaagccaatagattaggggagggaatccggacagcattgtcgcatgcatagaacaggcattctgctcagctgtttttcctaaaagctcaaaatctttttcacgaattgcatactcaattttgtctaaatcgtcagcagcctgcttcggccagctttcatataaatgacttgtttcaaccgtctgattcattccattgcgtgaatcaacctttttttcttcggccgtcacttcgacaattccgatgcggagttcatcccatacagtcggtataagttccgcgtatgagtccaacccgttctcattggaacctttgttccactttacaaacccgttataaattgatcggctggcactgccacttcccattcgggctaggacagacatatcttcatttgagagtttaaagccaaagaaatcatttaatgccattgttaacgccgcaaagcctgatgccgaagaggcaagacctgccgccgtcggaatactattaaaagtcaatatcttcaagtttagatcgtttgacggtcgaataagatccacaaaatcaataactcgtctataaaagcgtgattcagggcttacacgttcgttatttagaaacacttcatcaaagtgattatctgaaagttttatttcggtcgcggttcccaaatcagcaagcgatacggataaactgctgttaattggcaggttcagttctctgtcacgtttcccccaatatttacaaagagcaatattacttggggcaaatgcgctacccatttcctttaaattcagttcagaattacgaagtatcgcttttacagtgtcttttttagtaaacataataaacaactccttccggggcaatatttacatcgattttgcttccaaccgttaacttgtggtcaattttccccagactgattatacagtctcctaaacccgaaccactgatttttgttccatagatatcaggaagagttcttacgttataagcaattcgagcgagtttctgatcacacactcccaacgcgtccattaacccatgatagaagttaaacagtttcccggtttttccccagtcaccttcttttagagactgctcaacctcttcggtcgtctttcccatcattttataaagtcgatcatagagctcgggaaaaaactcacgtttctgctccaccacttcaatcactttgtgagtccgcattttgtaaccacagtagaccagatctatcggcggaagcggacattcgagtggaagcacatgacgacgttcgtctttccgtattttgagcgaaactatacctccatatacagacgcggcgaggtcgcttccggaaccgttgccctggacgcttaaaacgcactgaacggattgatggaatattttgttatgagaaaatttatgacctttgaaaatggtcagagctgtgcaggttgccacagttactgcggcagaagatccaagtccaacctgatgggaaaattgtgattctatgactaaatcaaacccttttttaggttgcagtagatttaccgcggcgataataaactgaaacacatcatgcggttcaggttcatggatagaacttttatatttcccaagagaagattttatagaaaactgttcgtcagttcgcggagtcaactttacagtcataaacttatcaacggcacatgcaatggatttatacccgttaagcacggcatgttctccgcaaatcattaatgaaccgggagctgtgacttctattgttttcatgacattatttagatgctaagattttgtagccgaactcttcgcaaacttgttcaggagacttctcggaaaaaatcacgccaattccgccgttatcccctttaattgatccggcaccgcagattttaaatgcaccacctgtattttcttcaaccttttgagcaaactccataagcttctgcggaacaactccaatcttcttaagcagtagattgttagttttaattaaggccacagtttgatcaattcgcccacgttccaatgcatcacgtaatttatcagtaaccgacgcgaactgacggcgaagcgtacttccaaaaagctgattacagaacagttctttaaccgaactaacacattcaccagtggtggattcaggctttccagtgtcaatcagatactgtttaagaggagtttctttaaagtttaatgtagcaactctaccgtcatggtaataagtcgtctgattatttataatggttgcaggatcaatgccgctacttcttccatgttgcaggttttcgattttacgagcaagacggaagatttcgacatctgacataatcaaagaaaactcttcgcgtatcaacttaattacagcgataatcgtcgccgctgatgagcccattccagagtttaaagggatctcagaactgattgaaatttcacccccataaggaaaacgaaacttctcgttcatatggtgaaaaatgtgaaaaacaatatcagatggttttgaaagaatctgatgtgcttctaattcaccattctggaattttataagattagctagattgcgaagataaagtgaacgaacttcgccaaaatcaagggtttcagaatagtcaaaatctttgagagtcacctttaacttttgtggtgtaaaaggtgagaaagaagctttgagaaaaatgtcgcaaggagtggcgattgccggacagccatgcacaactgcatgttcccctgaaatgataaattttcctggtacgttaatttctatcgttcgcattttgaatatacacggtaatgatctttgatttcagccagacgaaacattcccctcgtttcgtgttcgagttggaatgtactgccatcttgaggcagtttaaattgataaaagcgtaaatattctgaaaaggaaagctctgttcggttcagcaactgcgctttatgagcctcagtgtgaagcttttctttataaccttcaacaacagttccgtagaaaaactcaccgacacaccctgaaccaaagctgaaaagagcgactttctgtccggtcaaatcagtctcggaattatcaagaagtgagcaaagtgcaatgtaaatcgatgcagtgtagctgttgccgatttctttgttgtaaatcaagatcgggtcaagctgtttcaacagttcctctttaggcttctctgtttttgcagatttagccacctttagatgtgcttttactcccattgtagagaatggaaggtggtagcaaaaattatcaatttcatcaaaagctacacccgacttttcagtcagttgagcaaatgctttttttgctgctttgatatacacaagggtagaatattttccatcaacaaccggagtctgacggtagttaggtcgccagaagtcatgagaactttctgtatgaatgccggtttttggagaaagctcaagaatggacgggttggctgaaatcaggattgcaactgcaccgcaaccctgagtcggttcgccgggagaatctaaatcatatttagcaatatccgacataatcagtagaacttgttcttccggatttcgttcaacaagcgcacacgccatctgaacacctgctgtcccggagtagcacgcctgtttaagttcaacggcacgagttgttgaaggcatccccaacagttcgtgaacaaagattgacgcggcttttgattgatcaactccagtttcagtagcaagcataatggtactgattttacttttgtcgcaattttgtacaattggatatgccgcgtttgccgccatagttacaatatcttcatccggcgaaggaaaagacatacgttcctgcccaattccaatcttaaacttatcagaatcaactccgcgctctttggcaagttcttccagattgaggtaaaaatcagatgtgtaaaaattgatggcatcaataccgacttttgtcattataaacccttgttgaacaatatattaaaatttgattagatagcacgttagagcatcagagagtttctattcttttctagtgcttcaacattctcagccccaagcagaaacattgtcgttacaaactctcttttaaactggtttatcacttctattacactttcggcagactcagttgccgcttttaaaaatggaagtgcactagagccaatttttgcacctagcaatacagatttagcgagttcaataccacttcgcaagccgccacctgcaataaagttgattttttcagaaaaatgtgagtttaaacgcaggctctccgcagtcgttaagccccaatcctgaaacgcgattcccaaagatcgattctttttaccacgaaatgattcgattcgactccaagatgtgcctccacgaccagaaacatcaatgtatttaattccttcattatataaaagagagacatccgcaggactcataccagttcctacctcttttaccaaaatagggaaggggagttctttctgcagagtaccgattttctcagagatattactgaaattggtatcaccttccggttgaaccgcttcctgaagagggtttaagtggagaaaaagtccatcagccccaatcatttcaacagcctctttgcactctttagcaccgaaaccgtagtttagctgaaccgcaccgatgttaccacaaatgggaattgttggtgctagattacgaagttgaaatgaactcactgctttcggatttgaaaacattactctctgagaaccgactgctaacgccacttgacactcttctgcagcaatcgcaaggttcctattaatacgctgaacaagagcgtcttctcctcctgtcatagatgagataagaaatggaaacgaaatctttttacctaaaaatgtagtggaaggatcaatctggtccaaatcaagctggggtagggcacggtgaattaaccgaattgaatcataatcactttgatggcgatccacatccgaatcattcaacacaatgttaatatgctcagtttttcgattgtttatctgctcatccatcaactcttcctttcaagttttagatgcgtcgccattagttccccaggattggtctgagccgccattagagaaagttcaccacaaagtacatttgctgcacaaatcgccgctaaacgtcgtccattctctcccggctcacgtgcttcacggcaaccgataagttgaaggttttcgtcaacaaaatccaaacctttaccattgccgacacttcccacaatcaaattcggtaaagtacaagaaaaatataaatctccaccgcggacttccgcatgagtcacaccctgcgaaccttctacgatattggcagcatcctgacctgttgcaagataaaacgctagcagcatattcgcataatgtgcattggcacttcgtaacccaccggccataatggtcccgatcagattcttcttaatattcaaatcgacaatcttttcaggagtcgtatgtaaccgtttttcacagacttcacgcggaatcaaaatttcagtaaccacattctttccacgccccaaaattccgtttaccgcagtcgcttttttatcagaacagtaattaccggaaatcgagcagtatttcagatcagaatagttctcaagaatccatggaaacagcttgtccgccgcattcgtcaccatattatgacccgacgcgtcaccagtagtaaactctagacgcagatagagcaggttaccggcaatctgataattgatattaatcagtttagcaaaccgactgctttgcgataccacttcattaagttcagaaagacgttgtttaagctcattaccagctttaagcgcggcaccggcatcagtagcctcaagcagaatactacgtgtcatgcgttcatcgactacagtgaccttaataccacctgaaagtcgagagatcaaagccccgcgaccaaccgacggccaaagcggagtttcataagttgccaaaggaatcagaaccttttcattatcaattgtattacccgtaatcaaaacaggtccgacagttcgcataggaattggtgcgggtttaacgcgagacatttgtcctcccaaaagcgctgaaatattcagcaaaattcattatatcaattttctcatttttgagtcaagatagtcaaagtaggctcgatttttcaattcaccaacagttctacataaaaaaagctcatttcaatccctcctaaagcaaacattcacgggtcacacttataaaaggatgctctattccagcgcaaattcagttaatagaacaaatgtaatccgacagtatagttttatataattgaaacaatctctatcagactggtagagattttaataaaagcacaaaaaagtatttttaagtttgattaaagcaaactccctgttattttgcttgtactaaaatcattaaacagtttacagaatttatacaggagaacaaaaatgggcaaattgacactaggcctagatttaggcacaaacagcatcggctgggctgttgttgaaaatagtaatggagagttcaaactaaaagaaaaaggtgtgcgtatttttcaagaaggcgtgaaaattgaaaaaggcattgaaagttctaaagcagcagaacgtacagcatacagatccgcacggcgtttgaagtaccggagaaaacttcgcaaaattgaaactcttaaagttttatctgaatatggattttgtccaaagttgactgaagaagagttagatggttggagatatgacaaagtttaccctacaaatcaagaattccggcattggtggatgacagataatcaagacagtgaagctgagcgtttagaacaacggaagaatccatattattaccgttttttagcagttacaaaaaagttagacctttccacatataataatcgtttgaaaattggtcgagccttttatcaccttgtccaacgtcgcggttttttgagcaatcgactagactcaactccagaaaaagactcagggactgttaagactgcaattgcggagttacagacaaagaaagatgggagaactttaggtcactacttttacgaagacttatatttaaaaggacaaaagattcgtgaccactacacacatcgtgaagatgattatttggacgaatttaatcgtatctgtgaattccagggaattgacaaggttgttcaagaaaaactgcaaaaagctattttttatcaaagaccactgaaatcacagaaaggcttaattggcaagtgtgtgttcgagaaaaataaaccgcgttgtgcagtctcacgacctgaattcgaagagtatcgtatgctttgctttgttaataatattaagataaaaacaccaaatgatgaaaaactccgttctttaaattcagaagagcgttcaaaaatcattccacgtttcttcttacaacgtgaccattttgattttgaggatatagccaaacagttagcaccaaagaaacgctatagtttttataaaagtaaaaatcaaaatgattatctgttcaactactcaatgaaaacaacggttagtggttgtcccgtttcggctcgcttaaaagatatttttggtaatgattatatgaatgttaattttgaattcattcgccaaaaggatggaaagaaatcaatgatgacagttgatgacatttggcatgtccttcaaacttttgactcaacggtaaagctaaaagagtttgcaattgaaaaactgagcttatcggaagaactagcagagaaatttacaaaaattaagctgaaacaggattttgcatcattaagcttaaaggcaataaagaaaattctaccatttttgcgtgaagggttggtctattcccacgctgtattccttggaaatatcgagacgattattaaaagtcaatttaatggtaaaatgtttagtttagacagcaaagatgttataacaaatttaaaagaagagttaaaacgcattttcagaattatcgataataagaataccgcaataaatgtggctaatggatttataagtaaaatacgaaactatcagattaaacctaatgatgtgagttatgatagtatcaatttagaactcgaagcggttcatggagaacgaagatgggaacgtctcggagagtctattagaaatagaatcatacaagatgttgataagttaattggagatgcatcatcaacgcgttggagttttcataagccgattacaaaagaagatatggtatgggaatttttggctgacaaatacaaaataaaaagaacgaaagggatattgtatcacccatctgcaatagaaacatataaagatgcacagcctggaaaagatgggaaattatatctaggtagtccaatggtttcctctgtacgaaatccaatggcaatgagggccttacatcaattgagaaaagttgttaatgaactcatcaagcagaatatcattagtcccgacacagcaattaacatcgaaatgtcacgtgggcttttaaactcaaatgaaagacaaggtttgaaacgctggcagaatgaacgtgaaaaagaccgtaaagaatatgctaaactgatacaagaacactatgatgccaacagtttggatatagtgccttctgaaacagatattttaaaatatcaactatggatagagcagggggaacattgtatttacacgggcgagcaaatttctctttctgaattcttaggcgctaaccctaagtacgacatagaacatacaattccacgtagtcagtcatttgataactcgcaggcaaataaaacgttatgctgtgcgaagttcaataggcaaataaaaaagaatagaatcccatttcaattgacaaatcatgatgaagttctagagcgcattaagccatggcagaatagaattgacgaattgaacaagttgatagaaaagtgtgtaaaagcatcaaaaggtgcagcggataaaaaccaaaaagatagtgctattcaaaaacgtcacaaactaacctatgaacgaaactacctgcgagataaatgtcgtcgattcacaatggaagaagtccctcaaggatttaaaaatagtcaaaaagttgatataggaatcatcacaaaatattcacgcctttacttaaaaacattgttcaaaaaagtctatactgttaaaggttctactgttgctgactttcgaaagatgtgggggcttcaagataattactccaagaaagagcgtataaatcatgtgcatcattgtatcgatgcaattacaatggcgtgcatgactaaatccaattatgaactgttggcaaagttttatcatgactgggaggagttgtatcaggctggagcagatgcaaagcctaaagttcgtaaaccatgggatagttttgtccaagatataaagagagtagaagatgaaatattagtatctcattacaccccggataatttacctaaaaaggcgaagaaaattcttcgaaaacgcggaaaaaaacaaaaaaatgacaaaggtgaatttatttatcaaaaaggtgactcagttcggggaagcctgcacaaagacactttctatggggcgattgaaagaaaagctataaacaaaaagacaggagaagaagagaaaataataaagtatgtggtgagaaagtctattgaaggtttagaaacgtcagcattaaaaaatattgttgatgaccgcgtcagagaaattgtcgtgaatgctcgagacaaagaaaagcaactaaaaaaagagattgaccagttattgaaagagcgtaaaaaagcagatgaatcacaagagcaaatcatagataaacaagtaaatgaaatcaaagaacggatgacactactttattgtatgccaaacaaaaatggttctcctattccaataaagaaggttagactatatcaacctacagtaaccaatcccctccatatcaaaaaacagcgtgataaagtacgcagtggtaaacgaaaagagtataaggaatcttaccacgttaccaatgatgggaattacctcatggcaatatatgaggggaaagacaaaaatggtaaattgaaacgggacttcgaattgatcaataatattgattccgctagtttctatactcagaaaaataatgataaaagcatagctcctataacgaaatctggacttactttaagagccatgattaaagctggtcaattagtcttattttgggaggatgaacctgaagagctttattcgttgccaagaaaagaacaggttaaacgtttatacaaagttattgcctttgaagcggacggacggattcagtttcgctatcaacaaactgcgatgcaacagagcagtacgaataaagaggagatgactattacaaaatttatgaaggagaatgctatttctaactcttttattgactttgttaatccaaaactttggttgagactaagaagagctagttggaattttcttgttgaaaatattgactttagaatttcaccaattggagagattgaaaggatttaattatgcttaagcggacgatttttgttaccaacccaatgtatcttcatcttaaagataaacagatggttattgagtcacgggacaaaaattttaagaaaacagttcctgttgaagatattgggtttgtggttttggaaaacccgcagattattgccacaattccactactaaatgctctaaatgagaacaatgcggtaacgattttttgtgataaaagtcacatgccgaacgccattatgcaaccattagcgtcacattcaacacattccgaaaccctgtccgcacagattaactgctccattccactgaagaagcaactttggaagaaagttgtggaaataaagattaaaaatcaggcggctttattggctaaactcagtaagaaaaacgaaagtaagctgtttcgtttgagtaagaatgtaaaaagtggtgatattgaaaatagagaagggcaggcggcacgaatctactggtcgtccttatttgaggatattgagtttcaacgtgaacgcttcggtgagcaacctaatagcctgttaaactatggatatgctatagttcgagctgctgtagcaagatcactggtaggttcaggtcttctttgtgcaattggtattcatcatcataatcgatataatgcattttgtctggcggatgatatgattgaaccgtttcgcccgtgtgtagatgaggcggtttactattgttacaaagaaaatcctaacctattagatctgacaacagaagtaaaaaagaaattactaaatgtgttgacagttgatatggattttaaaggtatgaaaacgccgttaatgaatgcactgagtcgtacgacggcatcattgatgcgaagttttataaatagtaaaaatgagctggagctacctgagctcctttaatagagtaggggaaatagtaaatccaccgctatgaggtggacaatgctaaaaaatctatgcaacaacaatcaacagttctaaatgcgtacagaattatgtggatatttgtattttttgacttaccgacaaatacgaaacgcgaacgcaaagccgcttcacgctttcgtaaagaccttttgcaggacggatttgtcatgatgcaatattctgtttatgtgcgccattgtccaagtcgggaaaatgctaacatgcacataagtcgtattaatagactgattccgcataaaggcaacgtatcgatattgacggtaacagataaacagtatggtaacattgtaaactttattggtaaaaagcctgttgaagtagagcatgcccccatgcagttagaacttttttgaaaatttttattacgatctttgacaactgaatatttttctatattttaagagcagtgaacaagttctgttatcttttcacaataaggctatatgccgaaggaatattttcctatagctctgcttcggtagagcttttctttttttagagattttactctgaaaactcttcataccatcattttttttctgctatctcccacagatcttgaactcaaaggttgtggattgataacagaacagacctttttacaactactttaacttacatcatgtttgctgtgttgttgtggattgataacagaacagacctttttacaactcccttgtgatttagtttattgattacaaggttgtggattgataacagaacagacctttttacaacaacgccgctgtgtggattagattggtgattgttgtggattgataaccagcccgtaacatgcaccaaaatgacacaagtttaataaaatagattccatattggaacttttaagcaggaagacaagagagatttgaatatatggaaaaatcacttaatgaaagcttttgcgctttgattggctcaaaaggaattggtccaaagttactttcagagctttttgtaattcctaattctacaacgaggaagtggtcttcaggtaattctctacctccagactatgtaaaaaagcttattatggaggcactatttactaaattttctaacggagaactagaacgcagtatccttaaagggaaagctgtcagcgtttttatggataggcattttaacggtcattggtagttatcagtgtaaagagtagggtagttgctgcattttgtagtaaagtgtttttaactgtaaaacaggcagggggaaaggttttaaaacgaatgcttctcgatcgcaccgatcgagcggcgtgaagcgaggagagtcgacgaaagcagtagttttaaatgggggacatattgtgattaagtttaaactttacgcacagaggcaaaaaagagcgctagacagcagtaaggtctagcggtgtccgttaggagcataaaaagttttcccattttttaaaaatggtatcgcgcgtccattagttagttttagaaccattaactctggcacggcatccattaagtcggggaagctttgctattattccttgccgtaaccgcctgtattacgtattttgttaattggttgtttacggttatgctttgatgtggttagcttcttgatatagtattaaatgttaacataattcaatccaggcttttataccggctccggaatatgttaacattagtgtgacacatatataacgtcgcataattacaccaaagat

SEQ ID NO: 1520 - DNA, 13043 bp, synthetic construct
  misc_feature 1..13043: note = Synthetic
  source 1..13043: mol_type = other DNA
gaagtgcttttttctgcacgctttcaagttgaatataggcatgtaaaaacataccgggcatcaatactatttccgaatcatttgaaagttgagcaaatactttaaccgtgcgattgtaggcatctatctcgcgtccgattgcctgaatatttcccttgatcggtatatgatgattttcaggtaaataagccaatagagaggattcctgcttcagtttatgaacatctttttcaaaaacatccagctttaagcgtagcttgctcaggtcaaccaaacgcatcaactggtcttcgggattgacccactggcctttgcggcagctgatgtcagtgatatgtccatccattaaagccttgatttccagcgcagcgcttatttgatgtgcatcaactttttcgggatcaatctgaatcaacctgaggttttcggccagcgcttgttgcattgccactgccgaaaggtaagcggcttctgccatttgcagttcgctggtggaggcaatttgatcttcggccaggtttttcttgcgcatccactgctctctgagtttgttcacttcaaagccggcttccaaataggcacgctgcatttcaacaaattccgggttttcgagcttcaccaaggtttgtcctttgtgcactttttgtccggtttcaacattgatttccagtattcgtccgcctttcagactgtttaccagctgttcgctgtttggagatgtttcgaggtagccgttggcattcacctgctgactaaatttttgggttgtgatgaaacccaattgtgcattcgtctccttgatttgttcagccgtaagctcaatcaaatcattctctgcaaaactgatatcagtcgtttgcgaatcgcaggagacgagtgccatacttagtatccaaaagcctaaaaatgctaaattattcgttttaaatttcattgtactatggtgtaaaatagttgattgataacactatacgattgtactcatgtagccattcgagctggctttggcggatgcgaatcgattcgcgcatcagctgtaaataggcaagcatacttatttcgccttgctccaggcttttcacagctgtagtttgtagttcgttagccagtggctgccattcgttggtgtagctgtcgaggttagccgctgcctgctccagttggctgtatagctgatccagttcttgtttccagaaaaacttaaggcgttcttgttctgctgtcagaatttcggtttgtatgcgtgcagatttgttctgggcatgttgaccaaagaaaagcaaaggaaggtcgattcctacctgaaaaccattgtaaacttttgaatttgcacacgcatttgttccggtgaaatattccagttgtaggtcaggaagcatctgccttcgactgagtttatgttgttgctcactgataagcaggtctttgtcgagtaagccataccaggaagccgactggcttgaatcaattagcacaagtggcttgtatcctgtttcaacgggtagaaatagggagtcagtctgcatgagcgaggccagttgctgctgtgccaaaatgagatttttgttgatcagttgaagctgattttcgatttcggaacggccggcacgcgcctgcagcagttcaacacgggtgctttctccgctttctacccgcttttgcacggcatattgtaattgttggtataagctgtcgagctgatgaaaatggtgctgaaggttcaactgatacaggaggtcgtaataggccagtgacacctctttttgtagtctttttttcgtgagatcatacgtcaaaagctgtttatcggtttccaatccggcaagcttgatttttccgctataaacacccggaaaggcaaaactctgctgaatgccccatattttaagcggaagaccattatcggcgatattattttggtcgtaattgtaataaattcccgttttagggaaatcgaaagcggctgttttgcccagccttgcctgatctacacttaatgcagcagcttttaatccggcatggcgttcaatgcttttttgcatggcttgctccaagctgattttttcctgactctgagcttgccatggtaaagcaaacaacgaaagcagtaaaagcattattgcagtatttttcatggcaggaagttcaagttttttacgttcaaaaagacaaaatagtaccggcaaaacaatgagcgtgagtaatgtagccgttatcaaaccgccaacgactaccgttgcaagcggacgctgtacttctgcaccggcagaggtggaaaccgccatcggcaaaaagcccagcgctgcagctgaggcggttaacaacaccggccgcaagcgttcggaagtgcctttgatgatgagttcccgcacagatttaatgctgttgtctttttgtaattctttgaaatgttcgatgagcacaatgccgttgagtaccgcaataccaaataaagcaatgaaacctattcctgcagaaatactaaatggcatatcacggatatacagcaataaaataccaccaactgccgatagcggaatggcagtgtaaacgagcagggcttcgcgcaacgaattaaatgccagatgcaacaatacaaagatgagcagtaaagcaataggaacggcaatcatcagacgattgcgcgccgaacgcaaattttcgaactgcccaccgtaagtgatggcatagcctggtggcagatcgatatgttgatcaatcaaagcatgcacatcgtcaaccactgactctaaatctcttccacgcacgttaatacccactacaatacgtctgcgggtgtcgtcgcgcgatattttggccggacctttcgaaaagtttacttcggcaacttcacgtaaaggaacctgatggccgtcgggcatgggaatgaaggtgttgcgtaggttctcgatatcgtttctgtaatcattttgataacggattaccaaatcgaagcgtttttcaccttcaaatatttcacctgcctttaaaccagcaaaggccatcgaaataaccctgtttacatcatcaaccgttaagccatatagagccagtttattcaggtcgtaatttaccgtcatttcgggcaagcccgccactttttccaccaccacatccgatgctccttctaccggggtgatgagggatttgatgcgttgtgccagttggctgagctggttgaggtcttcaccaaaaatcttgatggcaacatctgctcttgtgccagtgatcagttcgttgaaccgcatttcgatgggttgggtaaattcatagtcgattcccggaatgaccgaaagtgcttccttgaaacgattggccagttcatctttgctgtcggccgtaacccattcggaaggcggcttaagggttatgattatatcgctttcttccatcgacatggggtcggtagggacttcggcagcaccaatgcggctgacaacctgttttacctcgggaaatgttttcaggatctcttccatccttgtggttagcgcaatagtactgctgagtgtggttccggttttcagcactggctgaatcacaaaatcgccttcatccaaagtgggaataaactcgccacccatcctgctgaagatgaagatggaaacacctaataaaagtaccgtaagacttaatactatttttttgttcgaaagagcccagcttattgaaggctcatacattttattcaggaaagcaatcagatgtgtagaaatatttttttgttttttggccggcttcaggaaaatggacgacatcaccggcacatacgtaaagcccaaaaacatcgttcccagcagtgcaaaagtaaacacctgtgccataggcgtaaacatcttgccttcgattcctgataaggataaaatgggaatgaaaacgataatgataatcaattggccaaaaagtgctgaacgggttaatttacctgctccatccagggtgattttgtcgattagttgttgctgttctatcccacttgttttaagaattttgtctctgttcttgctgatttgaaatgcaataaattcaacaataatcactgcaccgtcgatgataatcccgaagtcgatggcgccgaggctcatcaggttggcatccacatcaaaaaggtacatcatgctgagggcaaagagcagactgagtggaattacggaggctacaacaagaccggatcgcatatttccgagcagcaaaaccactacaaaaattacgatcaaacagcccaggatcaggttttcggcaattgtattggtggtttttttgatcagctcgctgcgctccagaaatccgttgatatgtatgccttcgggaaggcttttctgcacctcggctacacgttctttaacgtccctgatcacttcatccgaattggctcctttgagcatcatcacctgtccaagcactttttcgccctcgccattggctgtaatggcgccaaaacgggtagcatggccaaattgcaccactgcaatatctttcacacggatgatcacaccgtctctgttacgcaccacaatgttttcaagatcttcaaccgaactagccaaaccttcaccccgaatgaaataactctgattttgtttttcgatatacccacctcccactacggagttattggtttcgagggcgctataaacctcgccaatgctgatatccatcgcgtggagcacttcgggatttacggccacttcatattgctttagaaaaccaccccatgtattcacttctaccacacccgggattcctgaaagctgccggcgcactatccagtcctgaatggtgcgaagttcgctaacagaataaacgtctttgtaagctggttccacttcgaggatgtattgataaatttcaccaagccctgtagagattggccccataaaaggtttgccaaaacctgccggaatgttttcagcggcaacttcaagttgttcggtaatcaattgccttggcagataagtccccatatcgtcttcaaaaaccagcgtaacgacagataatccaaacttggaaatagagcgaatctctatcagcccgggcaaattagccatcgacaattcaacgggataggtgataaaacgttctacatccagggtagaaagattgcgtgaagtggtgattacctgcacctgattgttcgttacatcaggcacggcaccaatgggaatatgagttagcgaaaacagcccgaaaccagccatggtggctgtgatgagtaaaacaatgagtttgtttttcaggcttaagcgaataatggtttgaagcataacgctttgtatattggtttagataaattcattaggacaggtaaaattaagtaaactttcatagaagtcacaataccaaaaaaaggcttcccggttgattgttaaattcctctgtttctaaacagcagattaaagaaaaccaatactttaatactatcggcttttcagatttctctttgtagtttaatgaaatgaattacctttgccgctcatttccaatacattttatgcctacatttaacgatctcgggttgaagcccgaacttttaaaagccgtctcaacactcggctttaatgaacctatgcctattcaggctgccgtaatccccgaattgattcaaactcccactgatttggtaggacttgctcagaccggaaccggaaaaacagcggctttcgggctgccattgctgcatcatattgatagcaatagggcagaaacacaagcgctgattttatgtccaacccgtgagctctgcgtgcagatcacacgcgatttggacagttttgcgcagtttcttccgtctgtaaaaattacagctatttacggtggtgccagtatcgagggccagataaaatctttacaaaaaaatcctcagatcgtagtggccactcctggtcgcctgcaagacatgatgcgtcgtcgtaagattgatatgacgaaaataagctgggtcgtactcgatgaagccgatgagatgcttgatatgggttttcaggaagaagttgatgccattttgtcgtcagtacccgacgagcgcaatattttacttttctcggcaacaatgccggcaattgtcgaaagcatcctggcccgatatatgaaaagcccggttgtaaaatcgatggggaaacgtaacgcaggaacagctaatgtgcgacacagctattacctggtgcatgccaaagaccgctataaagccctcaagcgcattgtagattttcatcctgccgtttatgggatagttttttgtcgcacacgtgccgaaacccaggagattgctgatcaactgatcaacgatggatacaatgcaggtgcattgcatggcgatctttcgcaggcacagcgcgatcatgtgatgaatcacttccgcgaaggaaaccttcagatacttgttgctactgatgttgcagctcgtgggctggatgtgaacaacctcacgcatgtgatcaactacagcctgcccgatgagcccgaaacctatgtgcatcgtagtggccgtacaggccgtgccgataaaaccggtgtgtgcatcagcctgatacatatgcgcgaaaagggtaggataaggcaaatcgaaaaacagctttcgcaaccgattgcccaggcgaaaataccaacaggcatgcaggtgtgcgagaaacagcttttcaattatatcgacagactcgaaaatgttgaagtaaatcatgaagaggttgatgcctatctgccagtagtgtttcgcaagctggagtggatgtcgcgcgaggaattgatcaaacgctttgtatcactggcttttaatcgtttcctggattattatcgtgatgctcaggatttgaatgtggacgaaagtcgtagccgctatgaagatgaaagacctggcagaggtaagaaacaatccttccgcgaacgcagtggcggacaagaatcgggctttacaaaattatttttcagcctcggcaaaaaagataaaatcaaacccaataacctcattggcctcatcaatcaggtgacccgctcgcgtgatgtgcgtattggtcatataaagctgatggataacttttcttttgtagatattgatgaccaaagtgttgagcttgtaatgggtgcttttgccaataaaaaactcaatcccgacaaggttcgcgttgaacgcgccagtgagcgggatatgtcttcgggtgcttcaagtaagtcttcagggaaatcttcaggttcactttcaggaagaccttcgttcaaaaaagagagaaggaagaaacgttaaagtttgaaagagaattgattggatatatttcagaccttcaaggttttaaaaaccttgaaggtctgaatattttattggacaatagaattgttttttgtgaaaaccttttatatttatccaatatttacttatttccaacctaaaacaacagaaaatgacttccagcgtagtaccattggaatacggcaggttttaccacatctataaccgtggaatcaatggttgcaacctgtttcaggaaaatgaaaactatgattatttcatgcgtttatatggcaaatatatttcgctggtagcagacacatttgcctgggtattgatgcggaatcattttcattttttggtacgaatcaaaaacgaggaagaaatttcttttatgggtaaccaccagacacccgaaggttttgaaaacacttcggggtcagtgataaacctttcggtgtctgacagacccgaaagtgtttcaaatcctaaaagattaataaaaaaatataagccagttaatcaattttcctatcttttcaacgcctacaccaaagccattaacaaacgatatcaccgcacaggtagtttatttgaacatcctttcagacggatacagatcacctcaaaagatcaattactttatatgatttattatatccatcacaacccaattcatcatggtttttgtaagcattttctggaatatccctggagttcatacctgaccattttatcgccggaaaaaacaaatttaaaacgagatgaagtgctcaggtggttttatgataaagcgtattttaaagagttccattgcaaggaacaaattgaaaaatatgatgaattgcagatcaattctatttttgatttctagatcttcaaggttttcaaaaccttgaatggctgtgcatataaaaaaactcccaccgaagcaggagtataggatttatatccttcggcatgccgaggcaatcggtagccttattgtgataagatataaaaatggtttcctttttattctaaggaacaaatgtaattgtattttctgaaaatttcatatatttatccaatattttttattaccaacctaaacaactggaaatgactaaaatcttagggcttgatctaggcacaaatagcattgggtgggctgttgtggaaaaagaacgcgatcacgaatttcaactcatttctaaaggcgttcgtgtttttcaggaaggcgttaaaattgaaaaaggacaagaaagttcaaaagctgcagaaaggacaggttttcgaagtgcacggagattaaaataccgcagaaagctgcgtaaaattgaaacgcttaaagtgctgtcggaatatggttattgtcctcgactaacaaaagaagagttagacctgtggcgatacaaaaggatttatcctcaaaacattagttttcgtaattggtggctaaccgatgaagacgctgaaaaacacccctatttctatcgatatctggcaataacccagcaattggatataaacagggagacagacaaacataagttaggccgtgctttttatcacatggtacaacgccgtggctttctcagcaaccgcctggactcaactcctgaaaatgaaacaggaaaagtaaaaagcagaataaaggaattacaacaaaagaaaggtgataggacacttggccagtatttttatgaagactgttatttaaaaggagaaaaagtcagagaccagtacacaagtagagaagacgattatctggatgaatttaagcgaatttgtgaatttcaaaagattccagaagagatacagaacaaactgcacaaggccattttttaccagcggccattaaagtcgcaaaaaggattgattggtaaatgcgtatttgagccaaccaagccgcgctgtgccgtgtcgcgtccggagtttgaagaataccgcatgctttgctttattaataatattaaaataaagacacctgatgatgaaaagttaaggcctctgaatacggaagaaaggcaaaaaataattccgcaattctttagaaaaagtaaagatcattttgaatttgaagatttagcaaaacaacttgcacctaaaaaacaatacaaatattacagggacaataacaaaaatcctgatgattacctgctgaactattcaatgaaaacaacagttagcggttgccctgtttcagctcgtcttaaagatttattcggtgacaattttatggacatcaagttaccttataaacgggaaaaagacgggaaggaatctgtaattgatattcacgacgtttggcatgtgcttttctcgtatgattcagatgaaaaactaaaagaatttgctacgaaacgactgcttttaacagaagaccaagtcagtgattttctaaaaattcgtctgaaaaaagattacgcttcgttaagcttgaaagccattaataaaatacttccatttcttagggcaggcttactatactcccatgccgtttttttggctaacatggaagaggcaattcctgatgtgatatggaaaaaagaagaaaaccgaacaattataaaagaagaaatcgaaaagattattgcgaatcaccaagaccaaaaacaaatttgcgaaatcgttaacggtattatcaagaacagtcataaggatgaatctgcatggagcgaaagagcttccgaactgttcaaaaaagacttgttcaataaaataaaggtttattttggagagaggacatataattcttttaccgaagaaaagaaaaaccagattgaaacagatgcttttgaactgctgaaaaagcaaatgaaaaagaaaggagggcgaggcgaattcatttccatccaacgtattgaagagaaggttaaatcattccttactgataattttgaggttgaagggaaatctttgaagaaaatttatcatccttccgcgattgacgtttataaaccgccaataagaaaagacgatggtaaacttttcttgggcagcccaatggtttcttctattcgcaatccgatggctatgcgggcactgcaccagttaaggaaagtggttaacgagctaataaaaaatgatgttattaattcagaaacccgtattcatattgagatggcacgcggactgatgaattccaacgaacgaaaagcataccagaactggcaacgagacagggaaaatcagaggaaagcgtatgcacaaaaaataaaagagcatttttcatcggataaagagccttctgaaaccgatattctgaaatatcagctttgggaggagcaaaaccataaatgtatttatacaggtagggaaattgccttaaataaatttcttggttccaatccttctttcgatatcgaacacacaattccccgcagtatatcgcttgataactcacaggaaaacaaaacactttgcgaaaacgagttcaaccgtaaaataaaaaggaatcagattccttatgaattggccaatcattctgaaattcttgcccggatagagcattggaaggaaaagtataaggaattggataaacaaattggtatccaggtcagacgcgcaaaaaatgcagcagacaaaacacaaaaagacagtgcaattcaggcgaggcataaacttaactttgaacgtgattactggctaaacaaacaccgaagatttaccatgaaggatgttcctgaaggattcaaaaacagtcagttggttgacaccggaatcataaccaaatactcgcgcttgtacctgaataccttgttcgacaaggtttatactgtaaagggaagcactgttgctgattttagaaaaatgtggggattacaagacgaatacaaaaagaaagctcgcgttaatcatattcatcactgtattgatgccattaccattgcctgcataacaaaggaagcttacgagaatctcgctaaagcctatcacaaatgggaagaagttgaccgaatgaaaatgtcggatatgcccaaagtaaatccaccttggtcaagttttgttcctgatttgaaggaaatagaaaaagaagtgttgatttcacactccactccggatgtactacctaagcaaacaaaaaagaagcttagagaaaagggtcgaattgttaaaaataaaaaagggaatacaatttatcagcaaggagatactgtaagaggaagcttgcatcaacaaacattttatggtgcgattgaaaaaacggagctgaaaaaaaatggagagtctgaaaaagttattaaatacgttgttcgcaaaccattggactctctggacgattcttccattaaaaacattgttgatgaacggattagggaaatagtaagcaatgcgaaaaaacaagaaaaggaaatacaaaaacaaattgaaaaccttttaaaacaacgcagaaatgctgaagaaaatgaaaaagctgaaattgatgctaatgtagccgaattaatacatcaaatcgcagaactgtattgtttgcctaataaaaatggagattctgttcttataaagaaagttagaatttatcaaagctttgtaaaaaatcctttgcatataaaacaacaacgcgacaaatcgaaaaaattgcctaagcctcataaagaacattttcatgtggttaatgatagcaattatgcaatggctatttatgaaggtaaagatgctaaaaagaaaatcaaaagagattttcaattgctgaataatctggaagcaagcgaattctttaagtattcagttcaaaaggatttaaaagagcagggattaaatcattcgcacaacctcgttcctgataagaaagtagtaggtaaaatggaattgccttttaaagctgtattgaaaattggaacaatggtcattctttgggaaaattcaccagaagaggtttgggatttaactaatactgaaatcaataaaaggatttacaaggtcgttgggttaagtaaccaaagaataaaaaggccatctggtaaaattgatgaatatgcaacaatagtgatgcgacatcacgccgaggcaaaaccatcgacagaactaaaagtaatggacggagtttttaaagttgatgaagagtataaagctttgcgaaaaatgaatcataatcaattcaatgccttaattgaaggtgttgagtttaaaatcaacattattggggatactatgcgaatttgaaggaaacctttaatgtttctagaaccttaaaggtctgaataaaaatagggaatgacttctagagaggtaccattaaattacggcaaattctaccacatttacaaccggggaataaatggtagtaatttgtttcaggaaaatgaaaactatgaatatttcctgcgtttgtatggcaaatacatttcattggtagctgatacttttgcctgggtattgatgcggaatcattttcattttttaataagaattaaatctgttgagcagttaaaccttcaaggttttcaaaaccttgaaggtataaagggaacaaacagaaattttgcaaatcagcagtttgccaatcttttcaacgcctacaccaaagcaattaacaaacgatatcaccgcaccggtagtttatttgaacatcctttcagacggatacagatcacctcaaaagatcaattactttatatgatttattatatccatcacaacccaattcatcatggtttttgtaagcattttctggaatatccctggagttcatacctgaccattttatcgccggaaaaaacaaatttaaaacgagatgaagtgctcaggtggttttatgataaagcgtattttaaagagttccattgcaaggaacaaattgaaaaatatgatgaattgcagatcaattctatttttgatt

SEQ ID NO: 1521 - DNA, 9991 bp, synthetic construct
  misc_feature 1..9991: note = Synthetic
  source 1..9991: mol_type = other DNA
cataagttagggttaaggttaggttgaagaaggagtatccattgggtgctccttttttttgtccactaatttctcgaattaacacgaatgatttactgctgttttagactagttgctaaactggatagattcctaatttgtggaactactctctaactccctaatacaccaactcaccaattaggacattaggcacccacttaaccatgctctttcaatacctcttgttaattgtactttatactgcctataaaaaagaaactcccaccgaggcaggagtataggtttagataccttcggcataaagccttattgtgataagaatctaatgacatcaaacataataaaaaatgttattatgacaaattaacttttgaattattattacatttagtccacaattttataattcaacctttataattcttaactcgattacaacatgggcaaaatattaggactagatttaggtaccaacagtattggttgggcaatagtggaaattgaagatggtatttataaactgctggccaaaggcgtacgcatttttcaggaaggtgttaaaatagaaaaaggaatagaaagctctaaagcggccgaacgcacaggttaccgcagtgccagaagaataaagtaccgcagaaaactacgcaaaatagaagtacttaaagtcttatctgaacaaggctattgcccacccctaagtgaagaagaacttaagctatggcgttataaaaagatttacccgcaaaacaacgcttttaaagaatggtatcttaccgataacgagggtgacattactgaacgtaaagcactaacaaaaaatccttattattatagatatcttgcagctacagaaaagtttgattttactactgaacaggatcgtcatcgttttggccgtgcgatctatcacttagcacaacgacgcggctttttaagtaatcgcttggacagtactccagaaaatgaaaacagtaaagttacctctgccatttcttacctaaacaaattgattaaagcagcagattgtaaaacattgggacaatacttctaccagaaatacctgcaaggggagaaaattagaagtcaatacacccatcgggaagagcattatttaagcgagttcaattttatctgtgaagcacaaaatattccagtggaagttaaaacacttttgtacaaagcgatcttttaccaacgtccgcttaaatcgcaaaaaggtttaattggtaagtgcgtattcgaaaccaataaacagcggtgtgccacttcccgacctgagtttgaagaattcagaatgctttcttttatcaacaacataaaaattaaaactcctgatgatgagaagctgcgtttcttaaatgaggatgaaaagcaaaaaataattccgcaattctttagagtaagtaaagatcatttcgactttatagaccttgcaaaaaaattagccaacgaaaagcagtgtaagttttacaaaagcaaagatgttaatccggaagataccttgtttaactacagcatgaacacaactgttagtggttgcccggtaactgcccgatttaaaagtttgtttggtgatgattatttgaatttagccatctcctacacaagagaaaaagacaataaagaatcgaccattacaatggatgatgtttggcatgtgctaaacacttttgattcgaacgaaaaactagctgaatttgcccaaaagcgtttaggctttgatgatgaccaaataaaatcgtttgtgaacaccaaacttaaaaacgactatgcgtctttaagccttaaagccattaataaaattaaccgctatttaaaagcaggcttaatttattcgcatgctgtctttttggctaatatggagaatgcaataccaaaggagatttggaatgaagaggaaaaccagcgcatcattcaagaagaaattctgcgcatcatagaaactcagaacgaagagaaattaataattgatgttgtgaatggcatcatcaaaacagctaagaacgaaaaatcgacatggagtaatgaagcagctcaactatacaaagaagatatcctaaggcaactaaaagccattatcggccctaaaagatttgcttcatacactcctgaaaaacaaaaccagcttcacaaagatgcctttgcgctgcttgaagagtacatgcctaaaaacaacggcatcggcgaatttataaaggttcaaaccatagatgaacggataaaaggtttcatcagcgataattttaatattgaagcagcttcgttagaaaaactttatcacccatctgccttagatatttacaaagcaccttataaaggcaaggatggtaagtattatttgggcagcccaatggtaacatcggtacgtaacccgatggctatgcgagccatgcatcaattgcgtaaagtaactaacgagctgataaaaaatgagctgatagacaaagacacgaagatccacattgaaatggctcgcgatttaatgaatgccaacgaaagagccgggcttaaaaactaccagaaagcacgagagaaccaacgagaatcttaccgcaaagctattaccgaacattttgaagaacaaaatataaaagcagacccaagcgaagacgacattcttaagtatcaactatgggaagagcaaaaaagagtgtgcctatataccggcgatcctattgctctaagcgattttataggtgccgaccctaaatacgatatcgaacataccatccctcgcagtttatcgtttaacgactcgcaagagaacaaaacgctttgtgaaggtgtgtttaatcgcaaaattaaacgcaataaaataccaagtgaattagctaaccattctgaaatactagaacgaattacgcattggaaagaggaatacgagaaggtagacaaactaattagcatacaagctaaaaaagccaaaactgctttcgacaaaaatcaaaaagataaggccatacaagaaaggcacaaacttaccctcgaacgtaattacctgcgaaataaatacaccagctttgctcgcctggatgtaccaagcggttttaaaaacagccaattggtagataccggaatcattaccaagtatgcccgtttatatctgcaaagtttatttaacaaagtatataccgtaaaaggaaatacggtagctgactttagaaaatgctggggcttacaagataattactcgaagaaagcccgagtaaaccacgtacatcattgcattgatgccataaccattgcctgtatgagcaagcagaattacgagttattggcaaaacattaccacgacatggaagacagttttgtaaagaacaacgagaagaaacctttcttcccgaagccttggaaaacatttacggaagacatcaaaaatattgaaaacgaaattttagtatcgcatcatacaccggataatctgcctaagcaaagcaaacgcattttacgaaaaggcgggaaaaagcaatacgatcagaccgggaaagaaattttcttaaaaggtgatacggtacgaggaagtttacacaaggacactttttatggtgccatcatacaaaaaaataaaaacagcaacggaaaaacagagacagtcaccaaatatgtaaaaagagaatggctagaccctcttaacgacacacagcttaaaaacattgtggacgatcgaatccgagagatcgtaagcaatggcagaaaagagcaaaaactcctcgaaaaaagcattgctaagcttaaggctcaactaacaaaggcagaagagcacgaagaaccggcaattaaagcttctatcgaaggtctaaaaaacgacattactaacatctactgtttgccaaataaaaatggtgcacctattccaattaagaaagtaagggtatatcagccatcagtcagtagtccaattattttaaataaaaaacagcgagacgttaacagccgaaaccctaaacctcataaagaaaattactacgtggtaaatgatggcaactacctaatggctatttacgatggtaccgatgctaaagggatggtaaaacgagactataaactcattaataatctagaaggtggtgacttctttaagaaatcgaccaaggacacacttctgccacaaaataagcatacgataaatgaccttattaatagtgggcttgatgatgatgtaactatcaaatacgttttaaagcaagggcaatcggctttattatacacagaaagccctgatgaattatgggaaatgaacaaccacgaattgggacaaagactgtacgtgattcgtggtttagataaggatggaataaaactgtattatcatcaggaagctcgccctactactgatgtaataaaatttatgaatgaagtaatagataccggctatcgtaacgaatgtaaaattgacactaaaaaaacctcatcgttattaaagtctttagggattaaaatctctgataaagaaattaacactatagcaaaagaatccaacggaaaatacttagtattgaataacgatggcgaaaccttggctactctcgatgaaattgatagcctattaaaaaccagtaaactttctactcctaaaggtggtgatgttatcggacgaaaagacgagtttccatacatcaagtttaaagctggtaactttaaggcgctagtagaaggtgtagatttcgaactggatacactcggccaaatcacccgcctcaattaataatcaaaaaaaactcaccccaacatactaatcagtaggttggggcgttttacttgatgagaacaacctacaaaaccctaaaaaaatgaaaaccaccaccgtaacaaagcactcaacagccagcggttcacatcagcgatacaagacttcaacctacgcatctgctcccaacggccaaacaactgcaacacggtagcaatcggttcatgtaaggagctaaactgctacggctaccatgcgaacagcaacaaccatcggcaaaacagcggatgatcttcagcgaaaagcacctgtatggcttgccaatagatttcgcttgatgacaattgcacttcgccattgtgcataagcacttccgccccttacagatgatctttgccggcttacatgagcatttcgcgatttacctattgaatttttatttaatcacccataaaatttgaaaaaaatgaatcaatctaaaatgaccattcctgagttactaagggcttgctctgctcgcattaacaacaccattaacgacgctacaattttaaactacgtaagcctctttggctacacatccgaacgaatggagcaaggcaagcaactcctgaatgccggtgaatccttatgtattaaatttgaaaaagaacatggagaagtcgccggagcttacgatacaaggaatcaaaaacaagaaacagcagacaaacattatcaacaaataaaggccatctgtaatgttgctttaaagaatgacaaaacggctaccatcgccttattattaaataaaaaaacgccacgcaccttaagcggatggttaaatcacaccaggtctttttacaacaacctattgtccaatcaaagttggatagatgctttggctctttttaacatcaatgcagaaaccatcaaccaaggcttacagtctattaaagaagtggagcaatatgccgatgtaattttacgcgaaaagggcgatgctcaacaagctaccaaagaccgcgatgcagccatcgacgagctggctgagtgggtaagcgattacgagtcgattgctaagctagccctagtagacaaaccccagttattagaaaaattaggcattgtagttgccagctagtattttgctattcatgtttaatttagtttggactgccgttctaagtaattagggtggcagtttttttgttttgtgcctggtgctgattttcgtcttgctttgtgcatgatgacgttctggcagagggttgatggttgcttaattgataaactgaccaattgctaaattgcaaaacgtaataccaattggcttcttaatttgctttttgcccaaatgcccaattgttcaaacccattcatacaactcgccaatttagcagttaggcaaataagcaattagaaatataagcagttaaacaactaaacccatccgcattatggtacaacttttgcaaacagcaaaaaactttttcggacttcgacctgagagctccgaacttttattaaccaaaaacccaatagcatgcttaaaagaaccctctttttcaccaatcccacttatttaagtgcacgccaaaaccagctagttattaacctgcctcaatccaacgaagaaaaaaccgtacccatcgaagacattggctttgtgatactcgaacacccacaaaccaccatcaccctaccggccatgcaacagcttaacgaaaacaatgtagccgtagtgatgtgtaatcaacaacacctgccatcggccatgttgctaaatctggatggccaccacctgcaaggcgaactctttcgccaacaagtagacagcacccaatccttaaaaaaacagttatggcaacaaaccattaaatgtaagattcataaccaggtgagcctgttaaaatcaaaatccatcgaaagtggcagcttagccgcctttgccaaagaggttaaaagcgacgacagttcgaaccgcgaaggtgctgcggcacgcatttactggtctcgtttgtttggtactgatttcacccgcgatcgatacggcaatggtcccaatccactcctcaattacggatacatcatccttcgatcagccgtaaccagagccttggttggttctggacttttacccaccttgggcatccaccacaaaaaccgttacaatgcctattgcctggccgatgacattatggaaccctatcgcccctatgtagacgatgccgtttacgaactatggcaaagtggctgtgacgaaatgatactggataaaaacaccaaagcccacttattgcaagtactcagttgcgatgtaaccattggggaagtacaacggcctttaatgatagccctctcccacaccacggcctctttagcacgctgttttgccggagaagagaagaagattgtttatccaaactacaattaagtccgaaagctcggagtccgaacagtccgtaatgattctaacatctattgtctaaaaatcgaatatatggaacacattcgacttaacgcctatcatattatgtggttatttgtatttttcgacctaccggtcaccaccaagaaagaacgaaaattggcatcagcctttcgcaaagaccttctcaaagaaggcttttgcatgatgcaatggagcgtatatacccgccactgccccagcagcgaaagtgccgacgtacacgaaaaacgcatacgggcattagtccccgacaagggacaagtaaccattatgcgcgttaccgacaagcagtacggcaacatggtaaacctatggggaggctctcgaacaaagaacgagaaagctccgcaacagttagagttgttttaatttgataatgcatagttattcttggtgcatagtgcagatttacagctcgtgttattttgtgcatgatgcttggcttgcttcttaacaagcagccttgtaaatatcgttgattaacctactttctattagcaaatcggtacattaacaaattaacacatcagtatactccggcactaagcatatttttgcactatgcactatttgcactatgcactattatgattattttcacacacgctctttgtcttcctgaaaaaaaacgaaccaaaagaacagttcaaacacacttccgtgtcatttttatacgatcaaggcaagctgtaaagcccgatatacaagaggtacagcgcccgcggttgtggtttgaatctaatgttcgataagatataccgtacttcgccacatatgccgctacgttattgttgtggtttgaatctaatgttcgataagatataccgtattgaagaaacaataacagcaatcgatgttgtggtttgaatctaatgttcgataagatatacctatgtctataagccgaattaaggttgtactgttgtggtttgaatctaatgttcgataagatatacctatctctctaattacctgtcctttcaattgttgtggtttgaatctaatgttcgataagatataccagtatgtgaaaatgtatttgaccgttggctgttgtggtttgaatctaatgttcgataagatataccaggaatttatacaggcgtttagtgtgtccgttgtggtttgaatctaatgttcgataagatataactgcatgatttcagcataatcattctgcaagttgtggtttgaatctaatgttcgataagatatacccgattatatcgaaactgattccatcacttggttgtggtttgaatctaatgttcgataagatatacccttttctgagtccaatgcgaccattcgttgttgtggtttgaatctaatgttcgataagagaaaccttagcgacctagcggctttgctagaaattggtattcacaacaagaatcaacacaacaaccctttgcggctttccgagagatcaacatttcactctttcgttttttaggaaaatattatttttagcattcgcaaaactcaattcttatgcaagaaagattaaacaccatccaaacctttttcgaagccaactccgatcaaaaaataaaagacaaatacgcgcgctactttaagcacgatttaaattgttatggtattgacaccaacgtttttaaaaaccaaaaagaagtctggctaaaagaatggaaagaagaactcaactttgacggctttatggcattatcagacgaattagtaaagtcaggcaatctggaaaaaacatcattagctatccaacttaccgctactttcaaagatcaatttacgaaagaaacctttcaccacattggtacatggtttactttgggtttcaataactgggccagtgtggatgtactttgtatgcttgttctcccccactttataacccaaaacatcatcacattagaagaactaaaagcatggaataatgcagaatatgaatggcaacgccgttgcgtaccagtcaccctcaatgaattacgcaaaaccatcacaccttctgaagtattttcaaccattgaacccattatgccggatggctctgaatatgttcaaaaaggcattggcactttactgagaaccatctggaaaaatcaccctaatgaagtagaggaattcctattgaaatacaaagatgattgtggacgtttgattattcaatacgcaacagagaaaatggataaagaataccgtaagatgtttagaaaaactaaaaagcaatgattaatgttgaattagtaatgatactttctcacggtacgagatttcaataatcattcacaatgaatcattactatttatagaggtaagtagttaaatacttttctcaatactaagcttacgttagcatcaaagatgcggtgtcatttagcatagatgaagggctatgaatatcgtggcatgatatggttagcgccaaatataggtgcgtagtcgtgtaattaagactactacgtacctttggcgcttaattaaaagacctgattaatatcctagcccttaccaggcttggctttgggatatcgcccaccttggggctttttgagatttatgcagaaatggatgtacttaatctactaacatcaactctacaattaagcaacttacaaataactcataaactcttacctcctctttgcgtcctagcgcctttgcgagaatctgtaatttcgcgcttggctacttctggttaacaaacattaaacccgtaaccctttcacctttgttcagtaatagcacttgaagttttcttcataagttagggttaaggttaggttgaagaaggagtatccattgggtgctccttttttttgtccactaatttctcgaattaacacgaatgatttactgctgtttta

SEQ ID NO: 1522 - DNA, 6189 bp, synthetic construct
  misc_feature 1..6189: note = Synthetic
  source 1..6189: mol_type = other DNA
tttacctgatatacaaatcagccatcatagcaggatataagccgggttacgactgggtttgatggtagcaagttatttaatagaaaagtataggttttatcttgaaatatttttaaatttggggatggtaaaaccaataataccagagccaattattctttttttgtcgaaaaaatattgtttaataaaaaactcccaccataggcgggagtataggtaattttctaccttcggcatatagccttattgtgataagatgtaaaacggatttttaatcctgtaacaaatataaaattgtttttatagaaatccaatgtatttaacaaaataattttcaattatggctaaaattttaggattagatttaggcactaacagcataggatgggctgtagtggaaaatgagaacggtaatttttcttttatagataaaggggtaagaatttttcaggagggaattaaaattgagaaaggagttgaaagttcaaaggcggcagaaagaactgagtataggagtgcccggagattaaagtttcgtagaaagctaagaaaaatcgaaaccttaaaagtgttatctgagcatggttattgccctgaattaactaaagatgagctaaataactggagatataataaagtttatccctataatttgagttttattaattggtggcgtaccagtgaagaagaaaataagaatccttattattacagaaatttagcggtttcagaaaaacttgatttatcgaatgagtttaataagtatattattggaagagctttttatcatatagctcagagaagaggtttcctcagtaacaggctggaaggcacaaaagaaagtgatggtgccgttaaaaagagtattgaagaaataagcaaagcaaaaggagataaaaccttagggcagtatttttatgaaaaataccttaatggtgaaaaaatcagggaccaatatacacacagggaagatcattatttagaagagtttaatagaatctgtgaagtacagcaattgcctgatgattttcgcaaaaaactttacaatgcaattttttatcaaagacaattaaaatctcaaaaaggacttataggcaaatgtgtttttgaaccaaaaaaacataggtgttcagtttcacatccgctatttgaagaatacagaatgttatgttttgtcaacaatatccggataaaaacgccaaatgatgagaaaatgcgacctttaaataactctgaacgagaaaaggttatggcaagattttacctgaaaagagattactttccatttgaagatttggcaaagcaattagcacctaaaaaccaacacaaatatgttaatgacagaaacaaaaatcccgaagattaccagtttaattataaaatgaatactactgtaagtggtaatcctgtttctgcaaaattcaggaattggtttggatatgatttttataacttaaaaattgagcataccaggaaaaaggataataatacttcacatattgattttaatgatgtgtggcatgttttgatgacttttaatagcgaagataaactaaaggagtttgctaaagataaactaaagcttaatgatgaacaaatcaaggagtttgctaataatacacatctgaaaaaagaatattcatctttaagcttaaatgcaattaaaaagatactgccatatttgcgggaggggttgatatattcacattctgttatattagccaacatgatagaagcacttccttccaatgtttggaacaatcccaataaacgtaatgatatctctcaaaaagttaaagaaataatacaaactcaaaatgaagaaaaagcaataacagaaatattaaacggcataataaaaaactgcagggaaagtggtgaatgctggagtgaagaagcaaaagagtgttttagaaaggatatagtaaaaggattgaaagcctattatggtgaaaaaacttattcgacactcccggaagaagaaagaagcagaattgaagaaaatgctatggaaatgctcaggaagcaaatgcagaaaaattttgataggggagagtttctgaaaattaaaaccattgatgacagggtaagagaatatttaataaataatcatgaagttgatgaagaaaaactacataaaatctatcacccatctgctatagaaatatataagcccagtaaagcaggtaaagatggaaagaaatatctgaatagccctattatttcatcaattcgaaatcctatggctatgagggctctacatcaattaaggaaagtaatcaatgagttgattaaaaacgacataattgacgaaaatacaaaagttaatattgaaatgtcacgggatttgttaaatgctaatgaacgaaaagcattacaaagatggcaacgtgacagggaaaatgacagaaaagaatatgcacaaaaaataaaagagcattacgaaaagcaaagtttaaatattgaaccaagtaatgatgatattctaaagtatcagctatgggttgagcaaaatcataaatgtatatataccggcgaagagatagggctaagtgaatttttaggggcaaaccccaaatatgatattgagcatactatcccacgtagcttatcttatgacaattctcaagagaataaaacattgtgtaataacagatttaacaggagtacaaagaaaaataaaatcccttatgagttatcaaatagtgaacaaatacaacaaagagttgatgatttatggaaaagtagaatagaagaacttgataagcaaattgagcaggcggttcgacaatcaaggtctgctgctgataaagatgctaaagacggggctattcagaaacggcacaggttgtcatatgaaaggaattattatcgagataaacgtaaccggttttttatgaaagatgtgcctcaaggttttaaaaacagtcaaatagttgatacaggaataattgcaaaatattccaggttatacttaaaaacggtttttaacaaagtatatacagtaaaaggaataacggttgctgactttcgaagtatttgggggttgcaaaatgaatataaaaaaaaagaaaggataaaccatgtgcaccactgtattgatgctgttgtaatcgcctgtatgactaaggagaattatgaaaatttagcaaaatattatcatgaccgagaggatagttttgttaaaaatgatgattcaaagccttttgtaaaaaagccatggaaaactttcacagaggatgtgaaaaaactggaagacgagatatttgtttctcattataccccagatgttttaactaaaacaaccaagaaaaaatttagaaaaagagggcagattgttaaaaataagcagggcaatccaatatatcagaaaggggatactgtgagaggaagtttgcataaagaaactttttatggtgcaatagaaaaagaatttactaataggacaggtgagaaggaaaagcaagtgaaatatgtacttagaaaacctataagtgatataaaagatgaaaatataaaaaatatagttgatgataaagtacgtaaaattatagaagagggtagaaaacaggagaaagtgcttaaaagagaaattgataacttaaaaaagaagcttgctaaaactgaagaatatgagaaaaaagaattaaactcgaaaattgaaaaaatacaaaataaaataaataacctgtattctttgccgaataaaaacggagaacctataccgataaaaaaagctagaatatatacgccaacagttaccaatccaataaaattgaagccacacagggataaagctaaaaataacccgaaatcttataaagagaattatcatgttgaaaatgacggaaattacctgatggctatttatgaggggaaagatgcaaacggcaaaatagaaagggattttgaaataataaataatctggaagccggtgagttttttaagtattcaacacaaagagagctgaaagcacaggggatatcaggttatgaagggttaattcctgaatcaaaaacaagcagcaaaatagaattgccattaaaagctataatcaaaatcggcacaatggtcatattttgggagaactatcctgaggaagtttgggagctcgattataatgatttgaagaaaagactttataaagtaacaggactgagttatcaaagaattgttcgtaggacaggtaaaataaataattatgcaacaatagttatgcgttttcatcaagaggctaaacaatcttcagatttaaaattacaagatggtgcttttgtttatgatgaagaatataaggcaaaacgtaaagtcaatcacaatcagtttaacgtaattattgaagatgttgattttaaattaacatcattaggtaaaattatacctattaccaaataaattatgatgctatgcttaaacgaacactctttttttccaatccttttaggttgagcttaaaaaacaatcagttaatagctaagttaaaagatattgatgagcatctttctgctcctattgaggacattggctttattgttttggataatatgcagattagtattagtttacctttgttagaggctttagttaaaaataatgttgctgtggttttttgtaattcaaagcaccatccacattcaatgttgctgaaccttgatggccataatacacaaacggaaatatttagaaatcagattgaagctagcttgccattaaagaaaaacttatggaaacaaacagtggaggcgaaaataattaatcaggcaaaattactggagttgcttcacataaacagttcggatgttttatatttttcaaaaaatgtaaagtcgggcgactctgaaaacatggaaggagcagctgcccgtatttattggcgaaagctttttggtaaaagctttattcgtgaaaggtatggcgattatcccaacgatcttttaaattatggttatattgttttacgcgccgcagttgcaagagctttagtcggctctggtttattaccttctttgggcattcatcataaaaataaatataatgcatattgcctggcagatgatataatggaaccatatcgtccttttgttgatcgcagagtttacaacatttacaatcaaaattccgagccagaatacctatctaaggagcataaagctgagttattaatggttttgactgacgatgtgttaataaacaaaaaaataaagcgacctttaatggtagcactttcacaaacaacagcgtcattggtaaagtgttatttaggtgatactaaatctattaagtatccttatttgctataatatgaaacaactgagattaaatgcgtatcatataatgtggttatttgtgtttttcgacttgccagttacaacaaaagtagaacgtaaagctgctgcaggctttagaaaaaaattgctgaaagacggttttacaatgatgcagttttctgtgtatataaggcattgtgcaagtcgtgaatcagcagaagtgcatgtcaaacgtgtaaaatcttttatacctgattacggacaggtaagtattttgggaataacagacaagcaatacgggaatatcctaaatttctggggtaaaaaggcgcaagaaatgcctccaggtcctaaacaacttgagttattctgacttataattatgatctttgaaatattggcttaaagtagtatttttacactgataaaccacttcacagtagcaatatgtttgttttttttgtgtaaaaacattctgtaagctttggtattcaaggctgttttagcgctatgttgtggtttgatgtaaaaatggaatgataaacaactaatttcttgaaattgtttccagttagctagttgtggtttgatgtaaaaatggaatgataaacaacgcttaattggcgtatcaatcaatacgaaagttgtggtttgatgtaaaaatggaatgataaacaactgacagactatacaaacaccattgccactagttgtggtttgatgtaaaaatggaatgataaacaacaatctaagatatgggtggaaacgatattggttgtggtttgatgtaaaaatggaatgataaacaacaataggtgaggtgttgaaagcaaatggaaagttgtggtttgatgtaaaaatggaatgataaacaacggacgtggatatctacattgacagatgtttgttgtggtttgatgt

SEQ ID NO: 1523 - DNA, 6182 bp, synthetic construct
  misc_feature 1..6182: note = Synthetic
  source 1..6182: mol_type = other DNA
ggcttgtcggggtagtaggattcgaacctacgcccccctgctcccaaagcatgaaattatatgttttgatattttgtgatattctttcaaatatcaactaagacggctattacagaggattttagttttttcttgttttgaataattttgctatatttgccataaatgttttacctatgttttacctaaatcaattttatggcttctgtatccatcattttaagggatgataaaacgctaaaaaacggacaacatcctatcgctttacgattcactaaagatagaaaaagtaaatatatccacctcaagttttcaagttccaaggagcattgggattatgaaactaacttgcctaatcggaaacaccctattaagaatcttaaaaactatctgaagaagcaagagacgaaagctgatgatgtaaggattgacctggaaagagaggataaggattatagtattactgaatttgttaatcgatacaagaacgaaagtatttctattacagtttttgattgctttgacaaacgtattgaaggattgaaaaaggccggaaagattggtaatgcaaatgtatacactgacaccaaaaatgcggtagaaggttattatagtaagaaaagtctatcatttaccgatataaattttggattcctaaccaaatttttagaacatctacaagagaaagggaatactccgggaggaataggagtgaggatgcgcacactaagagccttatataatgatgcaatcaataataattacgtcaagcccgagttttacccctttaagactaattttaataagggaggctttgatctgtccaagtttaaatctgaaccagccaggaaggctttgacaaaggaagacatcgataagatccggaaccttgatattgattattcgtctgacttattcgattcatggaattattttttattcagctattatatgcgaggtatgaactttgctgacattgctaatctgaaatggagtgatatatcaggtgatcaggtaagttatgtgagagctaaaaccgggaaaagatttgtaataaagatattaggtcctgcacaaaagatcattgaccattacagaagcaaatcccattacgtcttccctattctctcagagaggcacaaatcaccggaatctaagaaaaatcggataaagaaagtacttagaaaactaaatgaagacctcaaagagattggaggaaaagcagaaatagatatgcccctaacttcttacactgctcgccatacctgggctatggtcatgaaaaacctcggacattccacctctaagataagtgatgctttaggacaccagacggaggaagtaaccaaatcctatttggatagctttaaaaatgatgagttggatgagatgaatgaggggatactttaataggcttactttaaaaaagatgctttccttcactataatccctacaatttgattgaaataaaaaaactcccacctaagcaggagtataggatcatatccttcggcatatagccttattgtgataagatgtaatagggcaaatgtatataattaagggttgaattccaaaaaatttcgtaaatttctagttctaattaaccaatttagatatgagaattttaggcttagacctcggaaccaacagtattggatgggctgttgttgaaaaaaataatggaaaattcaaattattggacaaaggtgtacgcattttccaggaaggagtgaaaattgaaaaaggaattgaaggctcgaaggcagcagaaagaactggctataggtcagccagacgattaaagtttcgtagaaaattgagaaaaattaatacgctgaaggtattatctgagtatggctattgtccaaggctttcagataacgaactaaatggttggcgatatgataaaatatatcccattaatgacgattttaggaaatggtggctgacagatgaaaaagaaaataagacgccttattatttcagaaatatagctgtaaccaagaagttaagccttgataacaaatttaatcgatacctaattggtcgtgcattttatcatatggcgcaaagacgtggttttatgagtaaccggcttgaaggcacaagggaagccgatggagcaatcaaaaaatctatatctgatatcaatgaagccaaaggagataaaactctgggccaatatttctatgagagatatattaaaggagaaaaaataagagatacttatacgcacagagaggaacactatttagcagaattcaatgctatttgtgaatttcaaggtttaccaaaagaattagtcgatagattgaatagagcgatcttttaccaacgtccgctaaaatcacaaaaaggcttgatagggaaatgtgtatttgaaacaaataaagcacgttgttctgtatctcgtccagaatttgaggagtacaggatgttatgttttattaataatatcaaattaaaatctccatcagacgataaactgcgccctctttcaaaagatgaaagagataaagcaaaacagatgttttacagaaagagtaaagaacattttgattttgaggacattgcaaaacagctggccccaaaaaaacaatataagttttataaagattcaaccaataatccggaagactggctatttaattattccatgaaaacaacggtcagcggttgtcctgtttctgcccggtttaaagaaatttttggcgatgattttatgaacttaaaaaaagagtttataagaggaaaggataacaaaaagtcatttattgatattcaggatgtctggcatgtgatttattcatttgattctgaaaataaacttattgaatttgcgaaaatacgtttgggatttgaagaagagaaaataaataaatttttaatgattaagcttaaaaaagattattcttcattaagcttaaaggcgattaataaaatattgccctatctgagggaaggtctgatctattcccatgctgtcttcctggctaagatggaagatattatcccccaaaatatttgggccaatcatgaaaatagaaaaattattagggatcaaatacaacaaatcatacaaacccaaaatgaagaaaagcagattattgaagtagtcaatggtattattagtaagagtagggaagagaaaacgtgctggagcaatgaagcatcagagatatttaagaatgaactcattgaaaaaattaagacttattatggcaaaaacaactatgctgagttttctgatgagaggagggatagaataggagaaaacagcttttccttattgaagaatcagatgcagaaaaatatggggaaaggggaatttgctaaaatccagcgaatggatgaaagggtaagagcttttatatcggataattttgaagtagatgatattaacctcaataaactgtatcatccttcagctaacgaagtttataaacctccccaaaaaggagagaaaggacgtttatatcttggcagccctatggtttcctctataaggaacccaatggccatgcgtgctcttcatcaattaaggaaagtaatcaatgagatgataaagaatgatatcgttgatgctaatactaaggtgaatattgaaatggctcgcgatttaaagaatgctaatgagcgcaaagcactcaaaagttggcaaaatgaaagagagaataaacggaaagagtattcatccaaaataagagaacatttcgagtcaaacggaaataatgttgagccttctgatgatgatatattgaagtatcagctttgggaagaacagaaccataaatgcttatatactggtaaagaaatttctgtaagcgcttttctgggcgcaaacccacaatatgatattgaacatacaatacccagaagcctatcatttgataattcacaggaaaacaaaaccttgtgcgaaaacaagtttaaccgaactattaaaaggaacagaattccttatgagttgtcaaatcattttgaaattctttcacacatcgaacattggaaagaaaaatatgagagcctggataaggatatacagcaagccatacgacagacacgaaacgctttagaaaaagaatcgaaagacaggcttatacaaaaacggcacaaattaaattttgaaagaaattattggcgaaataaataccaacggtttatcatgaaagatgtgccggtaggcttcaagaatagtcagttggttgatacaggtatcataacacggtattcccggatgtacttaaatacactattcgataaagtatatactgttaaggggaacactgtagctgactttaggaaaatatggggtctgcaggaggagtatgtaaagaaagagcgtacaaatcatattcatcattgcattgatgcaataacaattgcctgtattaccaaggaaaactatgagttattggcaaagttttatcatgaatgggaagaatcaaaaattgcaggtatttcgagcaagccctctgttgaaaagccatggaattcttttactgaagatataaaagaaattgagaacgaagttttgatatcgcatttcacacctgataacttgccaaagcagagtaaaaagaaattaagaataagagggaaaattcaaactaatgataagcaaaaggttatttatcaaaaaggcgatacaataagaggaggtttacatcaagaaggtatctatggtgcaattaagcaagaaggagaagttgtttatgttaaacgaaagtatttacaatatgacattcaaggaacttcaggatttaaagaatttttgcaattggataaaatagtcgattcggaagtcaagagaaaagttaaacaacagttaaatcaaaaaatagaacaaggatttacctttaaagaagccattagtgaagatatatggatgaatgagcaaaaagggattaaaattaaaaaagttcgttgtattaccaatgttaaaaaccctttaggttgggataaagaaaatagagataaatcagaaactaaaaagcataaacatagtgttcatgttgtgaatgaaggcaattacatgatggctatttatgagggaaaagacgaaaacaaaaatctcaagcgagattttactgtggtgaataatttggaggcagggaaatactttacaggaaagattgataaccctatttatgataatcatcaaaactcaggctaccccattaaatgtgttttaaaaattggcaccaaggtcattctatgggaaaataatcctggtgaaattttggaattgggcattagtgatgtaaggaagcgattatataaggttataggtctaagtgtgcaaagaattaaagctaaatcaggtaaaataaatgagtatgctactatcgttttaaaacacagtaacgaagcaagacctggtgttgacattaggactcaggatggtgcttttcaggttaatgaaccatatatggcacagaggaagctgaaccataatcaatttaatgcttttgttgaaggatatgattttacattatcccccttaggtgtgttgattcctaaataaatgaaaggatgctaaaacgaactttatttttctccaattcctgccgtttatcagttaaagacaggcaaatggttattcagataacggacacaagtgaaactaaaactataccgattgaagacctcggctttgtggtgattgaaaatcagcaaattagtattagcatgccattgttagatgaacttatcaagaataatacggctgttattttttgtgaccgcacctatcatccagcttctatgttacttaatttaaatggtcatcaccttcagcaggaattgttcagctatcagatcaatgccagtattcctgtgaagaaaaacctctggaaacaaacagtggaagcaaaaatcaggaatcaagcaatgttattgaagaaattggataaggaatataaacgtgtatcttattatacagacaaggtgaaaagtggagatatcgacaatcgcgaaggtgctgcggcccggatatactggcatgctttgtttggcgaagagttcaccagggaaagatatggattcccacccaacaatatgttgaattatggctatgccattttgcgagctgcagtggctcgggccttggtgggatcaggcctccttgcaaccctgggtgtatatattaactgaaaagttcccattatttcagttt

SEQ ID NO: 1524 - DNA, 4483 bp, synthetic construct
  misc_feature 1..4483: note = Synthetic
  source 1..4483: mol_type = other DNA
acataattaaccaaaatcaacccaagtagtttaaaacttattcttggtcgaaatcttgtcgttgatttctgtcatcctgattactagtatcttacacgaggagactggatgtttattaccccagtatatagcaaaaaaaactcccacctaagcgggagtataggatttgcatccttcggcatatagccttattgtgataagatgtaatacacaaacttaaacaaaaaaatggaatagctaactaataagcaatgtattttgtaagtttatgggcataaaatgattaactgtaaactttttagctatgggaaaaatacttggacttgatttaggtacaaatagcattggttgggctattgttgaaactgaggataataaaagctttgaactaattgataaaggggttcatatatttcaagaaggagttaaaattgaaaaaggaatagagggttccaaggccgaagagaggacaaagtacaggagtgcaaggcgattgaagtttaggcgtaaattaaggaaaataaatactcttagagaattaattaagtatgattattgccccaaactaactgaacaggagttaaacgattggcgctttaaaaagaaatatcccaagaatgaggattttagagagtggctgctaaccaaggaggattcgaataaaaacccatactttttcagaaatttggcagtaacagaaaagttagatttgtctgttaaggagaatagatacaatctaggaagagccttttatcatctatcgcaaaggagaggttttttaagtaatcgattagagggaacaaaatagagcgatggtgcaataaagaaagcaatttctgaactaacagatattaagggcgatagaaccttaggccaatatttttatgagaaatataatgcaggagagaagattcgaaatcaatatacccacagagaagaccactatttggaagagttcaataaaatatttgattttcaacaaatagacccaaagttcaaagatgctttagaaaacgccattttctaccaacgcccactaaaatctcaaaaagggttgattggtaagtgcccatttgaaacgaataagccaaggtgctcctcttcacactctttatttgaggagtacagaatgctttgctttgtaaataacattaaaattaaaacccctacagatgagagattaagatttttaagcaaagaggagaaggagaaaatagaacctttgttttttagaaagagtaaggagcatttcgattttgacgacattgcaaaacagttagctcctaaaaaacagtataagttttataaagcaagccagaaacatcctgaggattatctttttaactactctatgaaaaccactgtgagtggttgtcccgtttctgcacggtttgaaagtatttttggagagcattggaaagaacttaagattgaacataaaagggcaaaggatggtaaaatatcttttattgatatttttgatgtgtggcatattgtgttaacattcgacaatgatgaaaaactagcgcagtatgcaaccagtaaactagggttaaaagatgataagcttaaggagtttcttaatcttcatttaaaacaagattatagttcgttgagtttaaaggcaattacaaatgttttaccctatttacgagaaggcttaatttattctcatgcaatttttttagcaaacatgggaaatgctattccgtatgatatatggagtaaagaagaaaatagaaagataatacaaacagcagtacttaaacttattcaaactcaaaatcaagagaaactaattattgatgttattaatggactaattaaaaggtgtaaggagaatggttggtactggagcgaagaagctaaagaaggatttcgcaaggatataatgcaaggtgttgtttcggagtttggtacagaacgttggagcaagtttgatgaagaagaacaaaataatattttggataacgcgctaagtcaattcaaaaagcaaatacaaagaaacaacggtaaaactggatttctgagggttgaaacaattgatgagagggtgaaaatatttttaaacgataattttgatgtaaacaccgaagaccttgaaaaactttatcacccttcggcaattgaagtttttaaaaaaccgataagagccgaagacggtcgcaaatatcttggtagtccaatggtttcgagcgttagaaacccaatggctatgagagcattgcaccagcttaggaaacttattaacgagctaattaggcaagacataattgatgagaatacgaaaataaacattgaaatgtcacgcgatttaaaaaatgccaacgagcgcaaagcgttacagagttggcagcgcgaccgcgaaaatctgaataaagagtactacgcaagaatacaggagcattttaattcctcgggtataaaaagagacccttccgaaaccgacattttaaaatatcagctgtgggaagagcaggaacatatatgtatttatacaggggagagcataggaatatctgattttttgggaaatagcccatcattcgacattgaacataccatccctcgcagcttatcatttgataattcgcagcaaaataaaacgctttgtcataataggtttaacagagaaactaagcgcaataagataccatttgaactaacaaatcatgcacagatattggacagaattgaaggttggaaaaaaaggtatgaggagttagatgttaagattcagaagctaaaaaaagtaacaacctccgataaggaatcaaaggacagagtaatacaaaataggcataaaacagccattgagtacgattactggcgaaagaagtacgagcgttttgcgatgaaagaagtgccgtcgggtttcaaaaacagccagatggttgatataggtattattactaagtactcgcgtttatatgttaaaaccttgtttgataaggtttatacggttaaaggaaatacggtggccgatttcagaaaactttggggcttgcaagatgaatttgtaaaaaaagcgagagtaaaccatattcaccactgtattgatgccattaccattgcttgcataacaaaacagaattacgataatcttgcaaagttctatcacgattctgaagaaatgtacctgtcgggaagcggtaagaagcctcacgtttcaaaaccgtggccaacctttaccgaggatgttaaagagatagaaaacgaggttttggtttcgcaccacacccccgataatttgcccaaacagagtaaaaagaagctcagaaacagaggggttgctgtaaggaataatcaaggagatgtaatgtaccagaagggcgataccgttaggggaagtttacataaggaaactttttacggagcaatacagcgagaggtagttaacaagaaaggcgagaaggaagaaaaagttctttatgtagttcgaaaaccagttgactcactagcagcagccgatattaagaatattgtagataatgtggtgcgagaaaaaatagaggctgctataaacgaaaaagggctaaagcaagcccttagcgaacccatttggatgaacgaacagaagcaaattccaataagaaaagtacgttgctatgtaccaacagtaaccaacccaattcatcttaaagcccatagagatatttcaaaacacgactacaagcaatcttaccatgttgccaatgatgggaactatttaatggcaatttacgaagggttagatagcaaaggaaaaattaaacgtgactttgaaattgtaaataacctaacagcaggcgagtattttaagcggtctgcacaggaggttttaaaagcgcagggtataaacagtctggagggattagtaccagaatcaaaagaggcaaagaaaaccctattgccattgaaatatattgttaaaactggtactatggtgttgctgtgggaagaaacacctaatgaaatatgggatttagatattgcgaaacaaaataaaaggttatacaagattgtgaagtttgataaaatagggagaattttttttagaccccacaatgaagcaaggcctgcatctgatttgaaagaggtttatattctgaatgtggataaatattgtgaacaattgggacttcgagtaagtaagtttaatgctttagttgagggttatgactttagaataaatattcttggtcaaattgaaagggtagagtaatgctaaaacgaacgctatattttaccaatcccagctacctgtcggttaaagataggcagctggtggttgaggtaaagggcgaaaacccgccaaaaaccgttcccattgaggatattggctttatggtaatagagagcatgcaaattacgctaagcatgcccctaattaccgagctaatggataataatgtggcggttatattttgcaatgcaaagcaccacccgcagtctatgctactaaatatggagggcaaccatcagcaaaccgaagtgtataggc

SEQ ID NO: 1525 - DNA, 4479 bp, synthetic construct
  source 1..4479: mol_type = other DNA
  misc_feature 1..4479: note = Synthetic
cataattaaccaaaatcaacccaagtagtttaaaacttattcttggtcgaaatcttgtcgttgatttctgtcatcctgattactagtatcttacacgaggagactggatgtttattaccccagtatatagcaaaaaaaactcccacctaagcgggagtataggatttgcatccttcggcatatagccttattgtgataagatgtaatacacaaacttaaacaaaaaaatggaatagctaactaataagcaatgtattttgtaagtttatgggcataaaatgattaactgtaaactttttagctatgggaaaaatacttggacttgatttaggtacaaatagcattggttgggctattgttgaaactgaggataataaaagctttgaactaattgataaaggggttcatatatttcaagaaggagttaaaattgaaaaaggaatagagggttccaaggccgaagagaggacaaagtacaggagtgcaaggcgattgaagtttaggcgtaaattaaggaaaataaatactcttagagaattaattaagtatgattattgccccaaactaactgaacaggagttaaacgattggcgctttaaaaagaaatatcccaagaatgaggattttagagagtggctgctaaccaaggaggattcgaataaaaacccatactttttcagaaatttggcagtaacagaaaagttagatttgtctgttaaggagaatagatacaatctaggaagagccttttatcatctatcgcaaaggagaggttttttaagtaatcgattagagggaacaaaagagagcgatggtgcaataaagaaagcaatttctgaactaacagatattaagggcgatagaaccttaggccaatatttttatgagaaatataatgcaggagagaagattcgaaatcaatatacccacagagaagaccactatttggaagagttcaataaaatatttgattttcaacaaatagacccaaagttcaaagatgctttagaaaacgccattttctaccaacgcccactaaaatctcaaaaagggttgattggtaagtgcccatttgaaacgaataagccaaggtgctcctcttcacactctttatttgaggagtacagaatgctttgctttgtaaataacattaaaattaaaacccctacagatgagagattaagatttttaagcaaagaggagaaggagaaaatagaacctttgttttttagaaagagtaaggagcatttcgattttgacgacattgcaaaacagttagctcctaaaaaacagtataagttttataaagcaagccagaaacatcctgaggattatctttttaactactctatgaaaaccactgtgagtggttgtcccgtttctgcacggtttgaaagtatttttggagagcattggaaagaacttaagattgaacataaaagggcaaaggatggtaaaatatcttttattgatatttttgatgtgtggcatattgtgttaacattcgacaatgatgaaaaactagcgcagtatgcaaccagtaaactagggttaaaagatgataagcttaaggagtttcttaatcttcatttaaaacaagattatagttcgttgagtttaaaggcaattacaaatgttttaccctatttacgagaaggcttaatttattctcatgcaatttttttagcaaacatgggaaatgctattccgtatgatatatggagtaaagaagaaaatagaaagataatacaaacagcagtacttaaacttattcaaactcaaaatcaagagaaactaattattgatgttattaatggactaattaaaaggtgtaaggagaatggttggtactggagcgaagaagctaaagaaggatttcgcaaggatataatgcaaggtgttgtttcggagtttggtacagaacgttggagcaagtttgatgaagaagaacaaaataatattttggataacgcgctaagtcaattcaaaaagcaaatacaaagaaacaacggtaaaactggatttctgagggttgaaacaattgatgagagggtgaaaatatttttaaacgataattttgatgtaaacaccgaagaccttgaaaaactttatcacccttcggcaattgaagtttttaaaaaaccgataagagccgaagacggtcgcaaatatcttggtagtccaatggtttcgagcgttagaaacccaatggctatgagagcattgcaccagcttaggaaacttattaacgagctaattaggcaagacataattgatgagaatacgaaaataaacattgaaatgtcacgcgatttaaaaaatgccaacgagcgcaaagcgttacagagttggcagcgcgaccgcgaaaatctgaataaagagtactacgcaagaatacaggagcattttaattcctcgggtataaaaagagacccttccgaaaccgacattttaaaatatcagctgtgggaagagcaggaacatatatgtatttatacaggggagagcataggaatatctgattttttgggaaatagcccatcattcgacattgaacataccatccctcgcagcttatcatttgataattcgcagcaaaataaaacgctttgtcataataggtttaacagagaaactaagcgcaataagataccatttgaactaacaaatcatgcacagatattggacagaattgaaggttggaaaaaaaggtatgaggagttagatgttaagattcagaagctaaaaaaagtaacaacctccgataaggaatcaaaggacagagtaatacaaaataggcataaaacagccattgagtacgattactggcgaaagaagtacgagcgttttgcgatgaaagaagtgccgtcgggtttcaaaaacagccagatggttgatataggtattattactaagtactcgcgtttatatgttaaaaccttgtttgataaggtttatacggttaaaggaaatacggtggccgatttcagaaaactttggggcttgcaagatgaatttgtaaaaaaagcgagagtaaaccatattcaccactgtattgatgccattaccattgcttgcataacaaaacagaattacgataatcttgcaaagttctatcacgattctgaagaaatgtacctgtcgggaagcggtaagaagcctcacgtttcaaaaccgtggccaacctttaccgaggatgttaaagagatagaaaacgaggttttggtttcgcaccacacccccgataatttgcccaaacagagtaaaaagaagctcagaaacagaggggttgctgtaaggaataatcaaggagatgtaatgtaccagaagggcgataccgttaggggaagtttacataaggaaactttttacggagcaatacagcgagaggtagttaacaagaaaggcgagaaggaagaaaaagttctttatgtagttcgaaaaccagttgactcactagcagcagccgatattaagaatattgtagataatgtggtgcgagaaaaaatagaggctgctataaacgaaaaagggctaaagcaagcccttagcgaacccatttggatgaacgaacagaagcaaattccaataagaaaagtacgttgctatgtaccaacagtaaccaacccaattcatcttaaagcccatagagatatttcaaaacacgactacaagcaatcttaccatgttgccaatgatgggaactatttaatggcaatttacgaagggttagatagcaaaggaaaaattaaacgtgactttgaaattgtaaataacctaacagcaggcgagtattttaagcggtctgcacaggaggttttaaaagcgcagggtataaacagtctggagggattagtaccagaatcaaaagaggcaaagaaaaccctattgccattgaaatatattgttaaaactggtactatggtgttgctgtgggaagaaacacctaatgaaatatgggatttagatattgcgaaacaaaataaaaggttatacaagattgtgaagtttgataaaatagggagaattttttttagaccccacaatgaagcaaggcctgcatctgatttgaaagaggtttatattctgaatgtggataaatattgtgaacaattgggacttcgagtaagtaagtttaatgctttagttgagggttatgactttagaataaatattcttggtcaaattgaaagggtagagtaatgctaaaacgaacgctatattttaccaatcccagctacctgtcggttaaagataggcagctggtggttgaggtaaagggcgaaaacccgccaaaaaccgttcccattgaggatattggctttatggtaatagagagcatgcaaattacgctaagcatgcccctaattaccgagctaatggataataatgtggcggttatattttgcaatgcaaagcaccacccgcagtctatgctactaaatatggagggcaaccatcagcaaaccgaagtgtata

SEQ ID NO: 1526 - DNA, 15658 bp, synthetic construct
  source 1..15658: mol_type = other DNA
  misc_feature 1..15658: note = Synthetic
ttaaccgtagacgctatattccggaactttccagtccgaactttgcactgcgcaaattcggtgaacgaaccgctttgaatgcgccgattcaaggaacagccgccgacatcattaaaaaggcgatggttttgttgaatcaagctttaaaagaggctaacttaaaaagcaaacttattgcccaagttcacgatgaattggttctggatgtaaagcaagaagaactggaaaccgtgaaaaaaattgtaaaagagaagatggaaaaggcgacggagattggtgttaaactaaccgttgacgtaaaaagcggttcaaattggaatatgtaagggaaaagaattaagaggtgaagataatgaaagaagtgatttatcaaaatatgttggttcggcgcagcgttcgccaatttaaaaaggataatcctgtttcgcaagccgaaattgaatacattttgaagtgcgccatgcaggcaccgagtgccaaaaacgaacaagcttgggagtttatggtcataaataagcgtgctttgcttgatatgcttgctgcaagccatccttatggtcgggtattggctaccgctcccttagctatcgtggtggtcggaaatactcaaaaagtaaaaagcgcgctttatcctcaagatttggctgctgctacccaaaatattctcctagccgcaaccgccctcaatttaggtagctgctggttaggcatacatactcatgatgatcgcgcaaaatccttaatcgatacgcttgctttaccggaacatattgttccgttctcggtgattgccatcggtcaaccagaagaccctaatgcgttaaaacctattgaccgttatcaacccgaggtagtgcattacaaccggtggtaatatgcctgaacttcctgaagttcaaaccgttatcaacatattgcaagacaatataactaacgaaacaataagcggcgtaagagtattatatccggggattttacacgacacaaccgttgcaacattggaacaggaattgccccaccaagtcattaaagggtttagacggatgggaaaataccttatcttccttttatcgaaaggaagtttgattgttcatttacgcatggaaggcaaattttatattttgcccaaagatgcccaggttgaaaaacatgtgcatataataatagactttgaaagcgaaaaatccctccactatcacgatgttagaaaattcggaacgtttacttatctttcaaccaacgaattcgaagccatttctgcttaccccatgctgggaaaactcggaaaagatgccaatgagaattgggaagaagacgaattgtataagctaattcatgacaaaaaagctcccattaaagcggttttgttggatcaaagcatcatcgcgggtctcggcaatatctatgttaatgaagtgtgctatttggcgaaagtccatccgctgcgattagcttcgtcgatatccaaagaagaagctaacaaactcagtttttatgccaaaaaagtattggatgaggcaattttttacgggggaacaaccattcgttcttataccagcagtctgggcgtaaccggacgctttcaacagtttttgcacgtgcacggaaaagctggagaagaatgttcggtgtgcagcaccgaaatcattaagttaaaggttagtggccgcggaacatatatttgcccgaattgtcaaattttaaaaccaaaagtagttgcgattaccggcgggattgccaccgggaaaagtaccattgtgcaacttttgcgggaagcgggcttacaagtatgggcagctgacgaagaagtggaccttttatatcaaaaacccgcggttatcgaagaagtggctaggcgtttcccggaagtttgcgttgacggaattattaaccgtaagggtttgggcaaaatcatttttaccgatcctcaagctcgcaaagacttggaagccatcattcatccatttgtatatgaagcgctggatgaatggattaaagaacaacaaaaagaaaaatttgtttttgtcgatattccgttattgtacgaaaccaatcgggaaaagtcttttgacgaagtaatcgtggtttcggttcctttagacatcaatgtcaaacgcttgatggcgcgcgacgggatcgatgaacaatatgcaatgaaaaaaatcatagtccaaatgccccttccagaaaaagcggcaaaagcggactatgtgatagataatgctggatcgattgtcgatacagcccaacaattaaataaaatattacaaaagataaggagatgagtgactttgagcggtgaatttttagtgaaaagcgtggcaacctcggataccgccaacccggaactattaacccattattatcgtaatgattacaatacggtgaaaaattgtgttttggaagttgccaaacaaatgaattataatgtagaaacaatcgacgaccgctataaagaaattttcttgcaaggcgccaaaagtcatattatagtcaccttggtcaacatcacttactatgaaacagctttagatatgactgtttacacttattggtccttaaccaagaaaaaagctttaaaaattgttgaggatttttacacgcgctgcgatcgcaaacttaattttaaagggaaaggattaactagatgaagaaaaaagaagaatatcttcttgcggatcattttgtggtggttattcccgatattattacaccctatgaacaaaaaattttaacctttctttatgcaccgcttttgggtcctcaagcccaagccttatataccactttttacagtttggtaaagccgggggaaaccgaatcggaattgatgagtcattcggcttttttcaatattacccaaatcaaaaaaccggaaaagtttttggatgaccgggtaactttggaagccttgggcttattggaaacttattattatgaaaccaaaattggtgaacctaatcgttacgtctatttattgaaaagagttatgaacccatatgcttttgccaatgatgtcaacctatctcatattttaagaaccaaaattggtgacgaagcctatgaaaaaataatggcggaattattggtccgtaattttgatatcagtaaatatcaaaatgtctccaaagcttttgatgaagtgtttatcgtaaccaatgatttatccccaattgatttttccgcttggtgggttgacggaataaacaaaggggtaagagtcaaaaacgcccaatgtcaatttgagattgtccaagtgcaattggatgcgctgggaaaatgggctccggaagtaattcttgaccaaaggttaaaaaccgaagtcaatcggtattgctttttctattgtttgacagcagaagaaatggtagaggcaattttattggccacaacctccgattataaaatcgattacgaaaaacttcctgaagcggttaaagcggtatatggcaataaaaagcaagctgttaccgtgaaaaagattgcgaaggttccctcaaaacctagttccaagctgattcaacaattggaaactatttctcccgccaagatttttgaaagcaaaacaggaacggaactgttaccaaacgaaatccaaattttcgagcagttgcaaagaaaaaccggcgtcagcgtcgggattatcaatgttttgatgatttatgttttggaacaaaaaggcggagaaatccctgggtacaattatttcttgaaaattcttaatacttggattcgaaaaggcatcaaaaccaccgaagatgcgttaaaatatattaattcatctccgctttctcaaaaaccttcccgaaaggaaaaaccagttccagattggtttgataaacatatggaggaagcaaagaaacgcgaagaagaagaacgccaaaaacgggaatccgaggaaaatatgctttccatggaagaactggagaaaatttttaaacccaagaaaaaggcaaagtaaaacgaggtatgtttatgaataaagcaaaagaaaacaatgattcagttatgccaaatgatcaattaactcttcatcaaaaagtaaacggggtattaaagaaccccgaagtatctcgttttgtaaaagccactaagttaaccaaagaagatatccaaaacaatttatcgctttttatggcttttcaatatcgccatgaaatatgtcaaaattgtccgggtttaaacagttgtggtcaaccaatcaaaggaaaagaaccattcctcgacaatgatgaaggttatttggtcttaaatactagagattgtaagtaccaacagcaagtcaacgatcagcttacccgcttggaacgcttggaatttatcggtcccgctctggcggggtacaatccggaagacatttatttgaaccccaaaagaagagtgatactatccctaataaatagattcatcgaaaactatcccaaccctcaaaaaggcatttatctttatggcccttatggttgtggaaaatcatacctgatgttgcatttagcccaccaattgaccgaacttggggcaaacgttctatttgtttattatcccgaatttgtaaggctaatcaaaagcactatcgggcgcgacagcgagatgtttgacgatatgattaaccaactaaaagaagcggatatcttaattttggatgatttgggcggagaaatgtcctctgcatacattcgtgatgaagttttaagtccgattttgcaagaaaggatgttgcaaagaaaaccgatgtttgtaacttccaatttaagcaaagatcttttaacggaacacttgcgcgataccggaaaaaattccgacatcgtcaaagccgaaagaatcgtagagagaatgagaactttaatggattttacccccctgaatgaccaaaattaccgctagaaacctaaaagcctttgaattggcaaaaataggttgttttggtactcaaacgctccagaaagcgttttatgagaccaaatggttgacaaacaggtataaaatgaatataattaagcaaaatatcaaaaactgcgacgaatgggacaagataagaggattccttttttccagcgaggtaggtatggtgcaagctaccaaaaaagcccttttattaccacccaggagcagctcaatcgaaattgagccggattaagcccgttatgctttttgaggcaaaaatacccgtgaattaacatgtcctttgttaaattttagcgtatttttgcgaattaaggtggtaccacgaacaacgctcgtccttatcctaaggatgagtttttttatttaacgataggaggaaaatcatgaaaattatttttccagacgggaacagtaaagaatttgcgcaaagcgcaagtgcttatgaaatagctcagtctatttcggtaagtttagccaaaaatgctatcgcagccaaagtagacggcgaactctatgatttgcatcgaccaatcaatcatgatgctcatttggaaattgtaaccgacacaaaagaattgtttaatttgttgaatcattcttgtgcgcatttattggctcatgcgattaaagaaatgtatcctcaggcactttttggcgttggaccaaccattgaagaaggtttttattacgacatggatttaggcgacgtcaaaatcagcgaagaagattttaaggaaatcgaacgcaaaatgttgaagttggccgaacaaaacattccgattgttcgtaaagaacttttgcggggtgaagccttggattactttaaaaacgacaaatacaagattgaattaatcaacgatttaccggaagacgaggttataacaacttattcacaagggtcgtttacggatttatgtcgcggtccgcacttgccttccacaaaatggctccgtcattttaaattattaaatgtaagcggcgcatattttaggggtgacagtaaacgcgaacaactgcaacgaatctacggaattgctttctttacgaaagaagaacttgtggcgtatttacaattggtggaagaacgtaaaaaacgtgaccatcgcaaactcggaaaagaacttgatttatttatgatgagcgaatatggtccgggattcccgttctggctaccgaatggcatgattttacggcggaatttggaagagttttggtataaaattcataccaaagctggttatcaattgattcaaacgccaattatgcttgacaagagcctgtgggaaatttcgggacattggtataattaccgcgaaaacatgtatgtttccgaaattgatgaccgggaatttgcgattaaaccgatgaactgcccagggggaatcttggtgtataaacgcgatattcattcctataaagattttccgcttcgcgtgggagaactggggttagttcatcgccatgaagcaagcggtgctttaacgggtctctttagagtgcgaaactttacccaggacgatgcgcatatctatttgcgatttgatcaaatcgttgacgaagtcgcgcgtttaatcgatttatttgactatgtatacgacattttcaacttaagttacaatatagaactatctacgcgtccggaagaaaaatacatcggttcgattgaagtttggaacaaagccgaagaagcgctatcggatgcctgcaccaaagcgggacatgcgttcaaggttaacccgggtgacggggctttctacggcccaaaacttgactttaaacttcgcgactcgatggggcggatttggcaatgtggcacgattcagttagatatgaatttgccggaacgttttgacctccattatatcaacgatcaaggcgaaaaggttcggccaatcatgttgcaccgtgcgctctttggttcgcttgagcgctttatcggtatcttgatagagcattatgcaggggcattcccgctatggctttcacctagacaaattgttgttgtaccggtaaataacgcttcccacggcgattatgccaataaactaaaggaaattttggctgagcaaggatttagagttgaagtcgatttgcgggacgaaaagatgaattataagattagagaagcgcaaacaaagaaaattccgtatacgattgtggtaggcgataaagagaaaaacgaagaattaattacttatcgcccttatggaacgaatgaatcgcagacccttcaaatcgaggaattcatcgcaaaactaacaaatgaggtaaaaaccttcgggaaaagcaaagaataatcggttattttcacgttaaggcattcattgttttagaagtgaaacgtttattttggaactgccctagtttattttgtcaaaaagataatcaatcgaaacaaaaagactatttttccctaaagcttaaaaaaggtgaaaatatagtcttttttgcatatgcctatacccttaagggcggttaatcatataatgggtttgaaaggaaggggcatatgaatagacatcaaaccaaacgcttcatgaatgggtatgatgagtatgttgtaaaacaaggcgactcattgtatcaaattgccaaattgttcaatacgaccgtagccgatatcagcgatgccaatatgttgacgagttccacgatttatcctgggcaagtcttattaataccaaaagccgggatgcaacaattcaccgtttttgaggattatcgaactgtagaaggagatacgattgtgggaattgctcaaaagaccggcactactccggcgctgctcggaacatataatgattttggtgcattgaagttagagaaaaaccaagtcgtcaaaatcccgcgccgcggcagtacttaccaaattgtggaaggagatacggttagcagaattattaatcaaaccggcaaaaccgcccaggagttgttggaattaaatgccagcaactggttgaaaaaaggcgcaacgattcgtatcacttaatcaagggggaaaccgccaaaaaaggcttttgggccttttttttctttggcgtataatagacaatggtttcaaggaaaatatgatataatatacataaatactcgatgattagaaagtaagtgatttgtttatggaaaataaagaaatagtaaccgttatcggtgcggggctggcagggagcgaagcaagttatcaactggctaagcggggatttaaagtaaaactatatgaaatgcgtccgaaaaaaatgactcccgcccaccaaacgggacttttttccgaactcgtctgcagcaactcccttagagcgagttccctggagaatgcggttggggtgttgaaggaagagatgcgcctgctagattccttaatcatgaaagcagccgatgccacgagagtggaagcgggcggagctttagcagtggatagagaaaagtttgcttcctacattaccgaaactttaagaaaccaccccaatatcgaaatcgtcaacgaagaagtaacgcgtatccccaaagagtatgtcattatagcaacaggacccctaaccagcgatgccttaagcaaagaaatctcgctaatgctgggtgaagaagatttgttcttttttgatgcgacggcgccgattgtaacagcggaatcaatcgatcgcgccatcgtttttgaagcttcccgttacaataaaggcgaagctgcctacctcaacgcccccatgagcgaagaagaatttactcgtttttatgaatttttgctttccgcttccaccgtggaaaccaaagactttgaaatcaaagtgtttgaagcctgtatgccgattgaagaaatggccaaacgaggcaaagatactttattgtttggtccgatgaaaccggttggtttaattgatccaaaaaccggaaaacgggcgtttgcggtggtacaactccgaaaagataatgcgattggcagtttatacaatattgtcggttttcaaacccatttgaaattcccggatcaaaagaaactgatttcccttatcccgggtttggaaaaagcggaaattgtgcggtacggagtaatgcatctcaatacctatatcaattcgccgaaactattaaacccagggtttcaatataaaaataatcacaaagtgttttttgcggggcagatgaccggcgtggaaggctatgtggaatctgcttccagcggccttgtggcaggaatcaatatggctcggatgttggaaggcagaccctttatgagtttaagttcaaattgcgctatcggctctttatcgctttatgtcactacctctgctattaagaaatttgaaccgatgaatgtaaactttggtttgtttagtccgttaaacgaaaaaatgccgaaaaaatttcgtaaaatagcttatggccaaagagccttagaaacgcttaaggaaataatagataaagaaaaaatttaatcaaggagtttttaatgtgaaagtcgagttagcgaccaagctgcgggttgcacaaactgcgatggttttttaaataacaaaaatgtttaaaaagaaacaaaagtaggggattcgtcaaacattaaatataccattttaggtttccttgttctttggttggtttggaaaaaagaatatccccaaagggctagagcactaggacaaggagcctaagtttcaacaaaagtattattcattttatgcttaatcgcttttgggcttttggttattcttttaatttagggtttgatttttgttgccccttttatcttatagcttaatttataaaatttaaacatttttataaatctgtcaaaaagctaaaaataattaaagaataattaaggcaacaataaaaattattgtactcactgaggtgctctgtaaaaagatttttaacggttgcagtattgcagcagtatcataaaaatctcgattagatcgaccgaaaaactttgatatagcgttatttttgcgattgtgttagtgatagaatcatttttgctttttggtgtttaaaaaacaaatggaactaaaaaattttcaaacaaattttttagtttttttatataaaaatggacatattttggaaataattgtataatgaaaaaaatactagggggggtaaaatgaagtatattattggattagatcttggtataaataatgtgggatggtccattattaaccaggaaacaaatgaaattgaggattatggtgtagtgcgctatcaagagagtagtgatgcgcaagagcgccgtagacttcgagcagcccgaagattacgtaatcgccgattgcatcgtgttgaaagattagcattgctatttaaggagaatgggattccaactcaaagaaccattgagcctgaactattacttaaaagaacaaaaggactaaaagaagaaatttttgttcaggatattattaatattatttattattttgcagttcatcgcgggtatattccatttgatgatgagaaattggatagggaagtggttaatttagaggatggtcaatttccatgtgaatatatttttagcgaatataaaaaaaatggaaaataccgaaactccgaaaagttaataaaatgttcggataatattcgcgagattaaaaagcttttggaaactcaaagaaaatatcacccaaagtttacaatcgaattaacggataaaattatcgagattattacaagtaaacggaaattttatgaaggtcctggaggagcaagaattaatcaattgactccttacggcctctttagaacagttgccgatttggaacaatataaagttaatccaaacaaattcaagtatttatatgaaaaactaatagcaaaatgcaagatagctttaggcgaaacttgtgcgccaaggataaattattttgcagaagagtttaatttctttaacgattttattaatatgagggtaaaagaagtctctttacttcctcaaatatattcatataaagttgacgaaaaaggaaaattcatagaagaaacgatattagaaattagagattatgttttaagtaatgaaacaattcggcttgataagatgtttaaacaaatcctaggaattggtattgataatattgaaggctatcgcattgataaaaataaaaaaccggaagtttcattatataacttttacaaatatgtaagaaagcaatttgctcaaaatggtttgaacccaatttggttatttgacaaggaaaaagtcatttacaataaaacaatgtatgttttaacagtagtcccttctagtgtgcaaattgaagagatgctaagtgaaagagtttctgaatactcgttctccccagaggagattaaggtacttaaagaaatcaaaacaaagaagctcacaaacaatacatcgctgtatcattcattaagcgtaaaagtgctgaaaagagctttatctgatatgaaaaaaacacagtaccaattaaattacatgcaactaatgaagaaattagattacgagaaagaagccaaggagttctttgaagcaaactataccaaccgaacagttgctccatattttattgaaaagaaatacattgatgatttaatcgcaaatcctcaagttaaaaaaactctcagaaaagccataagcgttattaatgcaattataaaaaggtataaggaatacccgacaataattgctattgaatccacaagagaaatgaatagcaaagcaaaaaaggatgctattgtaaaagaacaggcgaaacttgagaaattacgaaaagacgcaataacttttttagaggaaaatgatattaaggtaaatgaagctaatattctcaaaaccatgtgttataaggaaacaaatggccactgtatgtattgtaacaatccaattcaagcatcccaattaactactcttgaaatcgaacatatccttcctatttctcaatcttacgatgattcctttgataatcttacagttgcttgtttaaaatgtaataaagaaaaatcaaaaaagacaccatacgaatttttaacaagtattaattcatacgaaccgtttaaagagcgagtcattgaattaccaatctccgacaagaaaaaaagcaatttgctttttgaaggagatatttcaaagtatgagttgaagttcattaatcgcaatttacgggatactgcttatggttcgatggctttagttgaagaattaagaaaatttaatgtttttttggagaggagagcaaatcgttacattaacttggtaacaattcctggtcaattgacttcaaggattaggaaaaaacatgaattagaagaaaaagatcgtactcaattgtatcatcatgcaatagatgcaacaattgttgccagtatagcaaataccccatttggggaattgttaattaaaggtcaaaatgatgcgaaattctggtttgaaaataaagaaaaaagaattgaacttggtggaatgctgccgaaaataacgttaaaaaatattgaaaatattagaaaaataaatgaatccaatattaaacgttcctttgaagtgcgtaaaagcatcaaccaacaaatatctaaccaaaatccaattaagttagtttggttaggaaacgattactataaagtccaacaaatcaacaacatttatgaagaaaagaaaaatgataactttattaaattatttgacgaaaatgacaaaaaaatgattttgttatgtgaacttgaggatccaaaattattcaaacgattgaaagaaatctttttctctaatttaaaagctaataaaaacccttttttggaatattgtttatttgaacacggaattgaatcaactccaaattcgtttaattatttaattcacggaataaaaaaatcacccaaaaacccaaaaagcccaatagtaaaaagattacgttatctagaaaaaagaactagcccttacattattaagaaggattacccaaaccgaaagaaaaatgaattaggagaatttgttacacccaaagttaaggaaaaaacaatctatggtttggatcaattaagccaatattgcacagaaatctattataattatgaaacgcagaaatttatctttttacctattttcatggtcagtgtagatgtaaactctaagaaaattaaccgggatgaacattattttaaggaaacttatgaaaggttgattggaaataaaaaaccaaaatatattgcaaccttatacaacggtagttggtgcgagataactaagaaaaataatcaaaccgctgaaggccgatatattgggtatcataaaaccaataatttacttacctttggaaaagatggagaatattcaagttctgcgccattatatatgtcacccaatgataaacgtataataatttatggttttaatattttgggaaaaaagtacaaaatacttgactcgaatgacatcatatagtataataaaagtgcgctagacgtagcgtataacactcaaatttcacagtcgttcctattataacacgaatgtggaacccagggagaggagtcaaatcctctctttttttgttctttggaggaaatatgggttggagatatgtttgtattgatgaagcaagtcgaataaattaccgtcttaataatattggtatagtttataaagatgaaacgatttggattaatcttgatgaaatagatactgttattattaccgattctcgttgtaatacatcaataaagcttttacaagagttagtggaaaaaggaattagcgtgattatatgttcaaataaccacatgccagtaggtttatttttaccttttcaaaatcatagccgtagttcaaaatataataaatgccaattggaatggtcaattgcaatcaaaaaaacagtttggaaagaaattgtaaagaataagatagctttacagagtgcagtccttcaaaagtggggtagaacaaataaacttccgttgttaacgcaatatttaatggaagttgaagacggagatccaaccaatcgtgagggtttggctgcaaaagtatattttcgcgaattgtttggtgaaggtttttcgcgagaaagaagagacgaaggaatcataaactcatcgttaaattacatttatcaaattgtcagatcaaagattgctcaagtaattgttgggcatggatatattccgagtttaggtatttttcatatcagcgaatataattattttgggtttgcagatgacttgatagaagtatttagaccaatatgcgatcattatgttatgaaacttttgcaaaaggaggatgttaagtttatgtcaccaatttttaaagaaaaattggttggtattttgcttgaaaaagttgagataagaggtaccaagcaaaagatatcagaagcaattaaaatatttgttcgttcagttacagatgctttaaccagtcaaaaactggatacacttcaatttcccttatttgtttatgaaaagtgattatcgaaagatgagaatgattttgttgtttgatttgccggttacagaggaagatgatttgaggagttatcgtatttttgtaaggcagttaaaaaagattgggttttatatgcttcaatattctgtctatgttaaatcactaacaaatgcttctgattttgataaggttggcgttaaagttattaatatattgccaaaaagaggaaatataatcattctaaagcttacagaaaagcaatataacgatatgatttatttaagtggcgaaaagaaccgtcatgacatgatagttggttctaaagaaatagtttttttcggaggtgacgcccttgattgagttgaatattatttcagataaagtaaaagttgattccttatttctcgaaaaaaagaataatataattgttgagaattaccatgtcctacaaaactttctttcggttttctttgatattaacaaccctaacaattcaattgaaataggtaataaaaaaattgattccaaaaaagcatatgtattaaatttgcttgattatgaaagtttgtttcttcaaacaagtttaaaaaaaggatcacttatttatgattatgtaattaaggaaattgaggataaacttgatgaggcaaatgatcaaataaatcaatttcttgacagaatttttagcgaaaccgtcagtaattcagttattaattataatttgacatttgatattgatgtggtcaaattagcaacacaatttggagagtttgagaataaaattgattctcgagaatatctaaaagtaatcaaggttttactccaatctttcatagaaaaaaacaaaaataaaacaatgatagtattaacgaatgaaaatattattggcactgttttagatgatatggacagtattattatctttaatatgtatgccaaaagtggttataatgtttttattgatgaacaggttctaaattttgattttcatgttgtttataaccatataaaactaaactggccaattgatttggaaaggcaaaagattaatgaaatagtagacaggtacattggtgtttttcacgcaaacaaattaacagaaatttacgatatagaaatgtatatagcaggggttttattcaataaagttatgcacattgataggaaattaatgtttaaaggtaatttattagaaatagctgagccatatcgcgagtatattaaaagcattgaaattacaaattgattatgatataatcaatatataacactaaaagagcctgtttgggacgctaaacaaggcacagcaaccggattttgaggttttaggatgctgtgaaatttgagtgttataaagct

SEQ ID NO: 1527 - DNA, 15247 bp, synthetic construct
  variation 3901..3902: note = n is a, c, g, or t
  variation 12147..12148: note = n is a, c, g, or t
  variation 3744..3745: note = n is a, c, g, or t
  misc_feature 1..15247: note = Synthetic
  source 1..15247: mol_type = other DNA
gaccggattgtcgaagaagccaaacaaaaaggttataccaccacgctctttaaccggagacgctatattccggaactttctagtccgaacttcgctctgcgcaaattcggggaacggaccgctttgaatgccccgattcagggaacggcggccgacatcatcaaaagagcgatggtcttgttgcatcaggctttaaaagaagcgaacctgcaaagcaaactgattgcccaggttcacgacgaactggtgctagatgtaaaacaagaagaactcgaaaccgtcaaacaaatcgtgaaagaaaagatggaacatgccgcggaaatcggagtaaaactcaccgtggacgtcaagagcggttccgattggaatatgtagaaacgattaaaaaaaatagaaataataagaggtgaagattgtgatcgatatgatttatcaaaatatgttggttagaagaagtgtccgccaattcatcaaagataaaccgatttccgaagcagaaatcgaatatatgctgaaatgcgccatgcaggcaccgagtgcccgaaacgaacaggcttgggagtttatggtaatcaacgaccgcgctttgttggataaaatcgcctccagccatccttacggccgagtacttgttaccgctccgctagccatcgtggttgtgggaaatacccaaaaagtcaaaagccagcttttccctcaggatttggcggccgctacccaaaatattctcctcgccgcaaccgctctcgaactcggaagctgctggatgggcattcatttgaatgacgatcgtgccaaatccttaaccgaagttttgtctttaccggaacatatcgtaccgttttcggtaattgccatcggccatccggaagaccccaatgccttaaaaccgattgatcggtatcaacccgaagtcgttcattataaccggtggtaatatgccagaacttcctgaagttcaaaccgtaatcaatattttgcaaaaaagtattaccgacgaaacaatcagcggcgtcagagtaatctatccggggattttacacgatacaaccacggaaacattggaacaggaattgccccaccaagtcatcaaagggtttagacggaagggaaaatacctaatcttccttttgtcaaaaggcagtttgattgtccatttgcgcatggaaggtaaattttatattttgccccaagatgccggaatcgaaaaacatgttcatatcgtgatttattttgaaagcggtaaagccattcattatcacgatgtgcgaaaattcggaacgtttacttatctgcctaccaatgactggaaggcgatttccgcttatccgatgttgggaaaactcggaaaagatgcgaatgccgagtgggaagaagacgaattgtattatttgattcatgacaaaaaaactcccgttaaagcggttttgctcgatcagaccgtgattgcggggctcggaaatatttatgtcaacgaagtttgctatttggcgaaagtccatcctttgcgcctggcatcttccatttccaaagaagaagccaataaaatcagtttctttgccaaaaaggttttggacgaagcgattgaatacggcggaaccacgattcgttcctataccagcagtttgggtgttacgggacgctttcaacagtttctccatgttcacggcaaagaaggcgaaaaatgctcggaatgcggcaccgaaatcatcaagttaaaagtgggcggtcgcggaacctacatttgccctaaatgccaagtcttaagacccaaagttgtggcgattaccggcggcattgcgaccggcaaaagcaccttggtcagacttttaagggaagccggctttcaggtttgggtggccgacgaagaagtggatcttttataccggaaaaaagccgtaatcgacgaggtggccaaacgctttccggaagtttgcatcgaaggaatcatcgaccggaagagtttgggcaaacttattttttcggacgaaaaggcgcgtaaagacttggaagccatcattcatccgtttgtttacgaagctttggatgagtggatcaaagaacaccaggacgaaaagtttgtgtttgcggatatcccgttattatatgaaaccaatcgggaaaaatgctttgacgaagttatcgtgataacggtcccgttagaaatcaatgtccaacgcctgatggccagggacggtatcgacgaacaatatgccatgcaaaaaatccattcccagatgccgctcgaggaaaaagcggttaaaggaaattatgttatcgataatgccggctcgattgtcgatacggcgcatcaattgaataaaattctacaaaagataaggagatgaatgacttgagcggtgaatttttagtaaaaagcgtagctacctcggatacggccagtcaagaattgttaacccattattatcgcaatgattacaatacggtaaaaaattgtgttttggaagttgccaaacaattgaattataccgtggaaacggtcgacgaccgcttcaaagaaatcttcttgcaaggggcgaaaagtcatatcattgtgaatatggtcaatattacttactatgaaacagcccttgatttgactgtatacacatattggaccttaaccaagaaaaaagctgtccagatcgtgacggatttctacgcgcggtgcgatcgcaagctcaattttaaagggaaagggttaactaaatgaaaaaaatggaagattatcttcttgccgatcattttgtggtggtcattcccgatattattacaccctatgaacaaaaaatcctaacctatttatatgcaccgtttctcggtccccaagccaagtcgttatatacaactttttacagtttggtaaaaccgggggaaaccgaatcggaaatgatgagtcattcagctttctttaatatcatgcaaatcaaaaaaccggaaaaatttttggaagaccgctccgttttggaagcgctcggtttattggaaacttatttttatgaaaccaaagacggcgaacccaaccgctatatctacctgatgaaaagagttttggatccttatgctttttcccaagaccccaatctgtcacatcttttgcgagccaaaattggcgacgaaacttacgagaaaatcatggttgatttgttgattcggaatttcgacatcagcaagttccaaaatatttccaaagcctttgacgaagtgtttaccatcaccgaggatttgccgatgattgatttttccgcttggtgggtcgacgcgaaaaacaaaggtgtcagggtgaaaaacgtccatcaacaattcgaaaatatcaaagtgcaattgttggctcagggcgattgggcaccggaagttctcaatgacccgaggctcaaaaccgaaaccaaccgttattgctttttctattgtctgacaaccgaagaaatggctcaagccattctgctttctgctacttcagattatcaaatcgattacgagaaattgccggaagcggtaaaaattgtttatgccaacaaaaagcagccggttgctgtgaaaaaaatcggcacagttcttcctaaagcaaattcggaattggtaaaaaaactggaaacgacctctccggccaaagtattcgaaggaaaaaccggcacggagttactgccgaacgaaatccaaatcttcgatcaattgcaaaggaaaaccggtgtcagtatcggtatcatcaatgttttgatgctttatgttttggaagaaaaaggnnggagaagtaccgagttacaatttttatttaaaaattcttaatacttggattcgtaaaggcataaaaaccaccgaggaagcgttgagatatatcaattcgactcccctttcgcgaaaatctccgcgcaaagaaaagccggttcccgaatggttcgannagaggaacgcaaaaagcaggaatccgaagaaaatatgctttccatggaagaattggaagccattttcaagcccaagaaaaagggtaaatagaaacgaggtatgtttatgaacaatgtaaaagcaaaaaaagataccaaaacaccaggcgaacaattatcgatgcatcaaatggtaaacggcgttctaaaaaaccctgaaatagcccgtttcgtcaaagccaataagttgaccaaagaagatgtcgaaaacaatttatcgctttttttggcctttcagttgcgaagcgaaatctgccaaaactgctcaggcttggataagtgcggtcaatccctccgaggaaaagagcctttcctcgataatgacgaaggctatttggttttggacatccgggattgcaaatatcagcaaatagaaaacgaacgaattcaaaaaagcgaacgcttggaatttatcggcccgattccgaacggctctaataccgatgatgttatcgtgaaccagaaaagaagagcgattctttcgcaaatcaataaattcattgaaaattaccctaaacctcaaaaaggcatttacctttacggtccgtacggttgtggaaaatcctttttgatgtggcatttggcccgccaattgaccgaactcggcgcaaatgtcctttttgtttattatccggaatttgtaaggctcatcaaaagcaccatcggccgggacagcggaatgtttgacgatttgaccaaccaattgaaagaagccgaaatcctgattttggatgatttgggaggagaaatgtcttcggccttcattcgggacgaagttttgagtccgattttgcaggaacggatgttgcaaagaaaaccgatgtttgttacatccaatttaagccgcgatcaattgacggaacacttgcgcgataccggaaaggattccgatatcgttaaggccgaaagaattgtggaaagaatgaagactttgatggattttattccgttggatgacaaaaattaccggttgtaatctgaaaacctgtgaaagaggaaaatttaggcaatcgagttctcagacgctacagaaagcgttttttgggtccaaacgattgacaaataggtataaatcgaatataattaagcaaaataacaaaaatgcgacgaatgggacaagataaaaggataactttttttcagcgaggtaggtttggtggaagctaccaaaaaagcccttttgttaccacccaggagcagctcaatcgaaattgagccggatcaagcccgttatgcttaaagaggcaaaaaacagtcggaaaaaccttgaataaatggttttttaatgttttttgcgaattaaggtggtaccacgaacaacactcgtccttatccagaggatgagtttttttatttcacgataggaggacattatgaaaatctattttccagacggaaacagtaaagaatttgcgcaaggcgcaagtgcttatgaaatagctcaggctatttcggtaagtttagccaaaaacgccattgcagcaaaagtggatggcgaactctatgatttgcatcggccgattaaccacgatgcgcatttggaaatcgtaaccgataccaaggaattgaccgatttgcttaaccattcctgtgcgcatttgttggcccaagccatcaaagaaatgtatccccaagcgcttttcggcgtcggcccgaccatagaagaaggcttttattatgacatggatttgggcgatgtcaaaatcagcgaagaaaatttcggggaaatcgaacgcaaaatgttgaaattggcggaacaaaactttccgattgtccgcaaagaactttcgcgttccgaagctttggaatttttcaaaaatgacaaatacaaagtggaattgatcaacgatttgccggaaggcgaagttattaccgcttattcccagggttcgtttacggatttatgccgcggcccgcatttgccttcgaccaaatggcttcgtcatttcaaactattgaacgtaagcggtgcttatttcagaggcgacagtaaacgcgaacaattgcaacgaatttacggaattgctttcttcaccaaagaagaactgaccaagtatttggaacttgtggaagaacgcaaaaaacgcgatcatcgccgactcggaaaagagctcgatttgtttatgattagcgaattcggtccgggattcccgttctggcttccgaacggtatgattttaagacgcaatctcgaagaattctggtacaaaatccatacccaagccggttaccaattgattcaaacaccgattatgctcgataagagcctgtgggaaatttccggacactggacaaattaccgtgaaaacatgtacgttgcggaaatcgacgaccgggaattcgccattaaaccgatgaactgtccgggcggaatcttggtttacaaacgtgacatccattcttacaaagattttccgcttcgtttggccgaactcggtttggttcatcgccatgaagcaagcggtgctttgacgggactcttccgcgtacgaaactttacccaagacgatgcgcacatctatttgcgttttgaccaaatcgtcgacgaagtggctagattaatcgacttgttcgattatgtttacggcattttcaacctcagttatcatatcgaattgtcgacccgtccggaagaaaaatacatcggctcgattgaagtttggaacaaagccgaagaagctctggcggacgcctgcaccaaagcgggtcatgagttcaaagtcaatccgggcgacggagcgttctacggtccgaaactcgactttaaactccgcgattccatgggccggatttggcaatgcggaacgattcagcttgacatgaatttgccggaacgttttgaccttcattatatcaacgaccaaggcgaaaaggttcgtccgattatgctgcaccgcgcgctcttcggttcgctcgaacgctttatcggtatcctgattgaacactatgcgggagcatttccgctctggcttgcaccgagacaaatcgttatcgtcccggtcaacaatgcgtcccacggcgattatgccaataaactaaaggaaattttggctgagcaagatttcagagtcgaagtcgacatgcgcgacgaaaagatgaattacaagatcagagaagcgcaaaccaagaaaatcccttacacgattgtggtgggcgacaaagaaaaagacgaacagcttatcacttaccgtccgtacggtaagaacgaatcgaagacgctttctatcgcggaatttgtcgctaaactaacagaagaagtgaaaaccttcggaaaaagcaaagaataaagagttattttcgcattaagatgttcatggcaaaacaagtggagcgtttatttaaaaaaacgctttacggaatttgtcaaaaagcttatcaaagcaaataaaaagactatcattttcaaaaaggaaagggtagtctttttttgcctatgcctataccttaagcgggatttgtcatataatgggtttgaaaggaaggagtatatgaatatgagtatgaatataaatccaaacaaacgcttcacaagcggctatgatgagtatgtcgtaaaacaaggcgattcgctgtatcaaatagccaaattgttcaatacgaccgtagccgatatcagcgatgccaatatgttgacgagttccacgatttatccggggcaggttttgatgataccgaaagcaggcttgcaacaattcaccgttttcgaagattaccgtacggttgaaggcgacaccatggcgggaatcgcccaaaagaccggcacgtctttggcactgctcggaacctataacgatttcggggcgttgaaacttgagaaaaaccaaatcgtcaaaatcccgcgacggggaggaacttatcagatttcggaaggggatacggttagccgaattattcaccaaaccggcaaaaccgcccaagaattgctggaacttaatgcgggtacttggctgaaaaaaggcacaaccatccgtattgcttaaaatcaaaacaaaatgttttgtgaaaaggctttgtgccttttttctttttgcgtaaaaaaacaacggcttttggcaaaaatatggtataatctatatactatgaaatatgaacagaaagtatgtgatgtctttatgaataaaaaagaaacagtaaccgtaatcggagcggggcttgcggggagcgaagccagttatcaattggccgaacggggattcaaagtcaaactttacgaaatgcgtccgaaaaaaatgactcccgcccatcagacgggctttttttccgaactggtctgcagcaattccctccgagcaagttctttggagaatgcggtgggggtgcttaaggaagagatgcgccttcttgattctttgatcatgaaggcagccgatgccacgaaagtggaagcagggggagctttggcggtagacagggaaaagtttgctttctttatcaccgaaaccttaaagaaccaccctaatatcgaaatcatcaacgaagaggttacgaaaattccggagggaaatgtcattatcgcaaccggtccgttaacgagcgacgctttaagcaaagaaataacgctcctgttgggcgaagatgatttgtacttttttgacgcgacggcgccgatagtcacggccgattccatcaaccgcgatattgtgtttgaagcatcccgttacaacaaaggcgaagccgcttatcttaatgcccccatgaccgaagcagaattcgaccgtttttacgaattcctcatttccgcatccaccgtgcaaaccaaagattttgaagtcaaagttttcgaagcctgtatgccgattgaagaaatggccaaacgcggcaaagaaaccttattgttcggtccgatgaaaccggtcggtttaaccaatccgaaaaccggaaaaagagcgtttgcggtggtgcaacttcggaaggacaatgccatcggcagtttatacaatattgtcggatttcagacgcatttgaaatttccggaccaaaagaaactgatttcgctcattcccggtttggaaaaagcggaaattgtgcggtacggggtaatgcatcgcaatacctatatcaattcgcccaaacttttgaacccgggtttccaatataaaaacaaccccaaggtgttctttgccggtcagatgacgggagtggaaggttatgtggaatcggctgccagcggattggttgccggaataaacatggcccgaatgttggaggccaaaccttttatgaccttaagcgcaaattgcgccatcggggctttgtcgctttatgttaccaatccggcaatcaagaaatttgaaccgatgaatgtgaatttcggcttgttcaatcctctgagcgataaaatgccgaaaaaagcgcgcaaaacggcttacggcgaacgggctttgaaaactcttcaggaaatcattgtttccgaaaacatcgacagttaaaaacattaatttttttagatttgacagcagttaggcaaaaggattaaatgattgtaaaaaaatcaaaaaagtgctaaaatagtttttgaataatggaggtatcaaacattatgaagtattgtacgcattgtggcactcagttgaatgattttgcggcagtgtgcactcactgtggctgtatggtgggaaatattaacattcaacagggcccaaaagaagaggatgccccaagtaccggatttgccattttgggattctttgttccgcttgcgggattgatcctttggttggtttggaaagatgaatttccgcttcgggcaaaatctgtcggaaaaggagcactaatctgtgttatcgttaatgtcggtttagcgtatgtttacgttattgcgattataatctttttattggtgagccaatcgattaatatcaacgttcctggttttaaccaatttgctttctttattcaatcattaattcattggtaatacctttcaaataaatcaaaatcggttgattatcggaaaatgaaacccaaaacttcgtcaaagaatttttggtttttttatatctaaaattgacatatcttggaaataattgaataatgaaaaaaaatattggggggtaaaaatgaaatacattattggactagatcttggaattaataatgtgggatggtcaattgttaatcaagaaacaaatgaaattgtagattgtggagttgtacgctaccaggaaagtagtgatgctcaagagcgaaggaaactccgtgcatcccgcagattacgcaatcgtaggttgcatcgggtggaaagacttgctttgctttttaaagaaaatggtattccgacccaaagaacaatcgaacctgaactaataactaaaagagcaaagggattaaaagaggaattgtctgttcaggaaattgttaatattatttattattttgccatgcatcgaggttatattccgtttgatgatgagaaacaggaaagggaagtagttcaactggatgacaatcaatttccgtgcgaatttattatcaacgaattcaaaaaatacggtaaataccgtaattcgaacaagttaattaaatgttcggatattattcgggaaattaaacaaattcttgaaacccagaggacttttcatccagagttaactccagaattaaccgataagataatcaaaattattacaagtaaacgggaattttatgaagggccgggaggagcaagaattaatcaattgactccttacggaaggtttagaactgctgccgatttagaagaatataaagtcaatccgcaaaaatacaagtatttgtatgaaaaactaattgcaaagtgtaaaatagctttaggcgaaacctgtgcaccaaggataaattattttgcggaagaattcaatttccttaacgactttattaatatgaaagtaaaagatgttactttacttcctcaggaatttgcatataaagttgatgaaaaaggaaaattatcgggcgagactattttggaaataagagattatgttttaagtaatgaaactgttcgtcttgataaaatgtttaaacaaattcttggaacaggaattgaaaatattgaaggatatcgcattgacaaaaataaaaaaccggaagtatcgttgtatgatttttacaaatacgtaataaaacaattttctcaaaataatttaaacccgacttggctttacgacaaggacaaaaaaatttacaataaaacaatgtatgttttaacagtagttccttccagtgtacaaattgaagaaatgcttatcgaaagaattcctgaatactctttttcccaagaggagattaatgttctaaaaggaataaaaacaaaaaaaatcaccaataaccgaggaatgtaccattcgttaagcgaaaaagtattattaagaactttagctgacatgaaaaaaacacagtaccaattaaattacatgcagttgatgaaagaattggactacgaaaaggaagcaaaagagtactttgagaaaaactatacaaatcgaaccgttgaaccgtatcttgttgagaaaaaatacattgatggattaattgcaaatcctcaagtgaaaaaaacccttcgaaaagccataagcgtcattaatgccatcatcaaaaggtataaagaatatcctaccgtaattgccattgaatctacccgcgaaatgaatagtaaagcaaaaaaagatgctattataaaagaacaagcaaagctagaaaaattaaggaaagatgccataacatttttagaagaaaatgatttgcgagttaatgaaacaaatattctcaaggcaatgtgctataaagaaaccaatggacactgtatgtattgtaatactccgattccagcatctcaattatcgactcttgaaattgaacatatactcccaatttctcagtcttatgatgattcgtttgataatattacctgtgcttgtttaaaatgcaatatggaaaaattaaaaaagactccatacgaatttttaatgagcattaattcatatgaaccatttaaagagagagtgattgatttaccaatctctgacaagaaaaaaaacaatttgctttttgaaggagatatttccaaatatgaattaaagtttatcaatcgtaatttgcgcgatactgcttatggttcaatggccttagcggaagaattaagaaaattcaatgtctttttggaaagaaaaacaaaccgttatataaatattgtgacaattcctggtcaaatgacctcaaagatgannatgagaagaaaatatgaattggaagaaaaagatcgcactcaattgtaccatcacgcagtagacgcaacaattgttgcaagtattgcaaatactccagttggtagattaataattaaaggacaaaatgacgccaaattttggtttaaaaacaaagaaaaaaggttagaattatcaaaactatttccatatgctgaactcgaaaacataaaggaaataaaagagttaatccccaaaaaaggtgaagagttactttgcgaaaaagatgatagaataaagcggtcttttgaggttaaaaaaagcataaatcaacaaatagcaaatcaaaatatcgtaaagtataaaatcattgatggagaatattatttagtacaacaaataaataatatttatgaggaaaagagcaacgatattttttataaactatttgatgaaagcaagaaagataaaatcctattatgcgaattggaagacccaaaattatacaatagactaagggaaatattttatgcacatgaaaaatccaaaattaacccttttttggaatattgcttatttgaacacggcattgaaaccacaccaaataatttcaattatttgattcacggaataaaaaaatctccaaataaaccaaatagtcctattgttaaaaaattgcgttatttggaaaggaaaacaaatccgtatatttttaaaaaagcagatttaaatcggaaaaggaataattttggagaatttgttattccaaaattaaaagacaaaaccattaacggattagatagtctttcacagtattgtgtggaagtatattatgactcagatgcgcaacgctttatctttttgccgatttatatggtaagtgttgatatcaattccaagaaaattaaccgcgaagaacgttattataaagaaacggttgcaaggttaatcggtaaaaaaaccccactttatattaccaccctttatactggtaattggtgcaaagtagttaagagggattcctctttttcacaaggaagatttatttattatcataaaactcataacaaattggtttttggaaaggacggatcttactcgtcttcagatgccttttatatgaccactaacgataagcaaataattatttatggcttagatattttaggaaaaaaatataaaatacttgactcaaatgacatcatatagtataataaaagtgcgctagacgtagcgcataacactcaaatttcacagtcgttcctattataacacgaatgtggaacccagggagaggagtcaaatcctctcttttttttcaacggaggagatatgggttggagatatgtttgtattgatgaagcaagtcgaataaattaccgattaaataatataggtatagtttataaagatgaaacaatttggataaatcttgatgaaatagattctgttattattactgattctcgctgtaatacttcaatcaggttattgcaggagttggtggaaaaaggaatcaacgtgattatttgttcaaataatcatatgccagttggtttatttttgccgtttcaaaaccatagccgaagttcaaaatataacaagtgtcaattggaatggtcaatagccattaaaaaagctgtgtggaaagagatagtgaaaaataaaatagctttgcagagtgcggtactcgagaagtggggtaaaacgaataaaattccattattgactcaatatattttggaaattgaagatggcgatccaacaaaccgcgagggtttggcggcaaaagtttattttcgcgagttgtttggtgaaggtttttccagagaaagaagagatgaaggaattataaactcttctttgaattatatttatcaaattgttagatcaaagattgctcaggtaattgtagggcatggttatattccgagtttgggcattttccatattagtgaatataattattttgggtttgcggatgacttgatagaagtcttcagaccaatttgtgatcattatgtaatgagattgttgcaaaaggaggatataaaatttatgtcgccaaccttcaaagaaaaactggttgggatattgcttgaacaagttgaaataagtggttccaaacaaaaggtatcagaagctattaaaatatatgtccgttcggttacagatgctttaacaaatcaaaacatcgacttaattcaatttccattttttatccatgaaaagtgactatcgaaaaatgaggatgattttgttttttgatttaccggtaacggaagaggatgatttgaggagttatcgtatttttgtaagacaattgaaaaaaataggtttttacatgcttcagtattcggtctatgccaaatcgcttacaaatgcttctgattttgataaggtaggtttaaaagtaatcaatatattgcccaaaagaggacatataattatccttaaattgacagaaaaacaatatgacgatatgatttatctaagtggcgaaaagaaccgtcatgacatgatagttggatcaaaagaaatagtttattttggtggtggcgactttgattgaaatgaatgttatttctgacaaaataaaagtcgattccttatttctcaaaaaaaagaataatattattgttgagaattaccatgttctgcaaagtttcctttcggtgttctttgatatcaacaaccccaatacaacaatagaaataggaaacaaaaaaattgatgccaaaaaagcatatgtattgaatttgcttgattatgaaagcttgtttattcaaaccagtcttagaaaagggtcattaatgtttgattacataataaaagaaattgaagataaacttgacgaagcaagttatcaaataaatcaatttctcgacaaagtatttcttgaaacggtaaagaattctgttattaagtataatctgacatttgatatagatgtggtaaaactagtcacacaatttgctgaatttgaaaaccaaattgattctcgtgaatatctgaaagtcataaaaatactattacaatcttttattgaaaaaaatccaaataaaaccataatagtgtttacaaacgaaaacattatcggaaatgttttagatgatgtagatg

SEQ ID NO: 1528 - DNA, 15668 bp, synthetic construct
  source 1..15668: mol_type = other DNA
  misc_feature 1..15668: note = Synthetic
ggaagtcgtatttattttaagaactttctttttcgtatatataggtatttcaatgcagatacacagtgtgttttcccttttatgcgggcttttgttcacggtggtaatctttttggcaagaataccaacggtcaattatgttatggaaaagcaaatcagccgtatagattgtgccgtaacttcaataatggtgcctaaagggttagttactgcggttttggcttctatgataatgcaatctggtttagcaggcggtgcggttttacaaaatactatttactgcgtaatacttttcagtattatttttgctacggtattttctttcctgatagaaaagggacatatggccaaacttacggattttctttttaaacgccacggggatttttctgttgctgtattgcaggaaagcacaaagggcaaagccgccgccaaaagtaaataatccctaaaagattgcattaaaaacccgtctttacagacgggtttaaattttcggtaattcttgtttagtgtaatttataatttatatacaaaagacatttgcacatcttttgtatggtccctgcggtaggagaaaaaagtttccttattacagcaggtacactcgcacgagcagggattttttgtattttctattttaaggccgcactctttaagttggcgcataatatcggcagtcaaatccacaaataatttgccgtttctttttattactgaggagggggcaaacttatctgccacatctttttgtacttcaaagcagcaagcgttaatatgcgggccgatataggcgcaaagttccgcatcctgccctgcgtgctgcaaaagaagtttagccgctttcttcggcaaacctgccgcaacgccgcgccagccgcaatggcaaaggcttacaaatttgcctttgctgtcccaaaggtaaagggggacgcaatcggccgtaagtatcataacgccgcagttattaaggcctaaaagccagccgtctgcttcgtgaacttcctgcgctttgtagtctgccaaatcctgcggggtaagaaggctgatgattttatcgccgtgtacctgttttaaacctaaaatcttttcctgagggatattaagggttttaaaaaagtttattacattttctttttccctcatattgccgctttcgcgggaaacagtaccgctgattatgcctaaatttataagtctttcgtcggaaaatattttcatatataaaatctgctctctttaactttaagttttttgccgcctataatatttagggcaaggcgtgcaaagcgctcgggggagtcgcttgcgtaaaattgtattttggctttatttttggtttttaaaagtttctttttagccaaaagtgcttgggcgcgtttggcaatttcctctgcggaatctaccaaagcaacttttttgcctaaaaaattgcctatttcttttttgattacagggtaatgcgtgcatcccaaaattaccgtatcggctttttcagcctttaaaggggtaagatatttctttattgccaaagcgcaaatatcgcttgcggcaaggccttcttctattataggtacaaaaagcgggcaggcgcattgggtaatatttatttttttatctttctttttaatttgcttaatgtatgctttactttttattgttgcttcagtacccaaaactatgacatgtttatttttacttactgccgcggcgcaggccgcaccaggctcaataacacccaaaacaggcacttttatatgccttttaagtacgggcagcgccaaggccgaagccgtattgcaggcaaccaaaataagttttacatttttagtttccaaaaatctggctatatttaaggaatattccgttacggtttcctttgattttgagccgtaaggcacatgggccgtatcgccaaagtagataagattttctttcggcagaagtttatgcaccgccctgaaaatcgtcaatccgccaaggccggaatcaaatattcctatggatttttcttcgtttttcatactctaaatattatacactttttatatctggtactaaactccggctatggccggtttttattgtctgcgtttgtattttttatttgcaaaatattacaaaatattctcttttttttataaaaatggtaaaatatttaagcagtaatacaaaggcatttgctttaacggatttttccgggatggtgtaatggtagcacaagcgcctctggagcgtttagcctaggttcgagtcctagtcccggagtgatttttaaacatttctccctgatttaacagtcagggagattttttattttatcagtaaaacacataaaaaacagggctgtttgaattgacaaacagccctgtaaaagtttaagcggagcagaatttattttactaattcggctttttctattatcacggcttctacgggtacatcatcgtgggggtatttccttgttgtggctacgccttcaatggcgtcaacaacttcctgccctttgattactttgccgaataccgcatatccccagccttgcggcgtttggcttttaaagtttaaaaagtcattatcattggtattgataaagaactgtgcggtggcggaatcagggtccatagttcttgccatagcgatagtatatttattgtttttaaggccgttatcggcttcgttcataatcggggcgcgggtgggcagctggtccatatcggggttaaagccgccgccctgaatcataaaaccttttattactctgtggaatatagttccgttatagtgtccgtcttttacatactgcacaaaattttcaactgtgtttggggcatttttgccgtcaagttcaagcaatatttcgcctttatttgtctttaaagatacttgcattgtattctcctgattggtatttgtttgtgaaatttgtttcgtttcctgttgtgcgggggcggtagtattgatttcctgcttggcgcaggccgcagcaaacattactaaagataaaattgaaaataatttaattgttttaagcattgtttttaccataaaaaagcacccccggttaagggagtgctttttaaacttgttaattagaagtagaatcttgcagcaacagcaccgccgaaaccgcttctgtcagataatacagcaccgtcttttttaacttttgcgccaaagttatatcttaaatcaagacctaatgcagaaagctcggtaaacctatattccgcaccgcctgcgatgtggaaaaaagttttgtttttgtgctctttgtcaccaccaggtataccgctggcttctaattcagtgcgcataaaggtgacaccggggcccgcccagaaacttacattctttacgccgttatctctcttatagtaaacggtaatagggaaagcataggtgtcttcagttattttagcattggtagcatttatttttaattcgttctcaccatagaagtcaaaacctatttttgcaccaattttattggcttcgtctgcagcatcaaaaggcatttcataaaggccttctaaagagaaaaccccataaccttctgttaaatccgtgccgcctacattaaggtccttcaagctcttagggtcgttttcgccagcgcctaatttaacggcagcaccaaaacctgcaaaggatgccgttgacattactgcaactgcaattactgctaacatcagtttcttcatttacatctccttatgttaagtttactgtccttaataaagccatttaagcatattttgcaaacaaatagcaatataatattttttgggaaaataatctcaaataataaagcccccttgtgggggcttattaagagcgcggataactaaaaataataccttgcggtaatggcttcattaaagccgctcctgtcggaataaacaagattatattttttgattttcgcgcaagtcaggtatcttaaatcaaaccctaaagcaatatgtctgcttaaacggtattccgtacctaatataaaatgcggggctcctttccatttatactcattatcgttattcaaatttacatcacttctgataaaggacacgcctgcccctgccgtaaaagagaaatttgttgtttcaggtgcgtatttataataagcggttacgggcagggcaatcgtcttttctgttgctttattaatgcctatggtataagtgtttttgccatatttttcaaaacctatttttatgcctattttatgttcgtcatattcacgcgggtctcccaaaaaatcaaaattaagaggcttttcgtaaaaggcttcaagtccgccgaaataatcgtgcgtggacacacttccgccgtatgtatagtggaaatcatatatactctgcggatgattgccgccgatacctgctttaactcccaaacccagttgggcaaaggccggtattgcaaaaattactgatagtactgtaagtaataattttttcatttatttctcctataatttaaagtctgttttcggcgtcctttttaaaggatgaattctgccggtaaatgcagtgcattttgcctttttatagacttttgttttaacattttgttaaatattcctatatatgcaggctctcgctaaagatattgcatatataggtttctggcagagtttttgtactctgcatattttattggtactacttttataagtaaattataagttttatacttattaaagtcaagtatattttattgtcttatgtctgttaatactaagataaaacagttgatgaaagagcaaggtgttacgcaaaatgctcttgcgcaaaaattaggcataacccaagccgcattaagcaatatgttaagcggggataaccaaatacgccgccgtacattggataaaattgctgcagctttaggcagaacggcggaattcttccttgaggataaaatcgttgatgaactttccggcaggattgaagaattagaaagggatataaaaccttttaaaatgcctgataacttgttaaagtgttctatgcgccctgatttatctaaaaagatgtctaaagtttcaaataagccttccgcttgtaaaaatgtttccgcagatgccgcacgcacacaactgccggataattatcaggggcaggatatgacaggctttttctatacgcttttgcaaaaggctttgagcagaattgacaaacttgaaaaagaagtttccgcattaaaagataaaaaacaaaaataatttttgtctttaaattttgtcttatatattccaaataaccgtctgttataatttgctataattaaaatattcggggcatggctcaatggtagagcgcccgctttgggagcgggaggttcccggttcaagcccgggtgccccgatttttttattaaggaggctacccccgatgacccttaacgccaaacaaacggcaattttacccgcttatacaaaaatttttaccgcagataaattaaaacccacagccaaatttaaaggtttttatgttatagtttccaaaacgctgaaatccccgtttgtgtttgacagtttaaccctttctttaagtgcaaaacttgataaagacagtgccgttttagttgaagccgcagtaaaaacagaaaagggctggagcggcctttataaaattttctatctttcaaacgattataaaaaaacttttaagccgcaaaaagatacctgtgccgtcgttgattgtgatgttataaaacccgtaaaaggcggccttgcctataaataccaaattacggttttgggcaaagcaaaattaaatttccttactgccgcttttaccaaagcgtgcgcaccttacgacccaattttagcgcaagacactcttgaacttaaagattttgaaatacctttaagccccgtctgcagggaacaatatccggataaaaatttaaggggtaaaatctgttcgccgtgtgcgcttaaaaccgtgcttgattattacggcaaaaaagttcctttgcaagatgttgtaaaaggcgtttacgaccaagaagccaaaatctgcggtacttggcctttaaatacggcttttgcttcccagcagggtttggcgatgggcgttgtaaggtgttgttctttggcgcaggcggaaggggaactttacaaaggccgtcctttaatagtttccatagcatataaggaaggcaaacttaaaaatgccgccgttaaaagcaccgaaggccatttggttgtaatctgcggcattgataaacaaggcgatattatcgttatggacagcgcggcaaaagatgaaaaatccgtacgccgtatttataaccgcaagcagtttgccgccgcttggcttaaaaacaaaaaaggcatagcctacgccataggggaataaagtgaaaaaatttcttattttgtttgtttgtgttttaggcttatttgcgtgtaatgcgcaaagggataaaagtaatttaacgcttgctgtggtgggggaagtggaatcttttgaccctgtattttcctatgacggctttactcacggcgtacttttaaacatttacgataccttaataaagtttaaaggttcttccttaacggaatttgagccgcttatcgcaaaggaagtccctactgtggaaaacggccttattaccgacgagggcaaaacttatacctttaacatcagggaagatataaaattccacgacggcactcccttaactgcggaagatgcggcctattcccttaaaaggtttttagtttccgataatgtcagcggcccgtccactttattgttagagccgattttgggtataacatccacaagggataaaaaaggaaataaaattttagattataagacggtggaagaagcaatttctaccgacggtaataaacttattatcaaacttaaaaggccgtttgcgccgcttttatcaattttggcaaggtggtcttatgtaatcagcaaggattgggctgttaaaaacggggaatgggacggaactgaatccacttggaaggaatttaacaataaaggcaaaggggaatctgctttgtttgataaaacaaacggcagcggcccttttatgcttgcgcgttgggataatgccgcaaaaagggtttaccttaccgccaataaaaattattttttgggtgcgccgaaacttgacagcgtacaggttataacggtacccgagcaaagcactatgcgccttatgcttgaatcgggcgacgccgacattgcggaaattgcccccgcctttacgggccagatagcccataaccccgatttggtggtgcaggacagattgccgcgccttaaaaccgacccggtaatcttttttactttaaatatcaaccccgaggccaaccccgatataggcagcggccgtcttgacggtaaaggcataccgccggatttctttcaggatataaatataaggaaggcgttttcctatgcgtttgattatgatgcttttgtaaaagaatctatggaaggcaaagcaccgcgtgcctgcgggcctgtgccgcccgggcttgcctcttatgacgaaaacgcaccctgttatcatcaggatttagccaaagccgaagaatattttaaacaggcttacggcggcgaagtttgggataaaggttttgaatttactttaacttataatacaggttcgcaaatgcggcaaaccgcttgcgaaattttaaaacgcaatatagaatctttaaacccaaaatttaaaattgaactgcgcggtttgccttgggcttctttcttggaaaagacacaagcttccaaaatgccgctttgggcgcgcggctggattgccgattaccccgatgagcataattttgtctttccgtttttacactctaaaggcagatatgcggtggcgcaatctttcggcgacgaacagttagataatcttatagacatcgcagtacgcacaaccgatttaaagcagcgcaaaaatatgtaccgccaaatccagcagataagttttgataaagcggcgcagatttatactatccattcccctggcgtctgggtttacaggaaagaagttaaaggttttactgataaccccgtctttatggggatatggctttatcctttatataaagaataatttacaagagatacagttttttgttataatatctgtgtcggcgcccttagctcagttggttagagcaatccgctcataacggatgggtcgcaggttcaagtcctgcagggcgcatttcaatttttttaatgaaccccggtttcggggtttttttatagaggcgcatttatggaaaataaagaacagcaaaaccagcaaaaactttccggcttggaagatattatcaaaaataagtatcaagaagcccaagaccttaaagccgcaggcattaacccttatcccgcccacattgatgtaaaaaacacctgtcttgaggctaaaaatgcaccggaaaatacccaaattgcaacggcaggccgccttgtgcagttaaggattatgggtaaagcggcttttgcgcatatcagggatgtaagcgcaaaagtgcagatctatgtgcaaagggatttgctcggtgatgataaatacgctttctttaaaaagcatattgccgtaggggattttgtttttgtcagcgggcatatgtttattaccaaaacgggggaaaagacaatcaaagccgataaggttgaacttatttccaaagcaatccgccctatgccggaaaaattccacggtttacaggatacggaagtgcgcttccgcaaccgccacttggatttaattgccaatgaagaagtaaaagatatttttatcaagagggcaaaaattatttcttctatccgcaaaaccttggacgcaaaaggttatctggaagttgaaacccccactttaacgccgagcgcgggcggtgctatcgcaaagccgtttgaaactttccataatgctcttaaaatgccgctttttatgaggattgcccttgaactttaccacaaacgcttaattatcggcggtttggacagaatttacgaaatcggcaaaatgttccgcaacgaaggcattgataccacacataacccggagtttacaatgatggaaatgtatcaggcttacggggatgtaaacactatggcggatttgtttgacgaaattttgggtaatgccgcaaaagcaatcggcgtggaaaaagtaaattacagaggctttgaaatcaatcttgttccgccgtttaagcgtgtgtatatcccgcaggcgtggcaggaaactttcggcgaggacatacacgagattttaaacggcagagcgtttagaagggataaacttatcgcccttgccaaaaaagcgggcgttgcctttaaagaagatgaaccttcagataaaatttatgatgttttgtttgaggaaaaaatcgtcagcaattataaagaccctgtgtttatgcttgattatcctacggctgtcagcccgttctccaaaaataaaccaggcgatccggaaattgtggaaaggtttgaggtgtttgtcgcaggcgggcaggaactcggcaatgcttacagcgaacttaacgaccctgccgaccaataccaacgcttgaaagaccaagccgccgccaaagcgcaagacccttccaacgaagatgccgatattgttgatattgactatatccgcgctatggaagccggtatgcccccgacaggcggtatgggtatcggcatagacagaattacaatgatgcttacggggcaggattccataagggaaattatccttttcccgacgcttaaaaatcaggaaaaataattctgtttttgctttaaagtacaaaatttacaaacatctgcgtatttgtttacgcagatgtttttttgtactgaaacaaatatcataaaatatatatttttgcgaccggatgtcgtcgccttataaagttatattataaaaggaaagtactattaatatttatgtagtataatagggctataaaataatttccgttttttacctttattttggagaaaaacttatgacaaaaatattttcttttgatttaggcagtgggagtataggggaatgtgtcagggaaggggaagaagtaaagcatttaaacagtttacttattgattctgattttgcttcacttgattcaatccgaacacagcgcagggctttcagaacacgccttgcccataaagcgcgggaatcttggtggatacaaattgcacagcaatcgggtttaccaatccccgctacggatataagaaaagataaattcggtaattatgtttttaccgcggatgaaaaaatgcttagggaatttcctaagacaaatgacgaaacaatttataattccgccttgttaaggattgcccttatagaaggcaaaaaacttgaaggctggcaaatttttaaggctgtatggtctgctttccagcacaggggttatgaaacaaataattggaaagatgaagaactttccgaagaagaaaagaaagcagaaaaagaagaacaagatgcaaaaaagcgttatgaggacaaacttttgactttgcctgaaggatgtcgatttccttgttattacgaggcatataaaatggggctttggaatcctcaaaccaaacaaaccgttacccgtcttaaaacctcaaccggaaacgcaaggaataaagacggcagaggggagcaaattatcgcaccgagggatattgtggaaaaggaactgcgccttttgttggaacaagcaaaaaagcaatacccggctttacccgatattgaatatattttatacggcacaaacagaaaagcgcacgcaggtatatatgaacacagcgcaagaaagttcgaatccgaagggcttttaggacaaaaaacgccgcgttttgataacaggataattgcaaaatgttctttgataccaaggcttaatgtttgtaaatcaaaagagcctttaagcaaggaagtccgttttttacttgctttaaaaaatttccgttttataaaaaacgggcaggtcgccgcgtttgattttgaagaaataagcgaactgtttaatattcataaagcccgtttacttgatgataaaggccacgcaaattatattgataaaagagatataaaaaattatcttaaatcaaaacaatatgaaattttttccgaagatgttatccctatgcctaaagacggcgggcgcagccgtttttgccgccctgctttgcgtatcttaaaggaacttattttatcaggtaaaaacccgcacgatttttacagagaaattaccgaaagtattaccaataccgatacccaaaaaggccttgttaaagaggattataaatttttgcttgctatgccgaacgattggtacagtatccatatacccgattttagggaagaagataaaaacttatcacaggaagaacgcctttgcaaaattgataacttgcttaactctataacaaatgccatagtacgccaccgtcttattatgttaatgcaccgtatagaatatttacataaaacttacgggacgccagattattgcattatggaaatcggcagggaagattttttgagtaaaaaggcaaagaaaaaatatgaagatgaaatgagtaaaaattatgcaaggaatatagccgcttgtaaagagttaaaagacaataacatccctattacatataaaaatattgatatgataaaactttataacgaacaaaaaggtataaatatctatgaagtagactctgataaaaggcatttttttaatacggataagataaacaatataagttggaatttattggatattgaccatattgtccctgtttcaaaagacggttctaacagttttttaaataaagttcttaccactaaagatttaaatgaaagtaaaaaaggtaataaaaccccttatgagtggctttttagtgataaagataaatggtcagattatttggaaaatataaaaaagacaaatattgatgtcaactctaaaaaatatttatatttagtttcgcctgatgccgtaaaagaagccagaaggcaaaaggatttgcgtgcgacacaatatatggaaaaacttgccaaaaaattaatcagtttatatttcggttggggggaacaaaccacaggcgataaacgcagaatgtttgtttgcacaggtggacttacagaccaaattcgcaaaacttatagtctgaatgttattttatatgaggacttaaagaaattacctaaggaagaaatagtccgtatgacttctactggggaattggacgatataaaaaagaagagagataataaaaaacaccacgctttggatgctcttgtaatttcatttgcgcgggaaatgtcttacgataaaaagactggcacgcctgttttacctgaatatgcaggaaacaggaaatattttgaagatgccataaataaagttttccctattacaatacggagtaaaaaaccaattttgggagatacaatttatgctttgcgtgcaaggcaggaaggcaaagaactcaaatattatatggtatcgcgttttaatactaatatggaaaaaatatctgatgcccaaaaaaatttaaaaaagatatttgatttgcatgtaaagaaacaatttgaagataaaataaaccaattgaataaagaagaacaaataagatggcaaaaatttttagaagatttaagagcatccggtaaatatactgatgaaatatctattatggaaaatttatctgatgccccaaaaaatttaaagaaaatatctgattctcctataaaagacatttttaaagataaattaaatcaaaagcaaaaagaatgggaacaattcctgaaagattttagaatatgcggtaatcctgttcgtaaaatgtgtatgacggagagttctgcttttacaaaaaaagaagtttttaatgatgatggttcttttaaaaagaatattggcgaatattgtgctatcagtaaaaaagtaaaaggtcaatatataaggccaaagaaaagcaataaaggccaaattatttataatgacggtaaaaaatggatagtaaaacagatttatccttttgacagtgtagccaaaaaacttaaagaggcaaaagagaaatacggtaaagttttattttggcacacagatattaccctttgtatatctaatgagattaaagggacaaaagttatcaaaacagaagataataataaaaaaagaataccttgtgatattttacctgggaaatatcaattaaatacaataagtagcggagtggaaatgacatgtctttcttcaggtataagatatgccgtccctttaaaaactcttattgaagaaggtaaaacatataaagaaaggagttgaactataacaacccatatagtgcatattttaaaccacggaagttttatcggcgttgacaggggttgccttacctgtactttgcctgataaaacgcaaaaacgcttgcctttgtgtgatgtcttggcggttatagtagccgcgcgcggggtttgtttttccggggaaagtttttcccgcctgcttgaaaataatgccgttattttgcattgtgattgtacctataaaccaataggtcatacagttgccttgcaccgtatagtgcatagtgatatttttgaacggcaaataaatatgccgccttctttgcaggctaaattatggtttgctcttttaaaagcaaaaagcgaaaatcaagcctttcttttggacagtttatcaaaggagcataaaatttggcaatatatacagaataactgtttggaagaaggtaatattgcccgccattattggaaggtattttttaagtctttcggtaaaaatgctcctaaaaaacgcgaacaccaagacgcagaaagccctataaacggtatgcttaattatgcttatgccgttatgtcggctttactgcacagaagcattttgatacacggcttaaaccctgttttgggtattcatcataagtatcggtttaggagtaatccattagtttatgatttgatagagcctttacgccctttttgtgattttattttattgcggtatcataaaaaatattcccgtctggaaattgatactttcgtaaaacattgcgcaaaagatatgataaacgcaaatatgaatattggcaaagcaaggaatgtttctctgccttgtgctttggataattatgtgtcttccgtatgtgatgtttataagagcgaaagtttaaaaaatataaaaataccgtctttaaaaggaatttcttttgaagaataaacctacaccaagaagtaaatattatatgggttggctgcttgttttatttgatttacctaccgataccaaagcggaacgcagggaggcctctcgctttcgtaatgctttgttggatagcggttttttaatgctgcaatattccgtctatgctaaaaatgccgtcagcgcagaaaagaagaactccgtaatacacaatttaaaaataattagtccgacaactggcaatgtccaatgcctttttataactgatgcacaatggggaaatatcgttacaataagtgctgcggaagttaaaaagaaacgccaaatagataaaactacaactatcggtgagcagttgcagttttggtaaacgaaaatttgttgttcatactaaaaacaattggttggctggttaatcttgcgtataaaatagaggcaaaatttccatccgtttgttaagacataaccgaaaaagcattaaaatctgtgttttaggcaacttgtgcctgtttggtttataatatttgattggaaggttaatcttacgtatcatgcgatagaggtacggtttccttccgtttgttaagacataactaaaaaagcgttaaaatctgtattatagacaattattgtctatacaatgctattaaaacaaatctgctttttcagtcctgtcaaaacgcaaataatagcgcagatgatgttttagtcattaaaacaaatctgctttttcagtcctgtcaaaactggtacttctgcgccctattcaatttttaaattaaaacaaatctgctttttcagtcctgtcaaaacttatttacttcgaaaacgtgtccgaaaagtattaaaacaaatctgctttttcagtcctgtcaaaacgcaagtggactacacctaccgacattaaagattaaaacaaatctgctttttcagtcctgtcggcagaacttttcaactgcttttattttgacagtatgaaagataaattttcaaagaacaaattattataacctcatattattattttgtactataatatgtcaactgcattttatatcgatgaacaatgctggtaagtttaattttaggcttaatgtccaaattttaggcaacaacggcttaaagaagtatcaaaaatctgcgcctagcgggaatcgaacctgcatcaacggcttcggagaccgctattctatccattgaactataggcgcataaaataattatatggcttttgtaagaatacaaaagcgttaaaaaattttaactgttttataataaaataacaagttccgcgccttgagcgcgtcctacttttctcaattacagaaaagtaggcaaaaggctcgggcttcagtgccgactaaaatttgattttttgttatttgcgggcaactcacaaaaaattagcaaaaacaataaagaacgctaataattttttgctcgg

SEQ ID NO: 1529 - DNA, 23234 bp, synthetic construct
  misc_feature 1..23234: note = Synthetic
  source 1..23234: mol_type = other DNA
gaaccagcgcggcgacgcgctggacgcgcgctggcaggcgctcgccgcctatcgcggcggacgcgtgccggcggaggcgtcgcgtacggcgctggccgcgatcgacacggccgcgcgccaatggcgccgccggctgcgggtggaggcaccgccgccggcgcatgtacccgcccacgccctcggcgacgtgttgctgcacgccttcccggaccgcatcggccacgtccatccgcaggaccggctgcgctacacgctggccaacggccgcatggcgcggctccacgacgacagctcgttgctgggcgaaccgtggatcgtcgccagcgaacttcgcttcgaggcgcaggacgcgcgcatcctgcgcgcggcgccgctggacgaggcgcgcctgcggcgcgagttccccgctcgcttcagcgaagccgaccacgtgcgctgggatccgcagcggcgggcgctggtcgcgttgcgcgagcgccgtttcgatcgcatcgtgctcgacgcccggccgggcggacgcgtcgatcccgcgcaggcggcaccggcgctggtggacgcggtgcgcgaactcggccttggcgcgctgccgtggagcgagggcctgctgcagtggcgcgcacgcgtgcagtcgctgcgcgcctgggtgcccgggctggccgacgcgctcccggacttgtccgacgcggcgctgctggagaccctaaacgaatggttgttgcccgccctcgccggcaagacccggctggacgcgctgtccgcggacgcgttgtcggccgcgttgcacgcacgcgtggactggaatgcgcgccagcgcatcgacgcgctggcgccggttcgcatccgggtgccgtcggggatggaacggggcatcggctattcgctcgacgccgacggcgagccgcaggcgccggtgctggcggtgaagctgcaggaactgttcggactggccgacacgccgcgcatcgccgagggtcgcgtgccgctgctgctgcacctgctgtcgccggccggacggccgctgcaggtcaccgccgacctgcgcggattctgggaccgcacctggccggaggtacgcagggaaatgaaggggcggtatccgaagcatccgtggccggaggatccgtggagcgcggtggcgacgcaccgggcgaagccgcgcggaacgtgaatggcggcgtagcggaacggacggcatggccccgccgccgccactcctacacacgggttcaacgccggaacgaagagactggcggcattccagggccacagacggaacccgacatggaccagatgcttgccacccttcccgatcgcgcgatgcgcgtcgcccaccaggtcggcggcagcctcaagggcgccgtgccggaccgtgccctgcactggatggagaccggcgcggcgctggccgcggtgaagaccggcagccgcgccgcggccaaggtcgtgcgccgcaaccccgcgctggtcgcgaccgcggtcgccggcgccggcctgttgtggctggtggcgcggcagcgacgcaagcgcatggaggaggccgaagccgccaacgagggcaatggcaagccgaagcgggtgcgcgcgcgcaaggcatcgaagaaacgcgacgcgtaacgccgccgcctattcctcttccggcgccgccggcaattcgatcacgaagcgcgaaccgccgccttcgcggtcctcgtaccagaggttgccttcgtactcggcgaggatctgcttggccagcgaaagtccgaggccgctggacaggccctcggcaggatcgttctcggtcaggcgggtgaaaggcttgaacaactggtgctggcgtgccagcggcacgccgggcccgcgatcctcgaccagcagttgccagtaaccgggcgcgctggagcgcaccgagagttcgattgcgcttcccggggcgtacttcatcgcattgctcaccaggttctcggccacctggcgcaataccagcccgtccatcaccacgtggcatttcttcgccggcgtgctgatccgcatccgcaccccgcggctttccagctgcagctcgtagcgctgcaccagccactcgatcgtgtcctgcagggtggtgcgcgcggtgcttgccttgcgcggacccgcgcgctcggcctgggtttccaggtaacggcggatgtaacccagcgcgtcgccggcgctctcgtagatcatttccaggtagcgcggcacgcgctcgggcttgcagccgtcgttgcgcagcacgtcgctggcgaacagcacgctgctgagcgggttcttcaggtcgtgggcgaccaggttgaccaggtcctggcgctgccgtgcgacacgctcgaggcggtcgcgggtgagcttgaggccgacgtgcgcggtgactcgcgcgagcaactcctcggggatgaagggcttggtgacgtaatccaccgcgccggccgcgaacgcacgcagcagcatttcgcgatcctgggcggcggtgaggaagatcgccggcagcttgcgcagttccggatgctcctgcagccgttccagcagttcgaacccgtccatgccgggcatcatcatgtccagcagcagcaggtcgggtacctgcgcctgcgccagttcgagcgcgtcttcgccgttgccggcggtcagcacctcgcaaccgtggcgggtgagcagtgcattgactgcgcgcaggttggcaggctggtcgtcgaccacgaggatcctgccgggtgtcatcgccgctgttggcatatggccttcgtcgctccgtgaccgggggcgccggtccccccggtcggcgcaaactggaaatcaccctagcagaatcccccgtgacgcctgttcatcaccgcaacaacaacgtgaacggttcagctcacgtggccgcggcgggatcgagccggcgccacctgcccggcgccagcccgtcaaggcgccaagggccgatcgacacgcgtaccagccgcagggtcggcaagccgaccgccgcggtcatccgccgggcctggcggttgcggccttcacgcagctcgagctccagccaggaatcggcgacggtcttgcggaaccgcaccggcggatcgcgcggccacagcgccgggggttggatcaggcgcgcccgtgccggccgcgtcggcccgtccttcagcgccacgcccgcgcgcaacgcggccagttgcgcttcgcccggctcgccctcgacctgcacccagtaggtcttgggttgcttgtgccgcgggtcggtcaggcgatgcgccagcgcgccatcgtcggtgagcagcagcaggccctcggaatcgaagtccaggcgtcccgcgggatagacatcggccggcaggccgaagccggcgagcgtcggccgcggcggcacgccgcggtcggtgaactggcacagcacgccgtagggcttgttgaacgcgaccagcatcagccggcctcgcggatttcgcgcgcctgcgcgtgcagccattcgcggaaggcctgcaggccgcggtggtccgccgagcgcggcgggtacaccaggtagtgggcgaaatcgctgggcaggcgccgctcgctcagcaccaccaattgtccggcgtcgaccagcgagcgcgagcgcaccagccgcgccagggcgacgcccatgcccgcgaccgccgcgcggtgcagcgattcaaggtcgtcgaaactggcgacgtagcgcgtcggcgcgtggcgaccgtcgcgcgcgaaccaggcgtcccagtgcgcggcgtcgctttcgccgagcagcggccattcgtgcagcgtggcgtcggtgggccggcccaggcgttcgatcagcgccgggctcgccaccggcgccagggtttcatcgagcaggtgctcggcgaccaggcccggccactggcccgcgcccatgcgcaacgcggcgtccacgccggcgtcgcgctcgaagtccaccagccgttccgaggccagcaggctgagctgcaattgcgggtgctcggcgaggaagccgccgagccgcggcaccagccaggccgaggccatcgacggcagcacgctgatcgcgagcatgtcgtcgcgccgcgcggtcgccgggcgcaccgcctcggccagcgcgtccaggtgggggccgatgcgtgccagcaggcgctcgccgtcggcagtcagcttgaccccgcgcgggccgcgctcgaacaggcgctggcccaggcgttcctccagctggcgcacttggtggctgagggcgctgaccgtgaggtgctgcgaggccgccgcgcgggtcaggttgccgctgcgggcggccgcggcgaagccggtcagggcatgcaggggcaggcggctcatggcatcagtgagggttgaatccagctcaagccagtcttgcaggaatgtcgctttttccgcgccgatcatgcgcctagccttgtctccacttcaacagggcgccccccgcccgggaacgaggaacctgccatgaaccgcatcttcaaggacctgctcgccctccacggctacccgctgccgttcgagtccaccgagaccatcgccgagcgcaaggccgccgacgcggccgccttcggcacccgctacggcaaccgcaccgcggccaggcgcctgttcggcgcgaccgcaggcgcgggcacccgcgcgtcgaagcgcggcgccgtgccgcaggagcacggctgcaccctcggcgcttgcggttgaggccccgccacccgacgaccctcccccggtcgggtggcaccccaagcccggcggccctccgccgggcttgattttgtgcgtgtgtattgttgtagtaatacacatggacgcgacgttactgcacatcctgcccaccgccccggagcccatctatcggcagatcgccgagcaggtgcggcgcctggtggcgagcggccagctggccgcgggcacgcagctgccgtccgtgcgcgacgttgcggccacgcacgcgatcaatcccatgaccgtctccaaggcctacagccagctggaggccgaaggtgtgctcgaacgcctgcggggcaagggcatggcggttgccgcgcgcgcgggcacgcgacccggtggcgtggcgcagcgctgggcgatgttgcagccggcgctcgaggcgctggcgcgccaggcgcgcgaactcgaactcacgccggcggaagtcgccgaccggctcatccaggcaatggggagggaaccatgaacgcaatgcaggaagcaggactaccgggactccgcggcggtgcggcgccgatccgcgcccatgcgctggaaaaacgctacgacgggcgcacggtgctgtccggcgtctcgctggaggtcgaagccggcagcgtgctcggactgatcggccgcaacggcgccggcaagtcgacgttgatccgcgcgctgctgggattgatcgaagtggacggcggcgaggccgaagtctttggcgcgccggcgctgcgcatgggcgacgcggccaaggcgcggatcggctacgtgccgcagcagcccgaggcgctggggtggatggaagtcgggcagatgctcgacctggtcggacgcttctatccccgctgggaccgtgcctttgtccgcgagacgctggatcgctggggcctgcgccccaaccagcagctcggcaagctgtcgcccggcgagcgccagcgcgtggcgctgatacgcgcgctcgcgccccgccccgacctgctggtgctcgacgaacccgcggcggcgctggatccggtcgcgcgccgcgacctgctgcgcgaaatcgcgctgcgcgccggcgagtccggcaccacggtgctgttctccacgcacatcgtttcggacctggagcgcgtggcatcgcacgtcgcgttcatgcacgaggggcgcctgctgctcgcgagcgagctcgatgcgctgaaggaacgccacgttcgcctgcgcgtgccggccccggcggcagcgcagctcgtgggtcgcgttcccggcgaggtcgcgcgccggccgggccgcgacggcgtcgtctccctgctgctggtgcgcgacgcgagtgcaagctggccgccgatcgtgcatgcgcccggcgtgcagtgcgacgtgctcgggctcgaggacctgttcgtggaagccgcggcatgaacggggccacgatgctggccgcggccgccgcgcgccgcgagcggcgggtgatgctggcggcctgcctgctgttcgcgggcctcgccgcgggactctggctgggcggggcgagtgcgcgcatcccggacctggggctcatccagctggcgatcctggcgctgccgacgttctggctgtggttgggctggttcccgcggttgctggtgctgcacgcgcacgcgcaagccctgcgggtgccgcggatggcggcctacgccggcgcgacgctgctcgccgcggcgggcgtgacgatcatgctgccggccatcgtgctgtcgttcggcggcacgccgatgtgggtgtccgcgggtgtcctggcgtgcatcgccggcgcggccctgctgatggcggtcctgccgcggggcatgtccggcctggtcgggttcgtgcccttggcattcgcggccattggcgaccatctcgatggaatgctcgattggccgcgtgcgctgcccctgctggcctgcctgctcgcactgctggtggcgtggcgctggctgcgcatccagcgccgccccggcgactggagcgaaccgggctggcagcaaccgctggtgttcgcgatggcgcgcagcggcggactgttcgggcgcggcgacctgctcgacacccgggcgcagacggcgtcgctgccgcgctggctgcggctcgtggacgatctgggctcgctgcgcccgggccagtcgcgcaccttgcgcgtcctgctgggcggcatcttcgcgccgatcggctggcgacagcgcctggtgctgggcgcgctctacctcggcgtgctggcgctggtctggcgccagtcggtgagcgacggcgattcgccgtggcagatgctgatgttcgcaggcctggtttccggcgggatcctgctgctgggaccgttcgcgctcagggtgcaggcgctgcagcaggaacatggcggcgaaatggccgagctggcgttgctgcccggctggggcgatgcccgccaggcgcgcgcgcgcctgttgcgcaccatcgcgcgcgtctacgcgaactggtgcctggccatggccgtggtcatggcgtggggcgcagcgatgaccggccagcctgcggtggtcgccttggcgttgctgtccaccgcagcaatggcggtactcggcgcggccatgtggctgcgtccgctcgccggccagccctggaacctggatgcatggaccgcagcgcccgttctcctgctgggaccgccgctgctgggagcgaccgtcgtcgccttcgacggtgccctgctggtggaaccgatgctcgccgcatgggccgtcttgctggcatgcggcgcgctgctcgccgtccgcgcatggcgacgcttcgagtcgcgggcgcaaccgttcctgatgtactgagcctggaatcggcagggccggacgcgtccggcccagcgcaaggacgtgtcgtcagagcgcgccgagcgcggcgttgaaggtcgcgctagggcgcatcgccttcgccatccgttccgggtccgggcggtaatagccaccgatgtccacgggcctgccctgcacgccgttgagctcggcgacgatcttcgcctcgttgtcggccagcgccttcgccagcggcgcaaaccgcgccttgagttcggcatccgcgtcctgcgccgccagcgcctgcgcccagtacagcgcgaggtagaagtggctgccgcggttgtcgatgccgccgagcttgcgcgtcggcgacttgtcgttgtcgaggaacttcgcgttggcggcgtccagcgcttcggcgagcacgcgcgcccgggcattgccggtggtgtcggccaggtgctcgagcgaggcgcccagcgccaggaactcgccgagcgaatcccagcgcaggtaatcctcggcgaggaactgctgcacgtgcttgggcgcgctgccgcccgcaccggtctcgaacaggccgccgccggccatcagcggcacgatcgacagcatcttcgcgctggtgcccagttccatgatcgggaacaggtcggtgaggtagtcgcgcaacacgttgccggtcaccgaaatcgtgtcctgtccggcgcggatccgtgccagcgagtgtttcatcgccgcaaccggatccatgacccggatgtcgaggccggtggtgtcgtggtcgcgcaggtagcgctcgaccttgtcgatcagctgcgcgtcgtgcgcgcgcgccggatccagccagaacaccgccggcgtgttcgacaggcgcgcgcggttgaccgccagcttgacccagtcgcggatcggcgcgtccctggtctggcacatgcgccagatgtcgccagcggccacctggtgctcgagcagcacgcggccggcctcgtcgatcacccgcaccgtgccgtcctgcgacagctggaaggtcttgtcgtgcgagccgtattcctcggccttctgcgccatcaggccgacgttgggcacgctgcccatggtggcgggatcgaaggcgccgttggccttgcagtcctcgatcaccgcctggtagatgccggcgtagcaacggtccgggatcaccgccttggtgtcctgcagctggccgtccgcgttccacatgcggccgccgtcgcggatcatcgccggcatcgaggcgtcgacgatcacgtcgctgggcacgtgcaggttggtgatgcccttgtccgaattgaccatcgccaggccaggacgccgcgcatacagggcggcgatgtcggcctggatcgccgcggcggtgtcggccggcagctgcggcaggcgcgcgtagaggtcgccgatgccgttgttcgggtcgaagccggcttcttcgagcgcgacctggtacttgtccagcaccggctggtagaactcgcgcaccgcgacgccgaacatgatcgggtcggagaccttcatcatcgtcgccttcaggtgcagcgagaacagcacgccgcgcgacttcgcgtcctcgatctgcgcgtcgaggaagcgcgccagcgcgtgcaggcgcatgctcgcggcgtcgatgacctcgccggcgcgcagcgcgaacgcgtccttgagcaccgagcgggtgccgtcggcgccttcgaactcgattcgtaccttcgtcgccgcgtcgacggtcaccgagcgctcgctgccgtagaaatcgtcctcggccatgtgcgcgacgtgggtgcgcgaatcaggcgaccaggcccccatgcggtgcgggtgcttgcgcgcgtactgcttcaccgaggccggcgcgcggcggtcggaattgccctcgcgcagcaccgggttgaccgcgctgcccttgaccttgtcgtagcgggtcttggcctcgcgctcggcgtcgttcgcgggttcctcgggatagtcggggagcgcgtagccctgctgctgcaattcggcgatcgcggccttgagctgcggcaccgaggcgctgatgttgggcagcttgatgatgttggcttccggcgtggtggcgagctggccgagcgcggccaggtcgtcgccgacgcgctggtcctcgcgcaacgcctgcgggaactgcgccaggatgcgggccgccagcgagatgtcgcgcgtctgcaccgagatgcccgcggtgccggcaaaggcctgcaacatcggtaggaagctggcagtggcgaggagaggagcctcgtcggtcagggtatacaggatggtcggctgggtcgacatggatggccggatgcagtgaacggacccgtattgtcgcgcaaagcccactgacaacgtggtgtgggcgaacagcgatccaatcgcagtgcctgagacggccaaaatgcagaaaagacaagggccggctaggccggccctcggatttggtgcatctatctagaaactagaaaatcagcttgttgccggatagagcgcatttcctgatctgctagtgaatttaacgtatcagcctggggaggctgaggtcaaggggggaaagaaaaatgaagattccttatcggctcggcctggatatcggcacgaattccatcgggtggtgcatgttgcgtcttgatgggaatgacgcgccgatcggctttgtgcgaggaggggtccgtatcttcccggatgggcgcaatccgaaggatctggcctccttggcggctggtcggcgcctggcgcgacagatgcgccgtcggcacgaccgggtactcaaacggcaggcacgattcatgacggggctgatccatttcggcctgatgccggaagacgatggcaagaggcagtcactttccgccctggacccatatgagctgcgcgcgaaggggctcggttccgagcttatcgtgtatgaagtcggtcgtgcgctctatcaccttgcgaagcggcgtggttttaagagcagccgtaaagaccagacggccgacgaaaaggagaccggtaagatcaacgatgccatcgcgcggacacggcagcagatcgtcaattccggcagccgcacttacggtgagtacctagcgaagcgacacaagaaaggcgaaacaacacgcgcacgactggacggcaagggcgagtacgtcctttatgcacaacgcgaattgattgcagaagaattcgatgcgctctgggcggcgcagcaaccgttccatccgcaggccatgacggaagaagctcgggattacctgcgcaacacgcttctgttccagcgcccgttgctgcccgtggaacctggcaggtgcatcttcgagccggctgagtaccggattccgatgtgctcgccgctgcagcagcgcttccgcatcctgcaggagctgaacaacctgcgaatacaggagggaatcgaatggcgatccttgacgatggcggagcgcaacctgttgcgcgatgagctttgctgccgggaaaagctgactttcgcgcgcatccggatgctgctggggctggaaaagaaggcgggtctgaacctggaaggcggccggaaatctaccggcaagcctcgggaattcctcaagggcgacgcggtcacagagcagttctcgtcgcaagccggaatcggcgccgcctggcacgacctttcatccatccagcaagaagcactggcggtcctcgtagaagtcgccacgaacaatgacgatctcgtagaagcgctggtttccctgccaggagagagtggcgcattggaccggatcatcaggaagaacgatctgtccaggcgccattatcgacaagtactcgcagcgctgccattgcggataacacgagaaaaggcggaagggatcgcgaggtttcgactgcccgacgaccatggcagcttgagtaggaaggcgctggagaaaatcgtcgaatctctagacggcgacgtaatcacttacgaccgtgcagtccgaacgactttcggcaggagccattccgacttccataccggcgaaatccgaatgcgtcttccctactacggcgaagtgctgaccggctatacgtctccgatgccgaaggcaactaacgaagaggagaagcgctggggaagacttccgaatccaacggtgcatgtcggtttgaaccaattgcgcctcgtcgtcaacgaaatcatccgaaggtggggacttcctcaggaagtcatcgtcgagcttgcgcgcgagttcggcatgtccggcgccagacgaaccgaactcctctccgagcagaagaaaaatgaggagaggaacgccaagctgaacgaggagctgcgcactttggggcagcgggaaaaccgcgagaaccgccagcgcctgcagttgtaccgcgagctcggaaaggatgacgccatgagccatccttgcgtttataccggagcacagattggcatcgagaagctgttctcttctgaggtcgagatcgaccacattcttccgtattcacggtcgctggacgacagcctgtcgaacaaggtgctgtgcctgtcccgcgcaaaccgggagaagcggaaccggacgcctttcgatgcgttcgggcatacggccgcatgggagagcatcgaagcccgactggaaaacctgccatcgaacaaggccaaacgttttagggaaggcgctatgcaggcctttctcgatcgaagcaagttgacgacagaagacttgcaggcgtgggggtttgaaaagggtgacagttttcttgcaaggcacctcaccgacacagcctatctttcgcggcttgcgcggcaatatctggcttcggtttgcccgccgaacaaggtctggtcgaataccggccggctcaccagccagttgcgcagcgtctggggcctgaacgagctcctgcgtccgggtgaaagccgtaagaaccgggatgaccatcgccatcatgctttagatgccgcggttatcgccgcctgcgaccggtcctgcatccagcaactagcgaacgcggcagcaagggcggaggccaccggcgagaatcgcaagctcaaggattttccgatgccttggcctgcgttccgtgaggatctggccgccgtgctcgggaagatcgttgtgtcccacaaggcagaccacggaacacaggcgagcttgcataacgacaccaattacgggaagcgaggagaaccgggtaagaaaggcgctctatcggtctcacatcgcgttccattgtcagcaataaccgacacagccaaggtggaacgtattgccgacccgattttgcgcgaagagatcgcgcgggcaataaaaggtttgagtgggaaggagttgaaggtagcgttggatgctttctcccaggacagtggtgtgcgtcgcgtgcatgttctggagcagttgtccgtaattccgatctcggatcggatgaccaagcgaccgtatcgttatgtaaaaggcgatggcaattattgctatgagatatggcaggaaaacggtcgctggaatggcgagatcatctctatctatgaagcaaaccgggacgaaaaatggctgacttcaagggccgcaaggaatggaaagccgcttgtcatgcgcatccgcaaaggggatcttctcaaagttgagcacgagggcaaggggaagatcatgcgggtcgcgcttttttcttcaaatggaattgcgctgtctgagcactacgaggcaaacgtggacgcgagagatcgcgacaaaacaatagcgttctcctatattcggaagtcgccggagccgcttcgaaagatggcggcacgcctggttggagtggatgccttgggttacgtcaacgatccggggtttgtcggatcgaaatgatcggcaggattatcgaaatcgagggggaagggcgctacctgcatgtaacagatcaggaaatgcgctctagccggaaccgctcacggcgatacctgcttggtggcggtgagcgcaacagatcaggaaatgcgctcaagccggaaccggttcgtgcagcgggtcaaggcgctgttcgagcgtaacagatcaggaaatgcgctctagccggaactccaccgggagcgccccagccccgagtggggagcgtaacagatcaggaaatgcgctctagccggaactctctccatcagtagtggcggctccggtgggagcgtaacagatcaggaagtgcgctctagccggaacagtcgtggccgggccctcggacaggacggtgaggtaacaggtcaggaaatgcgctctagccggaacacgcctgccggttggggcggggagggttttgagcgtaacagatcaggaaatgcgctctagccggaaccccacgcaggagcagcagggatgagcgggcgagcgtaacagatcaggaaatgcgcactagccggagccccctgcaacaccaccagcgttcccgttggaagcgtaacagatcaggaaatgcgctctagccggaacgcctacgcgcgcaccgcgggcatcgcggtggagcataacagatcaggaaatgggccttcgccgaaacagagtatgatcgccgcatatgcttgcacgggtgtaacggaccgagaaaactagccttggcttgagcagcaatgaaaaaaagggcgcctgggcgcccttttcgtcgcggcttgcgccgctcccacaagggagcagcgatcagccgaccttgaactcgcgggtctgcaggaccatgccgtccttggatacctgcagggtgtagttgccggccggccagccgtcgggcttggtgatgctgaagtcggtcacctgcggcccggccggcaccaccttttcctgggtgtcgaccacctgcccgtcctggtaggtccaggtcgctaccagcgtgccttcggcggtgccgtcggtgaccaccgaggcgtggatggtgtcgctgccggtgaaggtggtggtcggtacgctgatgcggttgtcgtcgccgaccgcggagccgaggtcgaccgaggtgatgctcaaaccggtggtcgcggtggtatcggtcgtcgccggcggcatcgtggtgtcggccggggtggtggcggccggcggcggggtggtgtcgatcgccgcgtcgttggtgtcgtcggccttgttgcagccggcgagcgcgagcacgccggcgagggcggcaacgagggtggcgctgggaagcttgcggatcatgggggaacctccgtgtgggcgatcagtcatggatgtcgggaaggcgcagcacctgtcccgggcggatcaggtcgggatcgtcgatctggtcgcgattggcctcgaagatctggtgccacgcgctggcgcggccgaactgccgctgcgcgatctccgaaagcgtgtcgccggattgcaccgtgtagctgcgctgcgcgccgtccgccggcacggtgtcggtgctgccgcgcacgttcgagaaatccggcttgccatcgccgctgcggacgttggaaaaatcgggggcgcctgcgctgcggctgggccgcagggacaggcgatcgtcgtcgccgctgttccggttcgccattgcggatctcctgcattcatggaccggcgcagcgtcccatggcgggcgtgaagccggtatcgcggcggcgtacacgccgcgtcgacgcgcgcgctactggcgcaggtcacgcgccgcggcaggcgcgcggcaaccgggtgtcgcccgccatggattgatgtcgagcccgccgcggcgggtgtagcgcgcctccaccgacagccgccgtggccggcaccgcgccatcaggtcgctgaagatccgctccacgcattgctcgtggaattcgcagtggtcgcggaaggagaccaggtagcgcagcaggccttcgcgatcgatccgcggcccttggtattcgatgcgcaggctggcccagtccggttgcccggtcaccgggcagttggacttgagcaggcctgaacgcagctgttcctcgacttcgtcgcccgcatcggcgacgagcagcgccgcgtcgggtggaccgtagaacccgatgtcgacgtccaggccgtcgatcgaagcgccatcggcgtcatcgccggtcggcggcacgccgggtgccacttccacctcgccaccggccgcgcgcgacaggtccgcacggatgcgcgcgagcacctcgccggcgtcgtcgaaacggctgccgttgaacgagttcaggtacagcttcagcgatttcgattccaccaggttcggcgtcgtcgccggcacctgcagcgacagcgtgccgaccaccggcttgccgcgtcggtccagccaggacaattcgtaggcatgccagcggtcgaagccggtgaacggcagcggcccgtcgtgcagtcccagcgacgcgcggccttgcgcgcgcgggatcgggaacagcagcgacgggtcgtactcgcgcggatagtcgaccgcgcggccgagcgggagggtgggcgaggccatgccgggattatcccccgtcgcgcctagcagcggtgctccagcgccaggtactcggccgagcgcatctcgatcaggcgcgaggcggtgcgctcgaaggcgccgaccaggcgttcgcccgtgtacagcgcggtcggcggagcgtccgcggtgcagaccaggttgacgtggcggtcgtacagctcgtcgaccagggtgacgaaacgccgcgcggagtcgtcggcgttcgcccccatcaccggaattccgccgaccaccacggtatggaactcgcgggcgatctcgatgtagtcggcggccgcgcgcgggccttcgcacaattcggcgaaatcgaaccaggccatgccgcggctgcgcgcgcgcaccgcgatccggcggccgtcgacgacgatgccggcgtcgcgatggccgtcgtcgccacccagcgcatgccagcgctgctcgagccatgcgtcggacccggcatccagcggctgccggtagaccggcgagcgggtgagctcgcgcaggcggtaatcgcgcggactgtccaggtgcagcaccacgcaatgccgctccagcagcccgatcgccggcaggaatcgcgcgcgttgcaggccgtccttgtacaagcccgacggcgcgatgttcgacgtggtcaccagcaccacgccctcggcgaacaggcgctcgagcaggcgcccgagcagcatcgcgtcgccgatgtcgctgacgaagaactcgtccagcaccagcacctgcagctcgtcgcgccactcgcgggcgatgcgggcgagcgggtcgcgctcgccggcgtgcacgtgcaggcgctcgtgcacgctgcgcatgaagcgatggaaatgcgtgcggcgcttgcgcgtggtcggcaggccggtgaagaacaggtccaccaggaaggtcttgccgcgaccgacgccgccccacaggtacaggccgcgcggcgccggcggcctgcgcccgagcagcttgccgagcacgcccgcactccccgcgtcccgcagcgcggcgtggatgcgatcgagttcggccagcgcgacccgttgcgccggatcgtcctgccattcgccgcgggcgacgccggcggcatggcgctgcgacggcagcgcctcgtcgccgtcagccatgcgcgggatccggcgccggaagccagccgcggatgccgtggcggatcgcgccgcgcaggtcgatcagcttgcgatggaagaagtggctggcgccctgcatgcgcaccacttcgggcgggcgcggcatggtcgcggcccaggcatacaccgcctgcggatcgacgatctcgtcgtcctcgccctgcaccaccagccacgggcaggtcggcggcacgatcgccttgaaatcccagctgcggccgaccggcggcgcgatcgagaccaggcccgagggctgcagctccgccgtcatccgcagcgacacataggcgccgaagctgaagccggccagccacagcgccgcatcgggacgctgtgcgcgcacccacgcggcgaccgcgcgcaggtcgtcggattcgccgttgccgtcgtcgaagctgccggcggacgccccgaccccgcggaagttgaagcgcaccgtgtccacgccgcactcgcgcagcgcgcgggcggccatggtcacgaccttgttgtgcatggtgccgccctcggtgggcagcgggtggcagacgatcgccaccaccgggcgcggcttttcggcgcggtccaccgccacttccagcgggcccgcggggcccgccagtgacagcgtcgcctggtcttcggggaaggaagggccggtcatccggccatgatcctcagatctgcgacaacatccagtcgacggtcgccttcacctggtcgtcgctgagcgccgggttgccgcccttggccggcatcacgccggtggcgccggtgaagccgtcgatggcgtgcttgtagagcgtctcgttgccctgcgcgatgcgcatggtccagtccgcggcctcgagcttcggcgcgccgccgacgccggcggtgtggcagccggtgcacaggttgttgtagatcaccgccccgtccatcgtgccgccgtaggcgacctgcgaggaggccgcggcctgggcggcctgcgcggctgcggcctgggcggcggcaccggtggcgccggcgtagaccgcgccttccggggcgatccgggccagctcgttctgcttcgccagcggcgagacttccgtcgggatcacgccattgaggtagttggccagcacgatcaagccgaggctgaccgccaccaggaaggcgatcacgagggagaaacgcttgaggaagtcgaggtcgtagttgcgcacggagggtccctgcaagaggcgcggtcaaatccggtgcattattgcagaaagccccattccgcgcgaaggcgcgtgccccgggggcgccacgcgggttgaccgggccggcgacggcacctatggtccggccgccgcgcaatcccgcgtggcgaaactctatggaaggaaatcgcgaatggatcttttcgccaacttcgaactgctcgaatccgccatccacgccggatccgcggcgctggaccacattgccggcatcgcgcaggcgatggagccgaccgaggacgcaccgatcacctgcgaaatctgcaagtgcacctggtgatgtagtgcgggtcgcgggtagccgcacggctacccgcgttcaacggacttcgaggggggccaggatggccgaagaaagaaatttgtcgatggcttccgcggtgcgcgcctgggtcgcctcccatcgcgacgattccgcggcgctgctgttgccgacgacggcgtggagccttcaggtcgccgccgaggcctgcagcgagccgggcgtgctggcggtgggtgattcccgggcattgaacgatcgtgccggcgcgcttgcgctgatgccgcccgccgcggcgttgcgggaggcgcagcaaggaaaccgcaggctgctggtgttttccgaccagttcgtggacgaggtattcgcaccgcaagccgtggtcatcggcacgcgggagaccttcctgtccaccgtggaaatcgtgctccatgggcgctatcacatggccatctggagctggagcgcctccgggttgcggcccgttccgccgggcgcggtgccgatcctgcgcggactgtcccagctcctgcgcgacgccgcgtcactcggtaacgactggctggccgccggactgcaatggcggcgcgacccgggggcgcgcctgcgccatgcgcggcagcgtgcgcgcgcgcaccagtcggccctgctgttggcggcctcgcgttcgcctgcgaccgtgcagcatctcgaggttgccgaggcgctggaggcggtgcgcgcccggctcggccgggtcgtggagcccgcccatggttgacgccccgatccgtgccctgttgcgcctggccgcgccgttgcgtcggatgcgccgtcgcaacggcctggtcgagcgactgctgtcgctggacctcgatgatgccggggccgcggcggtcgcccgcgcctgcgccgccggccagcggcccttcggtgcgttctaccactggcgcctgcggcaatgggccaccgtggcctgcgccgggcgcatgccggcgccgcgattgcgccggtggttcgccgcgatcgatcgcacgccgctcgcgcgatggcgcgcgttcgatggcggcgggcgcggcatgctcgtggccactccgcactacggcgccttcctgcccggcatcgtctcgcttgcccaccacgccagcgcggccggccgccaggtgctggtgttctacgacccgcccggccggcacgacagcaacgcggtgttcgacgcgatccaccgcaagctgtggccgaccgcggacagcggggtgcgcatcgtccacaacacccgcgccggcatcggcgaggtcctgcgcgcgctgcgcctgggtgcgctggtggtgatcatgcccgacgtgttcgagcgcgtggaggacaccttcctcgtgccgttccacggcggcctgcggaatgtcgtcctcggcaccgcgacgctggcgcggaagtcaggcgcggtgatcgtgccgatggtggcgcagccattggcggaaggcttcgatttcgaactcagggccgggcccgcgatcgacgccggcgcgctgcgagcgcctgcgctgccggacgagacccctcccgcgctgtacaccgactatgtcgcgaccgcgcagctgttcgcatcgatcgaatcgctgatgggcggcgacctgttgtactggcagtaccacgcatcgctcgggggtggcgccgatgcgccgctgcgcacgctgccgcctcttgccgatgccgaggtggcggcgctgctcggggacccggcgctccagccgccgcgatcgccggcctgtttcctcgacgaagaagacatcgacctgatggaggcaaccccatgttccaccgcttgagcatccgcctgctggccggcttgctgctggccagcgtcgccttccaggggtggacgggcgaacgcggctacttcggcttctcgccccaggtcgccacctccggtttcttcctcgaccccaccgtcgaacgcatcaccatcgcggaggtcgtgccggggtcgccggcgcagcgcgcggggctgcgcgcgggcgatgaagtcgtggaggtggaaggcaagtccgtcgcgggcatgaaggcccggcgcgtgcgcgaactggcgacgcgcagcgtgggagagtccctgcagcttgcgctgcgccgcgatggcgggcgcctggagatcaccatgaccgccgtcgcccgcccctgagtcgacatgccgggacccatccacgccccggccgccgaccgcgccagtccgcgcttgcgggccatggcatgggccggcgtgctgctgttccacgcgctgctgctgcagctgttgcgccaggagatcgtcgccacggacgagcatgccggctgggcgctgcaggtggagtggatccagtcgcacccgcccgcggcaggcgtcacgccgcagcgcgacgcgccgcgcaggacgcggaccgcccatgtcgcgcacgacccgctcccggccgcgcccggcgtgaagacccctgccgacgacgcccgcgcaagcaagcccaggctggacctggcgctgccggcgccggtgcgtgaacggctcgctgccgcgcccggccgcgaaccggccctggcacgggccccgtcgcgactcgatggcggtcgcccggagcgtttccgcatgcaggcgccggtgacgcccgagcgcgcactgcagtcggcatcccgcctgctgggcttctggccgccgggctacgaactcgatccgtgcccgcggatccgcgcgaacatcgccagccggctggcgcaaacttcgccggaagcgcgctcgatgctggaagaggaaatgcgccgcgagcgggcgctctgcaacatctgatggcgcgcctggagggattcgaacccccgaccaatggcttcggaagccactactctatccggctgagctacaggcgcgtggaggcaattctcgcatggaccggctggaactgtactggcggctgatgcgcggcgaccggccgatcggctggctgctgctgctctggccgacgtggtggggcctctggctcgcggccggcggggtgccgccggcgtggccgctggtggtgttctccctgggcgtctggctgacccgttcggccggctgcgtgatcaacgattacgccgaccgctggctcgatccgcaggtcgagcgaacccgcaaccggccgctggccaccggcgaggtgtccgcgcgcgaggcgctcgcggtgttcgcggtcctgatgctcgccgcgttcgcgctggtgctcacgctcaaccggctgaccatcctgctcagcctggtcggcatggtcctgtcgatgacctatccgtacttcaagcgttacacctacctgccgcaggtctacctgggcatggctttcggctggggcatcccgatggcgttcgccgcgatccggggcgaagtgccgcccatcgcctgggtgctgtacggcgccaacatcctctgggcgacggcctacgacacctggtacgcgatggtggatcgcgacgacgacatccgcatgggcgcgaagtccaccgcgatcctgttcggcgacctcgacctggtcgcgcagggcgtgctctacgcgttgttcttcggtgcgctcgcgctggtcgggcgcgacgcgcaactgggcggctggtactgggccggactgggcgtggcggcattgctggtcgtgtaccagttcgtgatcgcccggcaccgcgagcgcggcgcgctgttccgcgcgttcctgcacaaccactgggtcggcgcgacgattttcgccggcttggcgctggcgttggggcggcagggcggggcggcgtgagcacggccacgccgcgtgccggcctgcccgagcggctggcgctgcgcagcgcggacttcgccgaacgctggttcccggatgcatgggtgttcgccgtggtcggggtgctgctggtcgccagcttcgcgctcggcttcggcgcgaccccgcacgccaccgccgatgccttcggcgacggcttctggagcctgatcccgttcaccatgcagatggcgttcgtggtgatcggtggttacgtcgtcgccaccgccccggcgatcgcgcgggtcatcgaccgcatcgcgcgctggccgcgcagcggacgcggcgcggtcggcttcgtcgcgctggccagcatgttgtcgtcgctgctgagctggggcttctcgctggtgttcgccggactgctcgtgcgcgcgctggcgaagcggaccgagttgcgcatggactatcgcgccgccggtgccgccgcatacctgggcctgggcgccgtctgggcgatgggcctgagctcgtcggcggcgcagctgcaggccaatcccgcgagcatgccgcccgggctgttgccgatcaccggcgtgttgccgttcaccgaaacgattttcctgtggcagtcgatcgtgctgacgggcgtgctggtgctggtgtcgctggcgatcgcctggtggaccgcgccgcgtggcgatgccgcgcgcaccatcgccgagttccccgaggcgctggaggccaccgcgccgctgccggcaccgggtccgcgccggcccggcgaatggctggaacacagcccgctgctgaccatcgcgctgtcgctgctcggcttcggctggctgtggctggagttccgcggcaaggggccgatggcggcgatcgccaacctcaacacctacaacttcctgttcctgtcgctcggcctgctgctgcactggcggccgcgcagtttcctcgacgcggtcacgcgcgcggtgccgtccaccgccggcgtgctgatccagttcccgctgtacggcggcatcgcgctgatgctgaccggagtccccggcgccgacggcgagacgctcgcgcaccggctgtccacgttgttc

SEQ ID NO: 1530 - DNA, 23180 bp, synthetic construct
  misc_feature 1..23180: note = Synthetic
  variation 2325: note = n is a, c, g, or t
  source 1..23180: mol_type = other DNA
atcgccgacgcctccagcccgctggcgcgcgatctggccaaggcgctgccgcgcgccggcgcgcagctcgccgacgcggccggccccggcgtggcggtgctggcgatcagcgccaaccgcgtgtcgaccgacgtgctgtcggtcggcggcgcggcgcgcgcgaacgagtattcgctgcgccaccacgtcgagttcgcggtgcgttccgccgatggcggcgtgatcgtgccgaagcagacgatcgagctgacgcgcgagttcacgttcgactcgacccaggcgctcggcgtcgccgccgagatcgacctgctgaccaaggagctcgagcgcgacatggtgcaggcgatcctgcgccgcctcgaggcgctcgcggaagcgggcaagtagcacgccggatcgatggcaacctcgctttccgcgttccgcaagcacctgaccggcaacgacctgaagccggcctacctgctcgccggcgccgagcacctgctggtgatcgaggccgccgacgcgctgcgcgcgcgcgcgaaggaactcggctacctcgagcgcgaaatcctcgacgtcgaggcgaacttcgactggaaccgcctcgccgatgccagccgctcgctgtcgctgttcgccagccgcaagctgatcgacctgcgcctgccgagtggcaagccgggcaaggacggcgccgccgcgatcaccgagttctgcgcggcgccgccgccggacacggtgctgctggtcaccgccaacgactggagcaagaagcacgaaggcgcctggtcggccgcgatcgagcgcgtcggcgcgctggtgacggtgtggccgctcaagcgcgaggaactgccggactggatcggcgcgcgcatggccagccgcggcctcaaggcgacgcccgacgcgatcgcgctgctcgccgagcgcgtcgagggcaacctgctcgcggccgcacaggaagtcgacaagctcgcgctgctgcacgctggcagcacgctcgacgtcgaggcgctcgaggcgagcgtcgccgacgacgcgcgctacgacgtgtttcgcctgaccgatgcggcgatcggcggcgacgccggccgcgcgctgcacatcgtcgccggcctgcgcgccgaaggcgaggagatcatcccgctgctcggctggctgctgacccagttgcgcctgctgctgcgcctggcttcggcaccgaacgtcgacgcagcgctgcgcaacgagcgcatctggccgcaggcgcgcgagggcctgttccgccgcgcgctgaaatcggccgggcgcgaacactgggagcgctgcctggcgcaggccgggcgcatcgacgcgatcgccaagggccgcgcgcccggcgatgcgtggcgcgaactcgaacgcctgattgccgcgatcgcgcagccgcgccgcgccggtgcgctgatcgcgtcgccatgagccgcggacggtcgaagcaacgcgtagcccgggtaagcggagcgcacccggggccgttgtgcgggccgacaagccccgggtgcggccggcggccttacccgggctacggccaaccggccggcgcgccatgacccgcccgctcgcactgttcggcggcacgttcgatccgatccacaacgcgcacctgcgcgtcgcgtgggaggcggccgaatgcctcgacgccgacgtacgcctgctgccggccagcgtgccgccgcaccgcgagcagccggtcgcgagcgcacgccagcgcgccgcgctggtgcaggccgcgctggccgggcaggtgcggctgagcctggacacgcgcgagctgcagcgcgacggcccctcctacacgatcgacacgctgctcgaggtgcgcgccgagatcggcccgcagcgcccgctggtgctgctggtcggcgccgacgcgttcgccgggctgccgagctggcaccgctggcgcgagctgttcgaccacgcgcacctcggcgtgctgacccggcccggccacgacgccgccgtgctgccgaccgaactgcgcacaaagatcgcctcgcgccgctgcagcagcgcggccagcctgcgcgaggcgccggccggccgcgtgctgccgatcgcggtcacgccgctggagatttccgccagccaggtgcgcgcgctgctggccgccgggcgcgagccgcgctacctcgttcccgacgcgctgttcgccgacccggcgctgctcgcgccgtaccggcgttgaacggccgtagagggagccagcgggtgtcggctagctgcagccttgcgtggcgcgtggtgggagcggcggaagccgcgatgctccgctttcgagccggaacacaaagcatcgcgcctgccggcgctcccacnggtgggagcggcggaagccgcgatgctccgctttcgagccggaacacaaagcatcgcgcctgccggcgctcccacaggggcaccacagcgccgctttcggtgggagcggcggaagccgcgatgctccgctttcgagccggaacacaaagcatcgcgcctgccggcgctcccacaggggcaccacagcgccgctttcggtgggagcggcggaagccgcgatgctccgctttcgggccggaacacaaagcatcgcgcctgccggcgctcccacagggcaccgcagcgcggctttcggtgggagcggcggaagccgcgatgctcttgcgggagcgatcgacaaagcatcgcgccttccggcgctcccacagggcgatggcgacccgccgcttcgacttcgcttggtggtgcaggctacgctccgcacgaacgaagcttccaagcctgtcggagatcgccatgccccgttccatcctgcttgccaccctgatggccgccgccgcaccctcgttcgccgccggcgtgcgctacacgatcgacccggcgcatacctatccgagcatcgagatggagcacctgggcatctcgatcttccgcggcaagttcgaccgcaccagcggccaggtgctgctcgaccgcgccgccaggaccggcctcgtcgacatccaggtcgataccgccagcatcgacttcggccatgcgcagatgaacgacaaggcgcgcacagcggactacctcgacgccacgcgccatccgagcgcagcctacaagggccgtctgctgttcgacggcgacgtgccggtcgcggtcgacggccagctgacgctgcacggcgtgacgcggccgctgaagctggcgatccaccgcttcacgtgcatcgagcatccgatgcgcaagcgcgaagtctgcggcgccgacgccgaaggcgagctcgaccgcgccgagttcggcatcacgcgcggcgccgagggcggcaagggccgcatccacctgcgcatccaggtcgaggcgctgagggactcgtagtcgacacgggcggcgcgcaggagcgggccatgcccgggacccgcagcgcccgaccggccgcgggcatggcccgctcctgcagatgcatggcggaagagtcccccgccggaccgctacactcgccacggcatccgcttccggagtacgaacgcatggcggttcccgtgtcctcgccggcccatcccgacatcgcgccgatcgtcgcgatcacgggacttgacaagacctacgcgagcggccggcaggcgctcaagcgcatcgaccttgagatccgccgcggcgagatcttcgcgctgctcggcccgaacggcgccggcaagacgacgctgatcaacatcgtctgcggcatcgtgcggccgagcgcgggcaccgtgctggccgacggccacgacgtgatccgcgactaccgcgccgcgcgcgcgaagatcggcctggtgccgcaggagctgtccaccgacgcgttcgagacggtgtgggcgacgctgcgcttcagccgcggcctgtttggcaaggcgccggacccggcccacctggagcgcgtgctgcgcgagctgtcgctgtgggatcggaaggacgcgaagatcctgacgctgtcgggcggcatgaagcgccgcgtgctgatcgccaaggcgctcgcgcacgagccgaccatcctgttcctcgacgagccgaccgccggcgtcgacgtcgagctgcgccacgacatgtggcagatggtgcggcgcctgcgcgacagcggcgtgacgatcatcctgaccacgcactacatcgaggaggccgaagagatggccgaccgcgtcggcgtgatccgcagcggcgagctgatcctggtcgaggacaaggcgacgctgatgcgcaagctcggccgcaagcagctgaccttgtcgctgcgcacgccgctgccgcgggtgcccgacgcgctcgccggctatccgctggagctgtccaccgacggcgccacgctggtctacacgttcgacgcgcgcagcgggcagggcgatcttgccgcgctgctgcggcgcctggccgagcacggcatcgacttccacgacctgcacacgcaggagagctcgctcgaggacatcttcgtcagcctggtgagggcgggcgcatgagcgggccgctcctgaacctgccggcgatccgcgcgatctaccgcttcgagatggcgcgcacgttccgcacgctggccgagagcatcctctcgccggtgctgaccacctcgctgtacttcatcgtgttcggcgccgcgatcggctcgcgcatgggcgaggtcggcggcgtcggctacggcgcgttcatcatccccggcctggtcatgctgtcgctgctgaacgagagcatctccaacgccgcgttcggcatcttcatgccgaaatggtccggcacgatctacgaactgctgtccgcgccggtgtcgttcgtcgaaatcgtgctcggctacgtcggcgccgccgcgaccaagtcggtgctgctcggcgtgctgatcctcgccaccgcgcgcgtgttcgtgccgtacgagatcgcgcacccggtgtggatggtgtgcttcctcgcgctgacctcggtcacgttcagcctgttcggcttcatcatcgggctgtgggcggacgacttccagaagctgcagatcgtgccgctgatggtgatcacgccgctgaccttcctcggcggcgcgttctactcgatcaacatgctgccgccgccgtggcagacgatcacgctgttcaacccggtcgtgtacctggtcagcgcgttccgctggagcttctacggcatcgccgacgtgaacgtcgtggtcagcgccggcatgacgctcgcgttcctcgcgctgtgcctgggcgtggtctggtggatcttccgcagcggctaccgcctgcgcacctgacgactagtgtgacgtcccgcaagttcattgctcgtcgttcccgcgaaagcgggaacccagcgccttgaacgatcgagagaaagtcactggatccccgctttcgcggggatgacgttggctcaagctatttccaggacaggacactagtccgggtaagcgaagcgcacccgggaacgtcgtcgcgaaatgccccgggtgcggccccggatcgagtccggggcaggctctgcggccttacccgggctacgtcggcttggtgggcccgcgatgccctcaagcccctctcccaccgggagaggggtgagggtacgggcgaagcgcgacgcgcaatgcctgaggtgcccgcggtgttctggagccggcttatttgcgcttcggcggtccgggccgcttcggccggtcgaagccgccgcgctcggacccgcccgccttgaagccgcccggcttgaacccgccggccttgaacggcttgtgtggcttgccgaactccggctcgtcgccgccgcgcgtgatgcgcagctgctggccggacacccagaccttcttcaggtgcttgaagatctcggccggcatgccggccggcaggtcgaccaggctgtgatcgtcgcggatgtcgacgcggccgatgtgcttgctgtccagtccggcctcgttcgcgatcgcgccgacgatgttgcccggcttcacgccatgcgcgtggccgacctcgatgcggaacgtctcgaagccagggtcgggcgtatgcgcgccgtgctcgcggcgcggccgctgctcgaactcctcgcgatggtgcgagcgcggcgggcgcgtctcggtgcggccgtggccgtgatcttcggcgtacgccggctggcgctcgtcgtcgcggcgagcgcccggagccgggctccgctcgaacctgggcgccggcgcttccgtcgatcccggccgctgccgcggggacgattcgccgtggcgttcctcgccgcgcgcccactcgcgccgtcccgtctgctcgaacgcacgcgcctcgcgcggcgcgcgctcgaacgggcggccctcgcgcgcgccgcgctcgaagccttgcgcgcgcggtggcgtcagcaggaacggttcctcgccctgcaccagctgcgccagcgcggcggcgatctccagcgccggcacgttgtactcctgctcgtactgctcgatcagctcgcggaacacgccgagctcgccgcgtgcgagcgtgtcgccgatgcgctgcttgaacttcgcgatgcgctggtcgttcaccgcgtccacggtcggcaggcgcatctcctcgatcggctggcgcgtggcgcgctcgatcgcctgcagcaggcgcttctcgcgcggcgcgacgaacaggatcgcctcgccgctgcggccggcgcggccggtgcggccgatgcgatgcacgtaggcctcggtgtcggtcggaatgtcgtagttcagcacgtggctgatgcgctcgacatcgaggccgcgcgcggcgacgtcggtggcgacgaggatgtcgagcttgccgtccttgagctgctgtatcagccgctcgcgctgcgcttgctggacgtcgccattgatcgcggccgcgccgaagccgcgcgcctgcaatttctgcgcgagctcctcggtgccctgcttggtgcgcgcgaagatgatcatcgcctcgaacggctcggcctcgaggatgcgcgtcagcgcatcgagcttctgcacgccgctgacgtaccagtaacgctggcgaatgttcgccgccgtcgtggtcttgttcttgatcgagatctcgatcggttcgcgcaggtaggtctgcgcgatgcgccggatcggcgccggcatcgtcgccgagaacagcgccacctggcgcgtctccggcgtcttctgcagcaccttctcgacgtcgtcgatgaagcccatgcgcagcatctcgtcggcctcgtcgagcaccagcgtggtcagctcagacaggtcgagcgagccgcgctcgagatggtcgatcacgcgtcccggcgtgccgaccacgacgtgtaccccgcggcgcaggccgccaagctgcgggccatagctctggccgccgtagatcggcagcacgtggaagcccggcatgtgcgtggcgtagcgctggaatgcctcggcgacctggatcgccagctcgcgcgtgggtgccagcaccagtgcctgcggcttggtcttggaaaggtcgaggcgcgacagcaccggcagcgcgaacgcggcggtcttgccggtgccggtctgcgcctggccgagcacgtcgcggccttgcagcagcggcgggatcgtcgcggcctggatcggcgagggggtttcgtagccgaccgaagtcagcgcttgcagcagggtgtcggcgagaccgagatcgcgaaacgcgatcggttcgggcgtctcgtcgcgctccggaatggacatggggaataggcggcggtgccgctcggtgatacgggggcgcattctaccgcctcgccgccgtcgccgccgatttccgtgggagcggcttcagccgcgatgcagttcttccacagttccctctgcccaacgaccacatcgggggggggcgaggggcgagacggcaggcggcgtgaagcacggcggcgcgagacgacgcgcggtgaaggccgtgccggttttcttctgcctggccggcccgcggccccgattacgccttgcggaaatgggcctatactgccgccgcgccgctcatggcgcgcccctattacgaggtcgccccaacttggctacgtccgaaacgcgcgcccggccgcgcaaggccggaaccccgaaggccgcaaaggcccccgcaaccacgaaggctgtcgccgcgaagaaggcggcacccgcgaagaaggccgctgcggccgtcaaggtggcggcgaaatcggctgccgcgaagaagccggcgagcgccgccaaggcaccggttgcgaagaaggcggccgtggcgaagaaggcggcggtgaagaaggccgcgccggtgagcaaggtggcacccgcgaagaaggcggcagtgaagaaggccgcgccggtgaagaaggcggcgcccgcaaagaaggcgccggccgtaaagaaggccgccgcgaccaaggccgtcgtgaccaaggccgccggcaagaaggccgctgtcgccaagacgctgagcgccggcaagaaggccgcgctgcgcaagtcgcccgcccagaccgctgccgcggcaccgaagcgcgaccgcgcgccgaaggtcgccaaggtgctcgacgccggcgaacgcctgcgcgccatcgtgctcggcgcgctcgacaagctcaaggcgcgcgacatcagccagatcgacgtgcgcggcaagagcagcgtcaccgacctgctcgtgatcgccagcggcacctcgacgcggcacgtgaaatccatcgccgacgaggtgatcaagcaggccaagcaggccggcctgccgccgatcggcgtcgagggccagcgcgaggccgaatgggtgctggtcgacctcggcgacgtcatcgtccacgtcatgctgccgcagacgcgcgagttctacggcctcgaacgcctgtggtcggtcggcggcgaagacgcctcggccgcgatggccggctgatccgcgcggcgggaggcaaagccctcccgttcgagcaacgccaaagccctccccttcaaggggacacgccaagccctccccttcaaggggagggttgggtggggatggtgtcggaatcggtgcctccagcaccgcgtccccacgcacagcgacggcttgtgagtctcgtcgtcccggcgaaggccgggacccagcgtctcgcttgagagcattgcaagcacccgacccaacgcgcgcatcgatgaaagcctgcctgatctccgtcggcgaacgcatgcccgctcgtcttgagccctccccttcaaggggagggttgggtggggatggtgttgctgtctcgcgcccccgcatcgaacgccccgcgggcttttccgccgcacgcgcatgaaagcccgcctgatctccgtcggcgaacgcatgcccgcctgggtcgccgaaggcttcgccgaataccgcaagcgcctctcgcgcgacctgccgctcgacctcgtcgagatcccgctcggcgcgcgcggcaagggccgcgacccagcccgcgcgattgctgacgaaggcatcgccgtgctcgccgcgctgcccagggacgcccacgtcgtcgcgctcgacggccgcggcaagccctggtccagcgaacaactcgccgaacaactcgccgcctggcgcatgtccggccgcgacctcgcgatcctgatcggcggccccgacggccacgccgccgacgtcctcgcccgcgccgaccagcgctggtcactcggcccgctgaccctgccgcacatgctggtccgcctcgtcgtcgccgagcagctctaccgcgcgatgtcgatcaatgcggggcatccgtaccaccgcgcttgaatgcgcctgcgcgcttcgcgcaaaaaggacacggtcctcgtccctctcgcgccaaatcggtattgagcatccgccatacggaaaaagcgcttcgtctcatttgctgagacgcggatgcaattcactgggatacgcagagtgagtggcggcaaaaatgcgagatcggaaaacgacaaaggccggtttcccggccttgtctgatttgatgcatctttcagctttgtgagctgatcagcttgttagcggaaagagcgcatttcctgatctactagcgatgccgaggctaaactgtcggctggattgcgtcaaggggagagggaggcatggcaaggatcaagtatcggcttgctctcgacatgggggcaaattcgctgggctggtgcgtttatcgtctggacgagttcgacgagccagacaagatagtccgcatgggatcacgcatcttttcggacgggcgcgatcccaagaccttggcctcgcgcgcggcggaccgccgggccgcaaggcaagcccgacgccgtcgtgatcgcgtgctcaagcggcgccacaggctgatgcaggctctgatccggttcggcctgatgccggtggatgcggcggagcgcaaacgattgcaggcgctcgatccgtatgtgctgcgtgcacgaggactggaagagccgttgaccccattcgagctcgggcgcgctctgtatcacttggcccgcaagcgtggctttcgcagcagtcgcaaggatgcgcgcgacgaggagtcggccaaggaaactggcaaggtccatgcggccatcaaggcattgcgcgaaaaggtccaagcgaatgggtgtcgtacggtcggcgaatatcttgctcgccagcatgccgagcgcaagtcggtacgggcacggcgcagcagcgatgggcagtacgtgctgtacctgcagcgcgcgatggtggaggaagagttcgatgctctgtgggccgctcaacagcaacaccacgcggagctgctgacggcagcggctttcgagaccttgcgcgacatcatgctgttccagcgtcggttgaagccagtagagcccggtcgttgccaattcgagacgaatcaataccgtgcgcggctctgtgcgcccctgcagcagcgtttccgcatcctccaggagctcaatcatctgcgtgtccgagagggcatcagcgatcgtgcacttacgctggaggagcgtaatcgcatgctggatcggctgctggccgagccgaacctggtcacattcagcgatctggccaaggctgccggcctgcgtaacgccaaggcgttcaacttcggtcgcgacgaaaagcgacgaggcttcaagggcgatgcagttggtgcacgctttgccgctaccgatgcgttgggcgagtcctggcaggtgctcaccgacgagcagcgatacgcactggcggtactggtcgagcaagccgaccaggtggagtccctgatggccgcgctcgcggcacttccggcggacgtgacgccggcacgcgagatcctcaagggacaacatgacgaggacgtcgtgctcgcggctcttgccagcctgccggtcaggattggagaacgacaggcccgcgtacttgcggggttcaattttccagacgactacggcagcctgagcctgaaggctctgtcgcgcatcgtgcccgagctcgagcgcgatgtgatcacctacgatgaggcggtgcgccgggcaggctacctgcatcattcgcagttccatacgggcgaattcttcatgcagttgccctactacggccaactgctggtcggctacacctctcccgccaccacggccgggaacgaggacgagcgccaatacggcaggattcccaatcccaccgtgcacatcggtctcaaccagatgcgccaactggtcaacgcgctgatcaagcgctatggccatccgcatcaggtcgtggtcgaactgacgcgcgagttcggcgcgtcaggcgaccgtcgccgcgagatcgagaagaagcaagccgaggcgcaggcccgcaatgaacgcgacgacgctgaactggaacgtctgggcgtccgcgttggccgcgagaacaggttgaagttgcaactgtgggaagagctcggcagggacgacgcgatggaccgctactgcgtctatagcggccagcgtctcagcaaggctttgcttttcagcgacgaagtcgagatcgatcacgtcctgccattctcgcgcacgttgcacgatggcatcggcaacaagatcctgtgcacacgccagagcaatcgcgacaagggcaaccgcacacccttcgagtcctggggacatacggagcgctgggccggtatccaggagcgtgccgaacgtctgccggaacacaagcgcaagcttttccgcgaggacgcgctggacgtattcctcgacggcaaggactttctcgcgcgccatctcacggataccgcctatcttggccgagcggccaagcaatatctgacctacatctgtcacaaggacagtgtctgggtatcgagcggcaagctgaccggcctgatccgcggcaagttcggactgagccgactgttgtccgaggatggcgcgaagaatcgcgacgaccatcgccaccacgcgctggatgccgccgtgatcggcttgtgcagtcgcagcctgatccagcgtatcgctaccgcggccgcccgatcggaaggtaaaggcgagcagcggctgctggaaggtctggagctgccgtggccgtcattccgcgacgagcttgccgcgagtctggccagggtggtggtttcgcacaaacccgaccacggcaagcaggctgccttgcacaacgacaccaactacgcgtggcgaggggcgcccgacaagcgtggtgacaatcctctcgtgggccggcggaggccgctcgacagcatcaagaacgccagcgatgcggagtcgattgccagcgaagcactgcgctcggagatcgtgcagttgcttgcgccgctctcctcgccgaaggacatcaaggccgcgttgcttgcctattcggaacgcaccggaaaccggcgcgtgctctgcgaagagcggctgtcggtcatcccgattcgtcatcgtcgcaccggacagccgtaccgctacgtcaagggcgatggcaaccattgctacgaaatctttcgcaagcccgacggccgctgggacggcgaggtcatcagtacgttcgaggcgaaccagaggagctacctggaggcgcccacgcgggcgcagaacggccttccgctcgtcatgcgaatccacaaggacgacgtcctcgcgatggactgcaatggcgccgatcaaatcttccgcgtggcgaaattttctgcgggcaagatctatctggcggcccataaagaggccaatgtggatggccgcaatcgtgatccggagaatcccttccgctatctgcaattcgcaccaagcaagctcagggagatgcgagctcggatcgtgggcgtggatgtccttggttacgtcaacgatcccggttttcgggaatgatcggccgcgtcgtcgagatcgccagcgatggacgttacctgtcgctggatcgcggtttcctcgtcgtcagccacaagggcgaggaggtcggtcgcgtgccgatcgacgatgtggctgcgttgatcggcaacgcacacggcttggcatacagcaacaacgtgctggtagcgctggccgagcgcgggacacccttcgtgctgtgtggcgccaaccatcggccagtggcgttactttggccagtggaaggccatcatcggcaggcagcgcgcatggacgcgcagctgcgcgccaccttgccgttgcggaagcggctctggaagcagatcgtgcaggcgaagatcggcatgcaggcggctgttgtcggtttgtatggtggctcggagttggcgttgcggcggctggccggcaaggtgcgcagcggcgatccggccaacctcgaggggcaggcggcaaggctgtactggggcttgctgcttggcaaggatttccgccgtgaccgcgacgcgcacggcatcaatgcgatgctcaactacggctataccgtgctgcgcgcaatcgtggcgcggcagctcgtggcggccggtctgcaccccggcgttccactgcatcacgccaatgaaggcaatgcgatgcgcctggtcgatgacctgatggagccgtttcggccactggtcgatgcttgggtgcgtcgcgtcaccgaggccggcacggtcgaactggatgccgatgctcgccgcgcattggcgctgctgggcacgcgcagcctgcgcactgcgcgcggcgtcagcccggtcggcgtggctgcacagcggctcgccgtgagtctggctcaggtctacgagtccccgaactcaggccttgacctgcctgagaccggacgcgctgctctgagtgcgctgtgggatgaaccgcatgcccaacacgaagcggaagaggagggcggttgagcggcggccagcgccaccactctgcgcctatcgactcatgtggatgctggtaatgttcgatcttccggtagacacagacgaaaaccgcaaggcggccaacgatttccggcacgacctgctcgacttcggtttcgagcggtgccaatactccgtatacctgcgtttctgcgaggggcgcgagcaggctgaaacctggacacggcgcgtgcaggccgtcttgccggcggggggaaaggtgtactgcttgtacttcaccgacaagcaatacgagggcatcgtccggttcgagcgtcgccagcgacgcaaaccgcccaagaatccggaccagtaccagctcttttgacgaccatgcgctgttttttgcttgcgccgaacccgcgacaaaactcctggtttcaagagcttgccgcgggtcggagcgtagcagatcaggaaatgcgctctggccggaacgtaccggcaatgttgtcgcgcattggccgggagcgtagcagatcaggaaatgcgctctggccggaacacatcgggttcgccgtcggttgtcgctacggagcgtagcagatcaggaaatgcgctctggccggaactccttgtagcttgcgaacttgtccgaaaccgagcgtagcagatcaggaaatgcgctctggccggaacacttcgccaccagcgcgccagcgatagtcagagcgtagcagatcaggaaatgcgctctggccggaacttaacggtcatgtacccctgcgttcccggagagcgtagcagatcaggaaatgcgctctggccggaactgtagccgccttcactcggcgtggtcgtgcgagcgtagcagatcaggaaatgcgctctggccggaaccctcttggggctgcctgtggtcggtcgtgagagcgtagcagatcaggaaatgcgctctggccggaacacgtcgatcttgccggtcggcgagccgttggagcgtagcagatcaggaaatgcgctctggccggaactggcatgctgcgtcacgacgatgcgcaggtgagcgtagcagatcaggaaatgcgctctggccggaacagacacgccacctgcgcgtcgccgacatgggagcgtagcagatcaggaaatgcgctctggccggaacgaacgctgccgagcctccttggcgtttgagagcgtagcagatcaggaaatgcgctctggccggaactccctgggcagcggggctgcaagctggactgagcgtagcagatcaggaaatgcgctctggccggaactggcagactgtcgggatgccggcgaggtcggagcgtagcagatcaggaaatgcgctctggccggaacttgtgcggcggccagctgatcgcccacggggagcgtagcagatcaggaaatgcgctctggccggaacgcacgtcggtcgcgatgtccagcgaccgcagagcgtagcagatcaggaaatgcgctctggccggaacccgctcgcgctccaggtcatcggcatctgcgagcgtagcagatcaggaaatgcgctctggccggaacttgttcgatggtcgccgcgtcgctgcggaggagcgtagcagatcaggaaatgcgctctggccggaaccgagtcagcatcgggggggcactcgcgcaggagcgtagcagatcaggaaatgcgctctggccggaacaagcccctgcgcaaccgctacacgtcggtggagcgtagcagatcaggaaatgcgctctggccggaaccaggcgggccgcgtagcggcttccacctgagagcgtagcagatcaggaaatgcgctctggccggaactgcagccggatggtgatctgttggaggggggagcgtagcagatcaggaaatgcgctctggccggaactcgcaatgcttgggcggcgcaggctgcgacgagcgtagcagatcaggaaatgcgctctggccggaacactggcggcgcatgccgtcgatcgtgccctgagcgtagagatcaggaaatgcgctctggccggaactggcggcgcttacaatcgggtttgccggagagcgtagcagatcaggaaatgcgctctggccggaacttacgacgctcaggggccgcttgcctgcacgagcgtagcagatcaggaaatgcgctctggccggaacttgctgctcgagcaccgtgcacatgatcggagcgtagcagatcaggaaatgcgctctggccggaacctgcgcaagcgcggcaacatcgatgcgcaggagcgtagcagatcaggaaatgcgctctggccggaacaacgtcaccaccgtcgccgagctgatcgcggagcgtagcagatcaggaaatgcgctctggccggaacgaacgatcgcgtcacccgcccgtagcttgggagcgtagcagatcaggaaatgcgctctggccggaacggcgaaccacatgtatttcctcaacctcagagcgtagcagatcaggaaatgcgctctggccggaactgcgcgcttcgagctctccaacgatcgacgagcgtagcagatcaggaaatgcgctctggccggaacgtggacgagagcggcgagccgaccggcccggagcgtagcagatcaggaaatgcgctctggccggaactggtgagcttgtcgcggatttttcccatgggagcgtagcagatcaggaaatgcgctctggccggaactctggccgccacggcggcggtggtgggtccgagcgtagcagatcaggaaatgcgctctggccggaactgcatctgcgcgctgggcgtcgtcgtggcgagcgtagcagatcaggaaatgcgctctggccggaactgggcaagccggtcttgatcgggccgcacagagcgtagcagatcaggaaatgcgctctggccggaactgtcgatgccttccagctcgttctggatccgagcgtagcagatcaggaaatgcgctgtggccggaacatccgcgttgcggcggaacaccggcagcggagcgtagcagatcaggaaatgcgctctggccggaacgcaggcgcacccacagacccttcttcgccggagcgtagcagatcaggaaatgcgctctggccggaactaggccggcgtgatgcgcgcgctgcacccagagcgtagcagatcaggaaatgcgctctggccggaacgggtgtccttcacattgaagcgcatagttcaagcgtagcagatcaggaaatgcgctctggccggaaccacccctccccctcccggagacccgctttgagcgtagcagatcaggaaatgcgctctggccggaacgaggcgcgcatggagcatgagatgcaaaccgagcgtagcagatcaggaaatgcgctctggccggaacttcggcagcaccgcgcacggctcgtcgcaggagcgtagcagatcaggaaatgcgctctggccggaacacacgtcgtcgtcggcctgtttccggtcggagcgtagcagatcaggaaatgcgctctggccggaacatggaacgtcaccagcaccgcgcctgatgtgagcgtagcagatcaggaaatgcgctctggccggaactgcacaaaggcgtcgtagtagtcagagtaggagcgtagcagatcaggaaatgcgctctggccggaactcaacctcatgcagctgctgctcaccagcgagcgtagcagatcaggaaatgcgctctggccggaacccgccccaattgttgccgccggtgaagtaggagcgtagcagatcaggaaatgcgctctggccggaacgtcacgatcggcgcgaaaagatcgtcggacgagcgtagcagatcaggaaatgcgctctgggttggctacactgggatactctttccggaggagcgttcatgaactggaaggatcacatcgtcgctacggccgatacttgcgccggaaaaccgcgcatcaagggcacgcggattacggtcgagttgattctcgataacttggcagcaggtcgggccgaggcgcagatcattgagtcctacccgcatctcgcggtggagcagattcgggcggcagttgcgttcgccagcagccgtgtcggccaagattcttcgctgaccggattcgaggcggcgacttgagccgcatgacgccaaccgtactggtcgacgagaacaccccacgcttgggggcgccgattgtggtggagcgtgtctgtggtgccgaaggagggactcgaaccctcacgatgtcgccatcggcggattttgagtccgctgcgtctaccgattccgccacttcggcttgaagtgccgcggcgctgggggctcgcggggcgcgcagtatacggcaagcgtggtgggggatgcagggaattcgttgtgagggtcgtatgcggcggccgccgccctcacgacgagcagcatccccacactacgaacaccatccccacccaaccctccccttgaaggggagggctaaagatttactgcgtgctgtcgagcgcgagggcgcactggtcgcgcaggtaccagccatcgtcggtggggtagaacttggcgcaggcgtcgagggcgcggcggtagatgtgcagcgagacggcgatcgcgtcgtcgctggggttcacgatggtgtggtactcgtgcggcgggatcaggctgccggcggagccgacgccggcgttcatcgtgccgcgcggttcgaagcggtagcggtcgccgcgcgcttcgatcagctcgtacggggtgatttcgaggttgccgtgccacacgccttcaacgcaccactggccggcgtggtcgtggatcggcgtgccctggccggggccccaggtcatcgcgacgacgctgtagccgtgttgctcgctgcggtacagctcgcgacgtgcgtagtgatcggcgacgctttcgaacacgcactcgggcaggcgcacgtcggcgtcgcgaatcaggcggcacagcgcggtgcgcagcatgtcggtgacgacggtctggtcggactgcacgacggcggcgtcgatcgcgtcgatcagctggcgggcaccggggaattcaagcgatagcatggcgactctcggagggcgggcgcgcacatgcgtggcgcgggcagcgtctcgattctaacccgcggccaaaaagcgcgcgatggcggcgccgaagcgcgggatgtcgaccaggaacgcgtcgtggccctgcgggctgtccagcgcgacgaagtcgacttcggcgccaccggcgcgcaggccgtcggcgatctgctgctgctggctgagggggaacaggatgtcggtctcgacgccgatgaccagcgcgcgctcgagccggatgcgttgcagcgcgtggtcgacgccgccgtggccggcctccttcggggcgtactcggcgacgtcgaaccagtcgctcgcgcgcgacaggtacaggtagctgttcgggtcgaagctgcgcacgaagcggcgcgcgtggccggcgaggtaggactcgacctggaactcggcgccgaacggatcgtcctcgcgctgctcggcgtcgaggcggatgcgcgcgaagcggccgacccattccatcgccgagcggtaggtgatcacgccgagcttgcgcgcgatcgacatgccagcctcggggtagtgctcctcgtcgtagtggccgttgttccagttgtggtcgaggcggatcgcctcgcgctgcagcgagcggatcgcgatcgcgaacggctgtgcctgcggcgcggtcgagatgctgatgtgcgtgcgcacgctgccgggatgcagcaacaggtatgcgagcgcgctcatgccgcccatcgagttgccgaccaggcaggcgaggcgctcgatgccgagcgcgcgcaccagttcgtggctggcgttggcgacgtcctcgagcgtcagctcggggaagtccaggcgatacggctcgccggtggcaggattgatgtcggccgggcccgtggagcccttgcagctgccgagcgtgttcgcgcagatcacgaaccagcggttcgtgtcgatgtgcttgcccgggccgatcatctcctcccaccagccgggcgagggatcgtccgcattcgaggcggcgtgcgcgctcggcgacaggccggtcaggatgaagatcgcgttgtcgcgcgcggcgctgagttcgccccaggtttcgtaggcgaggcgggcgccgacgagttcgccgccgcgcttcatgtggaacggcgagggcagggcgaaccagcggcgggcgtcggacatgcgcggaaggggcggcgaggcaggacgcgcaatgtacccagcggcggcggtggcgccaagtcggaacgcggggccttgagtgtccctgtgggagcgccggcaggcgcgatgcttgtgctgtccaaagcatcgcggcttccgccgctcccaccacaggcgccgaggtttccgcttgccgaaccgagcgggcttggagtcttcagcgcagcatcgtcagcatcaataccgtgccgctggcgtcatccatcgcctgcagcgccttgccgatcacggtgccgctgaccggcgtcggcggcgcgcgcatcgcgtggccgggcgtggaggaggagacgagcaggtcgccgatgcggatcgggccgttctcgccggtcaccttgaccggcactcggccggccagcgcgagcgcggggccgtcggtcggctggtcggcgccgtgacgtgcgttcatcgtcacgccggggtcggtcgagatcacgccggccacgagcgggctgtacgcgcggctggacaggcggaagcgatcgggctggtccgggtcgatctcgaccacgtcgccggcttgcggcagcgcgccgctggtcggcacgaactcggccaggtcggcgccgccggtctgcgtgccgccgttgaagaagcccttgccggtcttgtcgatgcgcgcgacgttggtgctgccgttctgtagcacggcgagattgccggacgcgccgctgtgactgacctgcagtgctgttcccggaccgcttttggcgatagccgttgcagggccgttgccggcgttggaaacctgcagcgtcgtgccgttgccgctggtgttggacgagtagaaaacaccggcgaagccgccggtgccggaactgacgccgtagatgccgctggcgccgaaattgccgaagatcgtgttgacctcgccgcgcaccgcggcggcgacgccgttggtgttgttgacgaagaaggaggcgccaccccggctggtcgggatgtcgccgatggtattggtctcgacttccaggacgttggacgtgttggaggcgttggtgttctcgaaacggccggcgcggcccttgctgccgctgatgccgacctgcccgtagacgccaatgccattgccggacgtgtcggtggcgataaatccgcgtacgccggaaccggcgccgtcattgcggccgaccaccgcgccggagagcgaggtattcgcgaggccgaccaccgactcgccgccgccggtgttgtcgccgatgatgccggcggcgcttatggaactcgtcgtgccgcggacgccggtgccgtccgctgtcgacaagatgccgtacccgctggcggcggtgacgttcagcgcgttacccgcgccgacggtgctcaccgccaccgcggtcgagttgttcgcggtgttgtagaggccgaacgtcgccgcgatgccactggtactggtggcgttgaggccggtgccgctgctggagttcgcgtacacgccgaaaccattgccgctggaattgccgtagacgccaatgccggacggggtgacgccatagacgccccagccactgccggcctgcgagccgtatacgccgatgccgaggccgccggtaccgttgttgatgccgcgcacgccgctggagaagccgccgggcgcggtcgaggagatcgcaccgacgacggcattcacgctgctgtcggtcgagctggagctgcccatcagcgcagtgttggtggtgttggtgatcgagaacagcgcgccggcgttcgactgcgtgttcgcgtagggcagcgtgaacggaccgctgcccgccgggcccgtcgggccgatcgggccttgcggaccggccgggccggtcggtccggcggggcccgtggggccggccggtcccgccggcgcgttcagcgcatactgcgcgaccggtgtggtcgtgaccggctggcgcggcgtcaacacctggccgttgacgctgatttcgagccagtactgcgtcgggccgaaggcgaggccgaagtcgaggtcggtggtgaacaggccgttgctcacgacgaggctctgcgtgattggcgcgccgatctgcgcgccgccggtggcggcgttgtagagcgtgaacgtgaacgtgtaggtctggttcggcagcgatccgctggcgttcagctgcccctggtaggtgaacgcggtggtctgcggtgccgcctgcacggtgccggcgaggccgaggccgaggcccagcgccaggccgaggacgatcgcgagtcgattgcgtttcatgctccacacccctcgaagccatggaagaagatcgtgtcgagtccgctggtcggcgcgccggcccagaagcccgcagagacgatgaaactgccgccggtggcgtagcccgcgaccggctggccgagcgtgccggcgagctggaagcaattgctgcgcgcgcgcgcgatgccggggttgatcgcgtgccagtcgaggctgaagctctcgaccgcttgcgccgactcgtcggcgtcgcggtgctcgtcgtcaggaggcgtggcgccgggcaggcgtgggatcgtggccgcgagcgccgcggcagcaaggatggcgcaccatcgggttcgcatcgacgtaccctcttcgtgaggacgaaaagccacagcaacgctggcattgctccgccgtcaccggcggccatcggtgcgggcaggctgtcgggtaacggccggcccgttgcgaagcctcgacgtgtgcgcgcgagcgcgtaacgcgggcgcgtcgcaacacgcgcccggatgcacggtggcgcctggatcgacgccacgggatggaacgcttcagaacccctgaagatgcgtcatcttatgacgaaaagtggcaactgcgcgcaagcggcctcgcgccgcgtcactcggtcgtcggcacggcgaggtggtcgccggctttc

SEQ ID NO: 1531 - DNA, 22907 bp, synthetic construct
  source 1..22907: mol_type = other DNA
  misc_feature 1..22907: note = Synthetic
tgcgcctgcgcgcgatcgagcagggcgtgaccgatcggcgcgtggtgcgcaagaccggcatcgtgagccgccacaccaccgaactgcggctggcctcgatcgagacggtcgacctgcgccagaccagcctcggccgcgtgctcggctacggcgacgtggtgctgaccggacgcggcgaaaccgccatgatgttcagccgcgtcgccgacccgctggcggtcaagcgtgcaatcgagagcgcctacgccgatcatgtcgaggccgcgcgcgtgcgcggcgaggccgaagccggcgcctgaacgccgcgcgcgcccatccgaccttgccctggacccaccatcgccatgcccgccgtcaccgcgatcctcaccgacatcgaaggcaccaccagctcgatcgacttcgtcaagcacgtgctgtttccgtatgcgcgcgagcgcctgcccgcgttcatcgagacccacgacgacaccgccgaggtgcagcactggctgcagcgcgcggccgaggaagccggccagatcgcgctgccgcgccaggaactcatcgaactcctgctcgagtggatcgacgccgaccgcaagtcgaccgcgctcaaggcgctgcagggcatgatctggctcgacggctacgccgcgggcgatttccgcgcccatgtctaccccgaagtggcctcgcgcctgcgcgcgtggcgtgcagccggcaagcgcctgtacgtgtactcgtcgggatcggtgcccgcgcagcggctgttcttccgctacagcgaggccggcgacctcaccccgctgttcgacggctatttcgataccgaaaccggcgccaagcgcgaagccgcctcgtacacgcgcatcgccgccgcgatcggggttgcgcccgcggccgtcgtgttcctgtccgacatcgaggccgaactcgacgccgcgcaggccgccggcatgcagacgatcctgctcgcgcgcgcgcccgcacaatgcccgcccggtgcgcgccatcgctgcgtggccgatttcgatgcgatcgaactggcgtgagcgccgcgcacccctgacatgagcccgcgcacgcccggctccatgctgcgcaccttggccgacggcctgcgcgcggccacgctgcgcgcgccgcgcggccatgccctgcccggcagcgcgggcgccttcgtggcgctggtggcgatctacctggtgatctcgctgctgatcgatgcgctcgacagcgcgcggccatggcgcttcgtgcgcgcgggcgtggtgagcgtgctcgccgactgcctgctcacctatgccgccggctggctgctcgcgcagctcgcgcgctgccgggaactggccaccggcgtggccaccacgctgctcgcggccaccgtcatggtcgccctcgtcgtgcactggccactgcgccacctcaccgcgctgctgcagcagcacggccacccactcgtggccgtgctgcctgcgctcgcgggccggttctggtggctgctggtgctgctcgtgctcgcgcactggctcatgccgctgcgcctcggccgcagcctgttcggcgcgctgctcgcgttcgtggtgtccggtgcggcatggtggtggctgccgtcggccgcactcgtcgacacccgggtcgtggccacgccggcgccggccgatgccccgcccgcgttgcctgcgccggtgtccgcgccgcagccggccacggacgaacccgacttcgatcccgaacaggtcatgtacgcgcaggccgcgctgctcgatgcggagctggcgcggctggcgccgcgcacgccgggcaagatcaacctgtacgtggtcgcattcgcgggcgacgccggcgaggacgtgttccacaacgaggtcgagtacgtgcgcacgctgttcgagcagcgcttcgatgccgccggtcacgtggtggtgctgcagaacaacccgcgcacgctggagcgtgcaccgctggcgagctggaccagcctgcacgcgagcctgcaggcgatcgcgcagcgcgccgacccggcgcaggacatcgtgctgctgtacctgaccagccacggttcggacgaccacgagctgctcgtgcagatggacccgctgccactggtgcagctgtatcccgaggacgtggccgatgcgttcaggacccagccggcgctgcgctggcgcgtggtcatcgtcaatgcgtgctactcgggcggcttcatcgaggccctgcgcgacgactccacgctggtgatgacctcggcgcgccgcgaccgcacctcgttcggctgcggcagcgacgccgacatcacctggttcggcaaggcgctgctggtggatgcgctcaaccgcaccacctcgctgcccgaggcgttcgcgctcgcgcgcgactgggtggcgcagcgcgaggcggccgatcccgccgcggacggcacggtcgagcattccgagccgcaactggcaacctcgccgagcatcgaggcgcgcctggcccgctggagcgcggcgctgccgccgcgcccgccggtcgagttcaagccggctgcgcggcgctgatcaacgcgggtccttgcgcagcgcgaacaccgtgacctgcgcatcgcggtggaccggcgtgcccagtcgcgcctcgacccgggccgcacacgcggccatgtcgggccacggcaccggccacgggaacttggcgccgtagggcaacgtccacggctgcatgcgcagcacgaggtagtcggcgccccaggtcgcgccctcgacgatgtcgccgaggcgcccgacgcggctgaaatgcgccccggtcgcgtggtaggagtactcgtcccagtcgccctcgccgcacacgggcgacgccagcgcgaacttgacgttctggcgatggatccgctgcagccacggatcgggaacatagttggaatgcatgtgcgcgggcgtctcgatcagggtgacgctgccgggcgggcgctgcgcgaggtcgcggtagaacggcgacaccggtcccagctcgaacagggtcacgtacggattcgcgcgcgggtcgtagtcgaactggaacagcgcatggcccatgaactggttgggatcgtagtaccaggttggcagcgggccgcgcaccaccacgatcgcgagccatgcgcccaccgcgcaggcggccacggcggcgttgcgcaggcgtccgagcagcgccaccagccctgccgccaccagcagcaacagccacggcaggatcggcgtgcagtagcgcgcgagcaccgccggatgctgcacccacgccggccgtgccagcgcgatcgcggccacgccgacgatgccggcgcccacgatcgccaccaccaggaagcgatcgcgccgccacaggcgcacgccgccgagcacgcccagcgccagcgaggccgcgagcacgaacccgtcgaaggtgccagcggccatgagcagggtgcggtagaagctgttccagctcacgctgtcggtggccgccttgccggccagtgcgtcccagtcgttgagcagcggcggcaacagcgcgattgcgagcacgccggccacggaggcacccagccgcagcacatggccgagcaaggcccacgactgcgcgcgccgcgccggccgcaggcagccggccagcgccaccagacccacgcaggccagcggccacagggtgaacagcagcgacagcaggtgggcccagcccgcgaggcaggttgccaccacgtacacgccggcccagcccaggctgcgcccttcgtgccggtaccagtggcgcagcgccaccagcgcgaccacgccacacagcgcgagcagggcgtagggtcgcgcggtgcggctgaggtagatgagcagcggcgacagcgcgagcagcgcggtccaggttgcgcgttccggcaaggccagcgtacgccgcagcaacgccggcgccagcagcagcaaggccagaccacacagcagcagcggcaggtgcatcgaccattcgctcagcgtgccctgttggtacagccagcggtagtagagcgtgagcgggatcgaataatcggccacgccgaagtggtcggcgatgttctccatgtcggcgccgatgagcttgcgcaccgcatgccactcatcgtccatgagcatctgcgagcgcagttgccacacgcgcaggaagctgcccgcgagcacggccgcggccaccagcagccaccacggccagcgcgcggtgcgcgcgcccggcaacgcctcaggctgcatcgacccggcccgcctgcaggcggtcgcacgccgccgtggagaacagccgcgaacgccgccagccccacttccacagccgatagctcagcgcggtgcgcagcacgcccaggccgtagaccaccgagcggcggaaattgatctggctggcctcgggaaagtagcgcgtgggacaggagatctcgccgatgcgctggccgaatgcatgcgcctgcaccagcatctggttgtcaaacacgaagtcgtcggaattgaccgcgagcggcagcgccagcagcacctcgcgcgagaacgcgcggtagccggagtggaactccgacagcttggagccgatcacgaggttctcgaacgcggtcaacatgcggttgaacacgtacttgtagcgcggcatgccgcccgcgatcgcggtgttgccgaggatgcgcgagccgaacaccacgtcatacacgcccgaggcgatcatcgcggccatcgcggtgatcaggcgcggctcgtactggtagtcgggatgcagcatcaccacgatgtcggcatcggccgccagcgccagcgcgtagcaggtcttctggttgccgccgtagccgcgattgaccgcatggcggtgcgtgcggatgcccagctgccgcgccaccgccaccgtggcatcgtcactggcgtcgtcgaccagcagcacctcgtcgacgatgtcgtgcgggatcgccgcatggcactcggccagcgtcttctccgcgtggtaggcgggcatcacgacgacgattttcttgccatggagcatcgcagggcccgcaccggggaacgccgcacgcggcggccggaggtggcgaccccgacaggattcgaacctgtgacctcgcccttaggaggggcgcgctctatccagctgagctacggggccgagcaggcgaagtctagcaatgaacccacgcccggcgccgctgcagctgggtcgaccagcgggcggcacgcgattgcaaccacgctgcagcgcccgcatctacggcggtgcggcgcgcgcgcctgctacaatttcacgttttcgggcgcgctccccgcgcccctgcctgcttgcggagtccccatgtccagccagatcctcagcgcccttggcctcgcccaagacaattccggcacctacctcggccacggcgagtggtccaccaccaccgatgccggcctgctgcagccggtcaatccgaccaccaatgaggtgatcgcgcgcgtacacgcctccagcgaaagcgactacgagacgatcctgcatcgcgcacagcaggcatttgccacctggcgcagcacgccggcaccgcgccgcggcgaggcgatccgcctgtgcgccgacgccttgcgccgccacaaggatgcgctggggtcgctggtcgcgctggaaatgggcaagtccaagcccgagggcgacggcgaagtgcaggagatgatcgacatcggcgatttcgcggtcggcctgtcgcgccagctgtatggcctgaccatgcactccgagcggcccggccaccgcatgtacgagcaatggcacccgctcggcctggtcggcatcatctcggccttcaacttcccggtcgcggtgtgggcctggaacagcttcatcgcggccgtgtgcggtgacatctcgatctggaagccctcgcccaaggtgccgctgtcggccgtggcggcgctgcgcatctgcaacgacgccctcaaggcgggcggtttccccgacctgttcttcctgttcaacgacgccggcaccgagctggcccagaccttcgtcgacgaccgccgcatcgcactggtgagcttcaccggctcgacccgggtcgggcgcctcgtcggcgagcgcgtggcgcggcgcatgggccgcagcctgctcgaactgggcggcaacaacgcgatcatcgtcgacgcgagcgccgacctcaagctggcgattcccgcgatcgtgttcggcgcggtcggcaccgccggccagcgctgcaccaccacgcgccgcctcatcgtgcacgaatcgatccacgacgaggtgctgggcaagctcgtggccgcctacaagcaggtcgagaagaagatcggcgaccccaccaatcccgacaacctcatgggcccgctcaacagccgcgatgcggtggcggcctaccttgccgcgatcgagcaggccaaggccgccggcggcaccatcgccagcggtggcgcggcgatcgagggcaagggcaacttcgtgctgcccacgatcgtcacgggcctgcgcaattccgacccggtggtgcagaccgagacgttcgcgccaatcctgtacgtgctcaagttcaagacgctggatgaggcgatcgcgatgcagaacgacgtgccgcagggcctgtcgtcggcgatcttcacccagaacctcaaggccgccgaggcattccttgccgccagcggttccgactgcggcatcgccaacgtcaacatcggtacctcgggcgccgagatcggcggtgcgttcggtggcgagaaggagaccggcggcggccgcgagtcgggctcgaccgcatggcaggcctacatgcggcgccagaccaacaccatcaactactccgatgcgctgccgctcgcccagggcatcaagttcgagttctgaagcacgcatcggcgtgcgcggtgcggcgcggccggcatgcgttcgattgaacgcgtccggccctgccactacccttgccacccaggcccagccacgcccgaggacccgcgcgcatgaacgttcccgccccggcgccacagaccagcacactggcgatcatcagcctcatcttcggcatcgtgtgctggttcgtgctgccgttcatcggcgccctcgtcgcgatcatctgcggccaccttgcgcgaggcgagatccgcaacgcggtgccgggcacgctcgaaggcagtggcatggcgctggccgggctcatcctcggctgggtgcagatcgcgctgatcgcgctcgcgatcgtgttcgtgttcctgttcctgggtgggctggcgttcctcgccgcgggcgcgcactgacgcccgcaccgcgatgaggtccgcgcgcacgcttgcggcgcgtgccgcgcgcgccccgcgcacccgctgacgccagccaccacccgatgtatgccctcgcccgccccttgctgttccgcctcgacgccgagcgtgcccacgacctcgcgctgcgcgcgctcgaactggcctggcgctgtggcacgagcgcgctgctgggcggccgccgcgcgcccatgccgctgcgcgtgttcggcctggagttcgccaatccggtcggcctggccgcagggctggacaaggacggcgcgcacgtggatgcgctcgccgcgctcggcttcggcttcatcgaggtcggtaccaccacgccgcgcgcgcaagccggcaacccgcgcccgcgcctgttccgcctgcccgagcacgcggccatcatcaaccgcttcggcttcaacaacgcgggcgtggatgcgctggtgcgcaacgtggaacgcgcgcgctttgccgggccgctcggcatcaacatcggcaagaacaaggacacgcccaacgagcgcgcggtcgacgattacctgtactgcctcgaacgcgtatacgcgcgcgccagctacgtcacgatcaacatttcctcgcccaatacccagggcctgcgcgacctgcaacagcagaacccgctgcgccgcctgatcggcacgctgcgcgaggcgcaggagcgcctggccgcgctgcatggcgcgcgcaagccgatgctgctcaagatcgcgcccgacctgggcgcgcccgaactcgacgccatcgccgaggtggccatcgccaccggcatcgacggcctcatctgcaccaacaccacgctcgcgcgcgatgcagtggcaggccatccgctggccggcgaaagcggcgggctgtcgggccatccgctgctcgcaggctcgaccgccgtgctgcgggcgatgacgcagcgcctgggcgggcgcatcgcgctggtcggcgtcggtggcatcctcggcggcgccgatgcgctggccaagctcaacgcaggcgcgagcctcgtgcaggtctacagcggcctggtgtaccgcggcccgcgcctgatcggggaatgcatcgacgcgatcgccgcacacgcggccggaacacgtccgtgaaccaccgcgcgcacggcgccgcctacacgatcgcggagaacgcctcgctgcgcacgcgcaacagctttggcgtcgaggcacgcgcggcgctgctggtcgaagtgcggcgcaccgaggcgctggccgaactgatggcgttcgcgcgcttcaggacgcaggcgccgctcgtgctcggcgccggcagcaacatcctgttcacgcgcgactggcccggcgtggtgctcagcctcgacacgcgcggcatcgagctgctcgacgacgacggcgagcacctgcagctgcgcgtcgccgcgggcgagcgctggcatgacttcgtgctgtggtcgctggccaagggctgccgcggcctggagaacctcgcgctgatcccgggcacggtcggtgccgcaccgatccagaacatcggcgcctacggcgtggaagtggccgagttcatcgtcgcggtcgaggcctgggaccgtgatgcggggcggctggtgacgctcaccgccgcgcaatgcgccttcggctatcgcgattcgctgttcaagcgcgagcaggaacgctggatcgtcgtggccgtgcggtttgcgctgccgcgccagcgcgcactgcgcaccgactacgcgggcgtgggcgaggaactggccgcgatgggcgtgcacgatgcgggcgcggcgcaggtggccgaagcggtcatgcgcctgcgcacgcgcaagctgcccgacccggccgtactcggcaacgcaggcagtttcttcaagaatccactgctcgccgccgacgccgcccgcacgctgtgcgcgcgccatccgggcctgccatgctggcccgacccacaaggccgggccaagctgtcagcggcgtggctggtcgaacaggccggctgcaagggactgcgcgagggcgatgccgcggtgtcgcagcagcatgcattggtgttggtcaaccacggcaacgccagcggcgcccagctgtgggccttggccgaacgcgtgcgcaccgcggtgcaggcacgcttcggcgtggtgctggagcccgagccacgcatcgtgtgaaggccagggtgccttcgcggtcaaaggcggcacatcgcatcgcgcgcgccaggcgcgcgcaccgatccatgtccgaagtgggctggtcattccccaacaaaagtgcgtgctcggcaccccacactctcaggccacgccctcatcagtcgaaaaacctgatcccaattcctcggatcccaattcctcgaaccctgcgctcgatccaggggcgcgtgggcaagtgaggcaatcgtcgcgccaaggcctctgtctcaactgacgagacagaaatgtgtcagaaacgacaaaggccggttgcccggccccgtctgatttggtgcatctttctgcttgttagcggaaagagcgcatttcctgatctgctagtgtcgatcaggctagaaccatcgccacgaaacgtcaaggggaattcatggcacacgtcaaataccgtctcgggctcgacctgggcacaaactcgctcggctggtgcgtctaccgactcgaccaaaacgacgaacccgacaagatcattcgcatgggctcgcgcatcttcgccgatgggcgcgatccgaagacgctggcgtcgctggcggccacgcgtcgacaggcacggcaggcccgccgtcgacgagaccgggtgctgaaacgccggcaacgcctgctgcaggccctcattcgctacggcctcatgccgcagaatgtggacgcgcgcaaggcactgcaacaagctgatccgtacgagttgcgcgcccgcggtctggaccaaccgcttgccgtgtacgaattgggtcgcgcgctctaccacctcacacgcaagcgcggcttccgcagcagtcgcagggatggtggcaacgccgaggaggaaaaagaaaccggcaagatcaacgaggccatcaggcgcctgcgcgagcagatccaaaccgcccgatgccgcaccgttggcgaataccttgcccgtcagcatgccgagcgcctgcccgtgcgggcgcgacgaagcagcgatggccagtacgtgctgtatctgcagcgcgatatggttgcagaagaatttgacctgttgtgggaatctcaacgtcacttccaccccgatgtgctcactgatgcggcgcgtgactacctgcgtgacacgttgctgttccagcgcaagctgctgccggtgctgccaggccgttgcctgttcgagggcgacgaactgcgggctcccctgtgctcaccactgcagcagcgctttcgcatcctgcaggaactcaacaacctgcgcctcatcgaaggcggtgcagagcgcgcattgagcctgaccgagcgcaacgtgttgctggagcttctgctccgcaatcgggaagtgagtttcgcaaagctgcgccacgccatcggtgtcgggcgctcgtccactgctcggttcaaccttgaatcggacaagcgcaagggcctcaagggcgacctggtgggcacccaacttggcgcgtcgcaatgcataggcgatgaatggttccgctggccgcttgatcagcaagacaagttggcgctgctggtcgccagcgcggaccagaaagaccaactattggcgaccctgtgcgctgccccatggcagctcacgatggataccgccaacgcgatcgccgactgccgcctgccggatgaatatggcaatctgagccgcaaggcgctgctgcgcatcgtgccagagctggaacgcgaggtcgtaacctatgacgtggctgtgcaacgcgccggctacgcacatcattcgcaactgcacaccggcgaattcttcgagcgattgccctattacgggcagatcctccgcggctacacggctccggccgaacgagcccgcgtggccgacgagaaacaatacggaaagatccccaatccgaccgtccacatcggtctcaaccagctccgccaactcgtcaatgcactcatcgcgcgctacgggcatccccgcgagatcgtcgtcgagcttacccgcgagttcggcctttcgggcgaacggcgccgcgaagtcgacaagcgacaggccgacaaccagcgtcgcaacgaacgctacgatgcggagctggaacggcttggccaacgcgtctcgcgcgacaaccgactcaagctgcagttgtgggaagaactcggcagcgatgatgcgctcgatcgctactgcatctacagcggccagcgcctgagcaaagcactcctgttcagcgatgaagtcgagatcgatcacatcctgccgttttcgcgttcgctgcacgacggcgtcagcaacaagatcctgtgcacgcgccaagcgaaccgcgacaagggcaaccgtacgccgtacgaagcctttggtcactcgcccggtacgtaccgttgggacgacatcgcggcgcgggtcgaacgcgtgtttgccgccggggccaaccccgcactgcgccacaaagcgcgcctgttccgcaccgacgcgctcgaagccttcctcggcgacaaggatttccttgcacgccacctcaccgacacggcctacctcgcgcgcgcggctcgacagtacctcagctacatctgccacaaggacaatgtatgggtctccagcggcaagctcaccggcatgctgcgcggcaagtggggtttgagcgcgctgctgtccgacgacggccgcaagaaccgcaatgatcaccgtcaccatgcgctcgatgcagcggtcatcggcatgtgctcccgatcgctcatccagcgcatggccgtcgccgccggccacgccgaagagcacggcgagaaccgcctgctggagcgactggaactgccgtggcacacgttccgggacgaattgcgcgaatgcctgcaccagatcgtcgtttcgcacaaacctgaccacggtcgtgaagccgccctgcacaacgacaccaactatggctggcgcggcgagcaggacaagaagggcgctccactggtcgggcaccatgtgccccttgaatccatcgtcaaggcggctgacgtggaacgtgtcgccgacatcgagcttcgggcgcagctgcgctcgctgctgcgtccgctcaattcgaccaaggacatcaaggcggcgctggcggcctttagcgcacgcactggcatccgccgcgtcatgatcgaagagcggctctcggtgatcccaatccacgatcgccgcaccgggcggccctaccgctacgtgaagggcgacgcaaattattgctacgacatcttccgcgggtcagacgggcgctgggagggcagcgtcatcagttcgttccaagccaaccaaaaggtcgacgcaagcacggccggatccgcgcccgatggccgcgagcgcatcatgcgcatccacaagggcgacatcctcgccatcgaggatggtacggtcacgcggtacatgcgcgtggccaagttttccgcgggcaagatcgccttggtggacctgcacgaagccaatgtcgatgcgcgcacacgcgacgagagcgacgcgctcagctacttcttcaaggctccaggcaccctgcgaccgctgcgcgcccgccaggtcggcgtgaccgttctcggctacgtcaacgatccgggcttcaaggactgacgtgatcggccgcatcgtcgagattgccggtgacgcgcgctacctgtcgatcgagcgcggctttctcatcgtgagccacaagggccacgaactgggccgcacgccgatcgacgacatcgccgcactcatcggcaacgcacacgggttgatctacagcaacaacctgctcgtggccttggcggaacgcgccatcccgttcgtgctctgtggggccaaccaccgcccagccggcctgctctggccgatcggtacccaccaccgcgaagcggcacggatggacgcgcagttgcgcgcgaccacgccccagcgcaagcgactgtggaagcgactcgtgcaggccaagatcggcatgcaagccgccgtgctggcactgttcggactgccgccactggccctgcgcaggatgatgggcaaggttcgcagcggcgacccatccaacatcgagggccaagccgcacgcctttactggatgctgctgttcggcaaggaatttcgccgcgaccgcgaagccgcgggcatcaacgccatgctcaactacggctacaccgtgctgcgcgctctggtggcccgtcagctcatggccgctgggctgcatccaggcatttccctgcaccacgccaacgagggcaatccgatgcgcctggtcgatgacctgatggaacccttccgcccattgatcgacgccagcgtacggcgcctcgtcgacgacgcccggaccgaactggatgccgatgtccgccgcgaactcgcactgatcggcgcgcgcagcctgcagaccgaccgcggcatcagcccggtcacgatcgtggtgcaacgactggccgtgagcctggcgcaagctttcgaacaacccaagttgccgctgcaactgccgccaaccacttccaccacgctcgccgctttgtgggatcaagctgatgccgatgaacacgcgcaggaggaagcgtgaacggcggcccgcgccgccgctgtgcgcctacaggctcatgtggatgctcgtcatgttcgacctgccagtggacaccgacgagaaccgcaaggccgccaacgacttccgccgcgatttgctcgatttcggtttcgagcgttgccagtattcggtgtacctgcgcttctgcgaagggcgcgagcaggctgatacctggacccgccgcgtacatagcgtcttgccgggcggcgggcgtgtgtactgcctgtacttcaccgacaagcagtatgaaggcatcgtgcgtttcgagcgccgccagcggcagaaacgtggtcagaatccggaccaataccagctgttctgaagatcgccatgcgcttcttgcccgccccagccgccgccaaacccatgagaatcatgggcttggcggcggcagagcgtagcagatcaggaaatgcgctctagccggaacgcggaggattacccatctgagcgaccgcgtagcgtagcagatcaggaaatgcgctctagccggaacatttcgttctggtgacgcagcatccgacaaagcgtagcagatcaggaaatgcgctctagccggaacatccgcagtcgcgcggatcatttcgcttaagcgtagcagatcaggaaatgcgctctagccggaacatttcagttctccatcatcatgcgggcgaagcgtagcagatcaggaaatgcgctctagccggaacgttgtgctgtttcggggtcaggctgcagtgagcgtagcagatcaggaaatgcgctctagccggaacgaacgtcacggtgtcgatgccttggattgagcgtagcagatcaggaaatgcgctctagccggaaccgatggggtctcgaatcatcacgcatccgaagcgtagcagatcaggaaatgcgctctagccggaactacggtgatggatgaggtgcacgcgcacaaagcgtagcagatcaggaaatgcgctctagccggaactcggacccacgtcaacatgaggaaccgacaagcgtagcagatcaggaaatgcgctctagccggaacacaagctggtggccaccaactattggcgcgagcgtagcagatcaggaaatgcgctctagccggaacatgcggaactgggcaatggcggcctcaataagcgtagcagatcaggaaatgcgctctagccggaacgatgctgctggacgccgcatctgcgtttgaagcgtagcagatcaggaaatgcgctctagccggaactacagtttgcatccaccagcggtcgcgccgagcgtagcagatcaggaaatgcgctctagccggaacgcgtcacccgcattgaacgccgccgcagcaagcgtagcagatcaggaaatgcgctctagccggaactaggccttgaccgcctgcggattcatcgcgagcgtagcagatcaggaaatgcgctctagccggaacgaacttgtgggggtgtcgggcgcggggcgcagcgtagcagatcaggaaatgcgctctagccggaactggcgtctgaccgcgccggaactgggttgcagcgtagcagatcaggaaatgcgctctagccggaacacgtacctgctgcacctcgcgtccgcgctcagcgtagcagatcaggaaatgcgctctagccggaacgcgttggacagcgcaggggaaaagacggtgagcgtagcagatcaggaaatgcgctctagccggaacacgtagagcgcgcgggcgtcatctcggcagagcgtagcagatcaggaaatgcgctctagccggaacggcagcgcgtgcaactggaatgtgcgcgtgagcgtagcagatcaggaaatgcgctctagccggaaccccgtcgtgatcacgaccaaaccagttttgagcgtagcagatcaggaaatgcgctctagccggaacgaggaagcgccttgggtcgccaatgcagcgagcgtagcagatcaggaaatgcgctctagccggaaccacccggacctcgaggacttcatcaaggcagcgtagcagatcaggaaatgcgctctagccggaacgaccaagagcgcgaccgacgaacgcgccgctacgcgaaagcggcgacgcggtcacgcccaccgcgccggaagctggctagaatcggtgccgcacccagcgatgccagggccggcgtcacgttcttcctcgcccaggagctgccatgtcgaccatcgccaccttcaccggctcgcgccgccaactgttcgatgcgctgctgggcagtgccagcagcgcggtcgagcccgcgaccgcccgccgccgcccgggccgcaccggcctgcgtgaactggacctgccggtgacgccgcaggcgctgaccgtgccgccgccggcgattcgctggctcacgcgcgcgacgcatggcttcagcctgcccgagcacgcggcgttcctcgcgctcggcggcgacgacgaaacgtgctgggcggcctggctggcgcagcagctcaaccccgccgccatcgacgacagcgcctgcgacaaccgcatcgccagcgccgctttccagaccctgggcatgaccgtgccgcagttgtggacgcgtcgcaaccagatcggcggcagcaactacttcgagcgcatgcggccgatcgccgaggtcgaggcggccacgatcatccgccagatctacagcaggcggcagttgttcgaggtcatggtcggcttctggcacgaccacttcagcacgttcggctgggactacgacggcgggccgatcttcgtgcaactcgatcgcgacgtgatccggcctcatgcgctgggcaacttccgcaccatgctcgaggaagtggccaagtcgaccatgatgatgtactacctcgaccagtacgcatccaatcgcgacggccccaacgaaaactacgcgcgcgaactgctggaactgcacacgctgggcgtggagaactacggcggtatcctcgcgcccgatgaccccagcctgccgatcggcgtcggtggcgatggcaacccggtgcgtctcaagtacgtcgacaacgacgtctacgaggccgcgcgcgccctcaccggctggaccatccgcaacggccactggcagtacccgagcgagaacgacggcaccttcacctaccgcctgccctggcacgacccgtccaacaagtacatcctcaaccgctacttcgcctacaacgcgggcgacaacggcaacgacggacgcaaactgttcgacatcctgtgcggccatcccggtaccgcgcgcttcgtggccaccaagctgtgccgccgcttcgtcggcgacgcgccttcaaccgcgctggtcgacgccgcggccagcctgttccaggccacgcgcagcgcgcccgaccagatcagccaggtggtggcgctgatcctgcagtcgaacgagttcaagaccagctggggcaccaagatgaagcgcccggcgatgagcgcggtgagcgcgctgcgtggcctgctcgccgacttcaccccggtgctggacaactccaatgcgtggaccaccaccgaggagttcctgtcccgggtgcgccagaccgggcaccgctggttctactggcccacgcccaacggctacccggacgtgcaatcggcctgggccagcagcagcgcactgggcatgaccttcaggctgctcgcacgcattcccgagctgcatgcggtcaatggcgacaacgccacgcccttcatcgccgacgtccacggccagaccctcgcggccttcaccaacccggcccagcgcagcgccaacaacatcgtcggctactggtgcgaccgcgtgctcggctaccgccccgagccactgcgcaccaccctggtcgacttcctgcgccagaacgcgggcgccgacgccgcactggacctggtcagtgacagcggcggctcccacgccggcgtgtggaacggcaacgacctgtccaagcactacacgatcgcgcgcctgcgcaccacgctcgcgctgctgctgtgctgccccgaattcctgcgccgctgaggagccgaccatgccttccttcaatcgtcgtgacttcctcaagggcgtgagcgccctctcgctcgccgccggcaccggcagccgggccaaggcctggttcagcaccggcgacctgctgcccgccgcagccaccaacgacacgctggtgatggtgttcctgcgtggcgcgatggatggcctgagcctgctgccgcccagcgccagcaacgccaaccgcggccactacgagtcctaccgcagcagtacgcgggtaccggccaccggcaccggcgccggcctcgcgctggccggcacgcccgactggctgctgcacccgcgcgccagcgaactgcgcaacctctacaacagccagcacctggcggtggtgcttgccgccgggcaactgcagccggtgccggtgatccgcagccatttcgacgcccaggccaacctcgagttcggcttcggtggtggtaccggcaacagcgtgggctggttcacgcgccatctggtcagcggcggcctgccacccacggtcccgctgcccgcggtgtcgatgggcgacatcactgccgcgagcctcctcggcagcagcgacaccatcacgatgggcggcggcgcggatttccggctgaccaccttccattggtcatgggacggcgatgcggccgacccgcccggcgtggccggtgccggcgccgtcgcgcgcatgaacgcgctgtggaatggcaccaccgcgctcgaacgcgcgggcgccgaaaccctcgcctcgctcgcgctgctgcgcggcatcgactttgccggctacacgccgtcgggcggcgccaactacgacctgccctacaacggcggtttcggtgatcagttgcgcgacgtggccaacctcatcaagcagggcgtgggcctgcgcgcggtcacgatcgaccttggcaactgggacacccatgtcggccagggcaacccgacccagagctgggactggttcggcaaccaggtcgagagcctgtccaaggggctccatgcgttctacaccgacctcgccagcggcccgaccaactacatgaaccaggtcagcgtgatcgtggtgagcgagttcggccggcgcgtgctcgaaaacgccgacggcggcaccgaccacggctacggcaacgtgatgctggcgctgggcgggcgcgttaacggcggccaggtgtacggcacgttcccgggactttccggcgagcagctgtacgaaggcaccgatgtcgcggcgaccaccgactaccgccgcgtgatcagcgaggcgctgatccggcgcatgggcaatcccaacatctactacgtgttccccggctataccggctacacgccgatgggcatcttccagggcagcgacctgcccccgggcgactacgaccagatcttccgcaacggcttcgatggcggctgatcgatcccctgcacccgatgcgctgcgaccggtcccgttcacatcccccgaccggtcgcatcatccacacagtcccggagctgtcgcaggcgactactgaccgccgcctgcgacacgcattggcccagcggatcgccgcgccagggacgattccacaggtccggcgtcacacccgggttcaaccgggatgcttgtggtcggacgcagtggatgcggctgcgtccacggccttgtccttgaccgcatccatcgccttttccttggccattccagcagccggatccttgacggctccagcatcgacgcccgacagcgcaccggcacccgccgctccgaccgccgcggccttgtcgcccaaggcatcgcccgccttgtccctggccacgtccatggccttgtccttggccatctcaaccgcctggtccttgaccgcctcgccatcgacgcccgacagcgcaccggcaccggcacccgccgctccgaccgcagccttgtcgcccaaggcatcgcccgccttgtccctggccacgtccatggccttgtccttggccatctcaaccgcctgatccttgaccgtctcgccatcgacgtccggcagcgcaccggcaccagcgcccgccgctccgaccgccgcggccttgtcgcccaaggcctcgcccgccttgtccctggccacgtccatggccttgtccttggccatctccacggccttgtccttggcggcatcgactgcggctttgccggcctcgtcctgcgcgagcaccgatgagcaccccacgatcaatcccaccgcaagcagccatttcatgttgccgcactcctctccgattgctggaggcgccaacctagccccgtgcgaggggccgggggttaaatccgcatcatcgccgcgaccctgcaacaaaagttgaggtttccactccgatgtgcgcctgcgatggcacgcaacgtcaccccgcgcggagctgcgcggcccgtttcgtcaaacaccatgttcgctgcacccaaccgcgcgcgtaagcgcgaaggcgccaatcgcgtcaggactcgctgcactcgaaatgcacgaggtcggcgtcattggcgccatgcgcctggccgaggctgatcgagccgagccggcgcaggtgcacttcgtcgcggtgcacgagcacctcgtggctgggatcggtgcggatccagctgccgttggtggagcggtcggcaaacatgaagtggccacgtttccattcgatcagcgcatggttgcgcgacacccactcagtttcgaccacgaggctgctggccggatcgcggccgatcgagaaagtggcatcctcacccagctcgaacacctgtccgcgatggcgcagcaacaggcgcgcgcgggcgatggtcgccggaccggcctgcatcacgcgctgcacggtggtgacgggcgcgagatcctcctgccacagcacatcgacgatctccagcggcgcctgcttgccctgcacccaggcgctgccgagcgagcggatgcgcatgccgccgacgctggtgacgccttccacggtgctcgcggtggtcacgatctggtcgcgccgcgcgagcgtcttgtcggccatgcgcgcggcgacgttgaccgcgtcgccgaacacgtcaccattctcgagcagggcctcgccatggtgcaggcccacacggatcgcgacgttgtcctgctggaatgccgcgtcggccttgatgcgccgatgcatgtcggtggccgcgagcaggccgttgagcgggcccgggaacgtgcacatgacctcgtcgccgatggtcttgaccacgcgcccaccgtggcgcgaggtgacctcggccagtgccgcgagcacggctgcgatgatctgccgcgcggcaaggtcgccacgggtctcgaacaggcgcgtgctgcccgacacgtcggcaaacaggatggtcagggcgcggtgttcggtcatcgcgcgattctagcgcgtcgcgcccacgtgcatcagcgcagcgcctgcgcggcagcgacgatgtcggcgtcgcccggcagcacgaggaaggccgcgcccgcgagcggggtgtaggtgtcggcgccgaccacgcgccgcagcgggatggcgccgtgcccgccctcgacgatggccgtgatcacgccctcgcccacgccggccgaatggcgcccctcgtcgaccacgaggatgcgtcgggcacaggcggcctgggccgcgatgaacggctcattgagcggcaccagccagcgcaggtcgatggtgcgcaccttccagcccagttcctgttcgatccggcgcgcggcgcgcaggctcatcggcacgccattgccgtaggtgaagatcaccaggtcgcagggcggcgccgagggcggcgcctcggccgcggtgttgccagcctcgtagatgcgcgcctcgcccagcggcatggcctgctcgggtggcgggtagctcgtcagccattggccatcgccggcctcgtacaggtccttggtcatgtacagcgcgattggttcgagcagcaccgtgacacgcccgtcgaccttggccagcgcggccagcgtgcgcagcatcatcgccgcatcgtcgccacggctcgggcagcccaccacgaggccggggatgtcgcgcagcgccgcgatcgagttgtcgttgtgaaaatggccgccgaaaccgcgctggtagccgagcccggcgatgcgcacgagcatcgggttgcggtactggttgttggagaagaactgcaggctggcggcctcgccgcggatctggtcgcaggcattgtggaaataggccaggtactggatctccggcaacggcagcatgcccatgttggcgtagccctgggccagtccgaggatcatcgtctcgtcgagcagggtgttgaacacgcgcgcgttgcggaacgccttgtgcaggcccttggtgacggtgtacacgccgcccttctgcgccacgtcctcgccgaacagcaacgcctcgggatacttggcgaacaggtcgtgcagcgcatggttgatctggatcgccagatgccgcggcggctgcttctcgggcagcctgtcctcgccgccgaacgcggcctcgcggcgcgtggcatggtcggcacgccgcgcctcggcggcgaccttgtccggcgtgtacggcgccagcggcgccatcacggcatcgagcgtgtccagccgcggccgccggtcggcctcctcggcggcggcaaagcaccgggcgcggatcgcctcgtagcgcgcaagcagcgactcgggcgtatgcagcccgctttcgagcgcgatcgcggccgagcgcaacagcggatcggtcgcctccaccgccatgagctcctcgatgctgcgccactcgatctcgaagtcggtgcccgcatgccccatgatgcgcgtggtgcgcaggtgcaggaaggtcgggcggcgcgtgctgcgcacatgctggaccgcgcgcgccacctgctcgtagccggcgaccaggtccaggccatcggcaaagaaataatcgaggtcgcggcggccttcgaaattggcgcgcacccaatcggtcggggtcttgaccgagatgccgatgccgttgtcctcgcacacgaacaacaccggggccggcagcttctggtaggcggtccaggccgcggcattgaacgcggtctgcgcggtggcatggttggacgagg

SEQ ID NO: 1532 - DNA, 14693 bp, synthetic construct
  source 1..14693: mol_type = other DNA
  misc_feature 1..14693: note = Synthetic
ttgccgtcgacggtgatgtccaccgtgtacttgccttccggccacagatccgggttgtgcacctggaaggtggtgatcgccgggccatcggtggcgatcgactggctgatcttgctgaccagttggccgcggccttcgaggtagcgccaggtggcgtcgatggtggcgtcggtgctgctgcctacggtggccacgctggcgtagagcgtgtgggcgtcggcgtcgaagtgatcggcggcatgggtgacctggtgactcttgtcgatcgcatcgcccacggtcagtttggagaaagccagcggggccggtgcgatggcggcggcggtggctaccgtggtggcgggggcaatggcgctgctgccggccggcgcggcggcggccgtgtgcgccggggcgggcgtcggcatcaccgaggccgcgggtgcgacgctgccggcgggcggcggggccggggcggattcatcgtgcttgccgcaagcggcgagcagcagcaggctggccagggcagccgcttgccacagggccgtcgtgacggttggtcgtttcatcggaactccacgggtggatggtcggcatgactcaccttgccgaggctagcgccgcgcaaatgaagcgccgattagcggccgcgcgcgcctgcccgaacttttcacgcgacggtgacggttgccggcgcgactactggcgtaccgtgcgcgggttgcccggcgtggccggcgtgctgctgcggaacggattgatgtcgagcccgccgcggcgcgtgtagcgcgcatggacgcgcagctgcagcggcgcgcagcggcgggtgaggtcgacgaagatgcgctccacgcattgctcgtggaattcgttgtgggtgcggaacgagaccagatagcgcagcaggccggcgtgatcgatcggcgcgccgcggtaggcgatctgcacgctgccccagtcgggctggccggtcaccgggcagttcgagcgcagcaggtgcgagaccagcgtttcctccaccgcggtcgccgtggtgtcggcctgcaggaagtccgcgtccggcggtccgtagctgtcgacggcgatgtcctgctcgtcgagcagctcgccatccagctccaccaccggcaaggccgcggcgcgcagcggcgacagctccacgccgaccacggcaccggccgcggcggacaggtcatggcgcagcgtttcggcgagcgcgtcgatgtcggcgatggattcctgcgcgaagccgttcaagtacaacttgaacgatttcgattcgatgatgtacggcgatgccgccggcacgcggaactcggccagcgccacctgcggcttgccgcgcgggtccagccacgacaattcgtaggcgttccagatgtccacgccgtggaacggcagcgcttccgccacgccgatctccgcgcgcttgtcggcgcgcgggatcggaaacagcaggctggggtcgtagcggtcggcatagacggtgtccttgcccagcggggaatgttcgggggtgctcatcccgccgagtttaccccgccacctctcgtaggagcccgctcgcgggcgatgcttttgcttttgcgatcccggcttcaagagcatcgcccgcgagcgggctcctacggggtcttgcgaggctacgcgttgaccatgcgcatgccttcctcgacgtagcgcgtgccgctgaccgcgtcgggcggaaacacggcgtcgatcgccttcagctccgcggcgccgagctgcacgtcgagcgcgccgaggttctcatccagccggctgcgcttgcgcgtgccggggatggccagcacgtcctcgccctgtgccagcacccaggccagcgccagttgcgcgggcgagcagcccttgtcggcggcgatggctttcacctgctcgaccaactgcaggttgcgcgcgaagttgtcgccgatgaagcgcgggctgctgcggcggtagtcgtcggcgtcgaagtcgtccggcgagcggatcgcgccggtaagaaagccgcgccccagcggcgaataggcgaccaggctcacccccagcttgcggcacgcggcgagcatgccgttggtctgcgggtcgcgcgtccacagcgagaactcgctctgcagcgcggcaatcggatgcaccttgcaggcgcgctccagcgtggcgccggaggcctcgctcaggcccaggtagcgcaccttgccggcagccaccagctcggccatcgcgccgacggtctcctcgatcggcacgttcgggtcgacgcgatgctggtaatacagatcgatggtgtcgatgccgagccgcttcaggctggcgtcgcaggcggcatgcacgtactccgggcggccgttgacgccgcgtaccgccgggtcgctcgggtcgagcacgatgccgaacttggttgccacgaaggcctgctcccgacgccccttgatggccttgccgaccagtacctcgttggtgtgcgggccgtacatgtcggcggtgtcgagcaggttgaggccgcgctccagcgcgtggtggatggtggcgatcgattcggcgtcgtcgtgcgcgccgtagaacgcgctcatgcccatgcagccgaggccgagggcggaaacacgggggccatgaccgagggtgcgggtctgcatgcgggttgctccggtgggtgagggtggacgcatggtgcgccatggcgggcaaccgataaatactcaataatgaccatcaccatccaatcagcgacaacaatgcaatggaccggctgaaggccatgcggttgtacacgcggatcgtcgagctgggcagcttcaccgccgcggcggacgatctcggcctgccccgcgccaccgccacccatgcgatcaagcgcctggaatcgcggctcggcgcgcagctgctgcagcggaccacccgccgcgtgcgggccacccgcgacggcgaaacctattacggccactgcctgcgcctgctcgccgacgtggacgaggtggaggcggatttccgcgaggcgcgggtgcagccgcgggggcgcctgcgcgtggacctgccggcctcgctggccagcctgctggtgatccccgcgctgcgcgagttcttcgcccgctacccgcagatcggcctggacatcggcaccggcgaccgcttcgtcgacctggtgggcgaaggcgtggactgcgtgctgcgggtgggcgaactggccgactcggacatggtcggtcgccgcgtgggccgtttcgagctggccaccgtggccagcgccgcctacctgcgccgtcacccgatgcccgactcgctggcggcattgcaggatggccatgtcgcggtgaactggatctcgcccaccacccgccgtgccgaaccgctggagttcatggtgggtcgcaggcgccgcgaggtgacgctgccgggctgcgtcagcgtcagcagcgccgaggcctattacggctgttgcgaggcgggcctgggcatcgcgcagattccgcgctaccgcgtcgccgcggcattgaagagcggccgcctgcgcgagctgctgcccgcctgtccgccgccctcgctgccgatgaccgtgctctacccgcagcagcggcagatgcccgcgcggctgcgcgtgttcgtcgactggctggtggagctgactgcgaccctgcgctgagggttgtccgacgcccgcacgcaaccacccgacgtggcacgcccgtgaaccgcgtccgcatcggcccggccgcattggcggtacgctgatgcagctttgccgcattccgaggaggcgttccatgcctggcatccgattcccgtggctcccgacgctcgccctgctggcgacgttcgctggtgctgcccatgccgccgacaccccggtgcccggccgcctggccgactggcccgcgatccacggcgagcggcccgccgaccccgtgctggagcagcgcgtgcgcacgatcgtcgccggcatgagcctggcgcagaagatcggccagatgacccaggcggagatcaagtcgatcaccccggcgcaggtgaagcagtactacatcggttcggtgctcaacggcggcggctcctggccgcagaagaacaagcacgccggcatcggcgactggctcgacctggccgagcgttaccgcgacgcctcgatgaccaccgacgcgaaggtgaagatcccggtgatctggggcaccgacgcggtgcacggcgacaacaacgtgttcggcgccaccctgttcccgcacaacatcggcctgggtgcggcgcatgacccggcattgatcgaggccatcggcgaggccaccgcgcgctcggtgcgcgccaccggcatcgactgggccttcgcgcccacgctcgcggtggcgcagaacgtgcgctggggccgcacctacgagagcttttccagcgaggcgccgctggtgcgcgagtacgcacgcgcctacgtcaccggactgcagggcaacttcgacgaccaccacgtgatggccaccgccaagcacttcatcggcgatggcgccacctggaacggcgtcgacgaaggccaggcccgggtcagccggcaggacatgatcaacgtgcacggcgccggctacgtcggcgcgttgcgcaccggcgtgctgagcgtgatggcctcctacaacagctgggacgacgtggccgacggcgtcgactacggcaagatgtccggcgcccgcgccctgctcaccggcgcgttgaaggagaagatgggcttcgacggtttcgtggtgtccgactggaacgcgatcggccagctgcccggctgcagcaacgccagttgcccgcaggcgatcaacgccggcatcgacatggtgatggtgcccgacgactggcaggccttcatcgccaacaccacccgacaggttgaagacggccagatcccgatgagccgcatcgacgacgcggtgagccggatcgtgcgcgccaagctgcgcatgggcttgttcgaccagcggccctcgcagcgcgaaggcgccggcgacgccgccgccctgcagcaccgcgagctggcgcgccgcgccgtgcgcgaatcgctggtgctgctgaagaacaaccacggcacgctgccgctgaaggcgggcgcgaagatcctggtggtcggcaagagcgccgacagcctgccgaaccagaccggcggctggtcgctgacctggcagggcaccgacaacggcaatgccgacttccctcacggcgagacgatcctggccggcctccgcgccgccgacggcgcggcgaacgtcagctacagccagaccgccgccggcatcgacctcgcacccttcggcgccatcgtggcggtgatcggggaaacgccgtacgcggagatgaagggcgacatcaagttgccggccacgctgcgccacagcgatcgctacccggaagacctcgcggtgctgcaggcggtggccaaggcgcacaagccggtggtgacggtgttcgtgtccggacgtccgctgttcgtcaacgacctgctcgatctctccgatgcgttcgtggcggcgtggctgccgggcaccgaaggcggcggcgtggcggacgtgctgtttgcccgcgccgatggcgcggggccgcacgatttccacggcacgctgtcgatgccctggcctggcgtgccctgtccgtaccagagcgccggccacgaccaggcctggctgttcgctcccggctacgggctgcgctacgcggcggcgcacgaggtgaaaacgctgcccacctggtcgagcgtccacacctgcgccaagccgggcgcaccgtgatgaggcacgctccatccgcgatgcgcgaagccgccggtccggccggcatgccgcatggatgaggcgcgcggtatcccgcgctggctcgccatcgcgtcgttcgtgctgatctcggtgctggccctgctggcgctgcggctggcgcagcgccagccgtcgctgttcgtcgccgtggtcgcgtcggtgctgcagccgagcggcccggggatccagctgtggctgagcacccaggaccgccgcctgcgcctggcccgccagctcgacgtgccgggcggcgaggcgggatcctcgcccgccgacgtggtcatcgacaccagccggacctaccagaccgtcgtcggtttcggcgcggcggtaacggatgcctcggcctggctgctgcagaacaagctgagcgcgccggcgcggcacgcgctgctgctcgaactgttcggcccgccgccggggctcgacttcaacatggtccggctgaccatcggcgcctcggatttttcgctgcagccgtacacgctggacgacatgcccaccggcgaggtcgaccccgacctgcagcacttcaacgtcgccgagaacctgccttacctcatccccaccatgcaggaggtgctggccgtcgacccgcagctgcgcatcatcgcctcgccgtggagcgcgccggcgtggatgaagaccagcgccaacctgatcggcggcagcctgctcgaagagtacgaggcggcctatgcgcaatacctggtgaagtacgtcgacacctaccgcagctacggcatcccgatcttcgcgctgaccctgcagaacgagcccggcttcgtgccgctgacctaccccggcatgctgctctccgccgaacagcgcgcgcgcatcatcgcgcagtacctcggcccggcgctgacctcgcgccggcccgccacgcgcatcctcggctgggaccacaactgggacgagccgcgacagccgctggacgtgctgtacgacgccgaggcggcccgctatgtcgacggcatcgcctggcattgctaccgcggcgtgcccggcgcgcagaccgaggtgcatcgtgcctttccgcgcaaggacgcctacatcaccgagtgttccggcggcgactgggaatccagcaaacacggcgaactgctctggttcgcgcgcgacctgctgctcggcggcctgcgcaactgggcgcgcggcgtggtgtactggaacctggcgctggacgagaaccacggcccgcatttcggcggctgcgacacctgcaagggcatcgtcaccatcgactcgcgcaccggcgcggtgagccgcaacgacgagtactacgcgttcgcccactacagccgcttcatccgccccggcgccgtgcgcatctggtccaccgacaccggcgacgacatcaagaatgtcgccttccgcaaccccgacgccggctcgatcgtgctggtactgatcaacggcaagaccacgccgcacgaagtctccgtgcagcaaggcgagctcggtttccgctacaccatgccggcggaaagcgtggcgaccttcgtgtggcagccggcagccgaggcgcccgccgatgcggcaaagccgactgccgacgcgacgcagggcggcgaacccccgccatcgcgggactgaggcgggcggagattctgcggctgccccgctcgggttacgatcatgaacttcgcttgccagcaaaacagaggagcacccatgcacacgacattcggcaaggcacgcctcggcgccgccctggtactgggcctgctgtcgggaacggtcgccgcccaagggcgcgtcctgaccgccgcggactacgcccacgccgaacgcttcatggcgtacaacaccacgccgctggtcgaccacgcggtgaccaaggtgcattggctggacgacggccacttctggtacgtcgatcacgacgcgcgcggcgaccacttcatgcgcatggacgcggccggcggcaaggccgtgccgctgttcgaccaggcgaagctggcggcggcgctgggcaaggccggcggcaagccggtcgacgcgatgaaattgccggtgaccggttacgaggccaggcccgacggtcgcatcgacgtcaccgtgcgcagcaagcactacgtgtgcgacctcgccgccgtcgaagccagttgcgtcgatcgcgccaccctggtgaagaccggcaaggaacccggcgcgcggtcgccggacggcaagagcgaggccttcatccgcgactggaacctgtggctgcgcgacgtcgccagcggcaaggaaacgcagctcaccaccgatggtgtggagaacttcggctacgccaccgacaacgccggctggaagcacaccgacaaggcgatcgtggagtggtcgcccgattcgacgcgcatcgccaccttccagcaggaccagcgcaagaccggcgagatgtacctgatcaagaccaaggtcggccatcccgagctgcagaaatggaagtacccgctggtcggcgacaaggacgtgacgctgatcgagcgggtgatcatcgacgtgcccacgcaccaggtcgtgcgcctgcagatgccgccggaccagcatcgctccaccctgtgcgacgacgtcagctgcggtccggacggcggctgggatgacgtgaagtgggcgccggacggcaagacgctggccttcgtctccacctcgcgctaccacaagcacgcctggttccgcatcgccgacgcggccaccggcaaggtgcgcacggtgttcgaggaaacctcgcccacgtattacgaaagcggcaacggcgcggtcaactggcgctacctgccggccacgcacgaggcgatctggttcagcgagcgcaacgactggggcaacctgtatctctacgacctcgacaccggcaagctcaagcacgcgatcaccaccggcacgggcaacgtcaccgaggtgctcaaggtcgatgcgaagacgcgcaccgtgtggttccgcggcgtcggccgcacgagcggcgtgaacccgtactaccagcagttcttcaaggtcggcctggacggcggcaagccggtgctgctgacgccggaagcggccaaccacgagatcaccatgtcgccggacggcaaggccttcgtggacgtccattcgacgccgaccacgccgcccgtcaccatgctgcgcgctgccgacgacggccgcacgcttgccaccgtcgcccgcgccgagatcacgcggctgaaggccgccggctgggtgccgccggtgccgatcacggtcaaggcgcgcgacggcaagaccgagctgtacggcatgatgttcaagccgtcgcacttcgatccgtcgaagaagtacccgatcatcgactacatctatcccggtccgcagaccggttcggtgcgcgggcgcaacttctcttccgcgcgcgccgaccaccaggcgatggccgagctgggcttcatcgtggtggcgatcgacggcatgggcacgccgtggcgctccaagtcgttccacgacacctggtacgacgacatgggcgacaacacgctgcccgaccaggtcgccggcctgaaggagctgggccggcgctatgcgtggatcgacctcgaccgcgtcggcatctggggccactccggcggcggcaacgcctccaccggcgcgatgctgcgctatccggatttcttcaaggtcgcctggtccgaaagcggcaaccacgacaaccgccactacgaggacgactgggccgagaagtaccagggcgaactggtcaccgacaaggacggcaagagcaactacgacgaccaggccaaccccaaccatgccgcccggctcaagggccggttgatgctggtgcacggcacgctggacgacaacgtaccgccgggcaacaccctgctgatggtcgacgcactgatcaaggcgaacaaggacttcgatctgctgatgatccccaacgcgcaccacgcctacggcgatgccaccccctacgtcacccgccgccgctgggactacttcgtgcactacctcgccggcaacacgccgccgaaggagtacgagttgaaggcgtggccgtggaagtgagcgtggccgtttgatcagggcaacgacagggccgggtgtttacccggcccttttttcatgtcgcggaatctgagactgccaggcgttagatacgacaaaggccggttgcccggccttgtctgatttggtgcatctttcagcttttggctgatcagcttgttagcggaaagagcgcatttcctgatctgctagtgtggccgagagtacgagtgccacagggaaacgtcaagggggacggcatggcaaagatcgactatcggctggcgctggatttgggcgccaattcactgggctggtgcgtctatcggctcgatacgcggggcgagccagacaagatcatgcgcatgggctcgcgcatcttttcggatgggcgcgatcccaagacacttgcttcgcgtgcagctgaccgccgactggccaggcaggcgcgccgtcgccgtgatcgcgtgctcaagcggcggcgcaaactgatgcaggccttggagaaatacggtttgatgcctgccgatgtggcagcacgcaagtcattgcaggcgctcgatccgttcgaactgcgtgcccgtgggctggatcagccgctgaaactgcaccagctgggtcgcgccctgtatcacttggcgcgcaagcgcggctttcgtagcagcaagaaggacgcgcgcgacgatgaatccgccaaagaatcgggcaaggtcaagcaggccatagccgccttgcgggagcgtgttgtggcagcgggttgccgcaccgtgggtgagtacctcgccagacagcacgccgaacgcgagcccgtacgcgccagacgcagcagcgatggcggttatgtgctctatctgcaacgcgcgatggtggaggaggaattcgatgccttgtggcgggcgcagcagccacaccatccggacacgctgaccgacgaggcccgcgaggagctgcgcgatattctcttgttccagcggcggttgaagccaatcgaagcgggtcgctgcccgtttgaatccacgcagtaccgcgcccgcctgtgcgcgcccatgcagcagcgcttccgcatgttgcaggagctcaaccatctgcgcgtgcgcgacggcatcgacgagcgcgtgctcacgctggacgagcgcaacgccatgctcgccgagctggagagcgacgccgggcccaagccggtgacttggtcgcgcctcgccaaggccgctggcttgcgcaaggtggatttcaacctgggtcgtgacgagaagcgaaacggtttgaaaggtgacgcggtcggtgcgcgctttgccgccgacacggcgctgggtgagacttggtggcggcttggacccgaccaacaatacgccttggccgtgctggtggcgctggcggatcaggtcggtacgctggaagcggcactgctggccctgccggccccttcgcctgccagcgaggaaattctgaagggcattttcgccaaggaagaacgcgaagccgttgcagcgtcgctgcaatcgttgccgctgcacttgagcgagtcacaggcgcgctacatcgccggcttcaacctgcccgacgactacggcagcctgagcctgaaagcgctcgcgcgcatcgtgcccgaactggagcgggaggtggtgacctatgacgaggccgtgcggcgcgccggttacctgagtcactcgcaattccacacgggagaaatcttcgaccgtctgccttactacgggcaggtactggcgggctacaccgcgccgacacccacggcaaagaacgcggatgaacgccgctccggcaagattcccaaccccaccgtgcatatcggcctgaaccaggtgcggctgctggtgaacgcgctcatcaagcgctacggcccgccgcgtcagatcgtcattgagctgacccgcgagtttggcgcctccggcgagaaacgtcgggaaatcatgagcaagcagaaggagaaccaggatcgcaacgacggctacgccgcgcagctgaccaagcttggagctcgcaacagccgcgaaaaccgcctcaaactgcagctttgggatgaacttggcaaggacgacgccatggatcgctactgcacctacagcggcaagcgcctgagcaaggccatgctgttcagtgacgagatcgagatcgaccatatcttgccattctcgcaaaccctgcacgacggtatcggcaacaagatcctctgcacgcggcaagcgaatcgcgacaagggtaatcgcacgccattcgacgcatggggccacacggaacgctgggccgagatcgaagcgcgcgccgagcgcctgccggcacacaagcgcaagctgtttcgcgaaggtgcactggaagcctttctcggcgatcaggattttctcgcccgccacctcaccgacactgcctacctcggtcgggcggccaagcaatacctcacctatgtttgccacaaggacgacgtgtgggtttccagcggcaagctcaccggcatgattcgaggcaagtacggactgagcaaattgctctccgatgatggcagcaagaaccgcgacgaccatcgccatcatgcattggatgccgcggtgatcgggttgtgcagccgaagcctcatccagcgcatggccacggcagcggcgagcgcagaagagcatggcgagaaccgcctgctggaacggcttgagttgccgtggccgggctaccgtgaagaactgggcgcctgcctcgccaccatcgtggtgtcgcacaagcccgaccacggcaaacaggcggcgctgcacaacgacacgaattacggcttgcggggtgcaccagacaagcgcggcaacccgctggtagggcggcgtcgtccgttggacaacatcaagagcgccaccgatgccgagtccatcgccagtgaaaccctgcgcgaggaaattcgccagttgctggcgccgttgagcgcggggaaggaaaccaaggccgccctcgaagactatgccgcacgaaccggcgtgcgccgggtcatttgtgaggagcgcctgtcggtcatccccatcaaggaccgccgcaatggccagccttaccgctacgtcaagggcgatggcaactactgctacgagatcttccgcaaacccgatgggcggtgggatggcgaggtcatcagttcgttcgaggccaaccagaggacgttcgacgagtcgccatcgcatgcgcaaaacggcatgccgctggtgatgcgcttgcacaaggatgacgtgctcgctgttgaacttgatggtcggacaaacattctgcgggtagcgcagttctcagatggaaagatccttcttgcctcgcattgcgaagcgaatgttgcagctcggaacaaaaatacttcggatgcattcaagttcactcagttggcgccatcaagacttgcaagcgtaaaagccagaccggttggagtagacatcctcggctacgtcaacgatcccggcttcaaggactgatgtgatcggccgcatcgtcgagatcgccggcgacgggcgctacctgtcactggatcgaggcttcctcgtcgtgagctgcaaaggcgaggaagtggggcgcacgcccatcgacgatgtggcggcattgatcggcaacgcgcacggtttggtctacagcaacaacttgctggtggcattggccgagcgcggcgcgcccttcgtgctgtgcggcgccaatcaccgccccgccggcctgctgtggccggtggaggggcatcaccgccaagccgcgcgcatggatgcgcagctgcgtgccagccagcccgtacgcaaacgcctatggaaggcggtagtgcaagccaaaatcggcatgcaggcggcggtgatcggtctattcggcgggccggaaccgccgttgcgtcggctggtaggcaaggtgcgcagtggtgatccctccaacatcgaaggacaggcagcgcggttgtattggggtctgttgatgggcaaggcgtttcgtcgcgaccgggacgcgcccggtacaaacgccatgctcaactatggctacaccgtgctgcgcgcgctgatggcacgacaggtgatggcggccggcctgcaccccggcatcccgctgcaccacgccaacgagggcaatgcgatgcgcctggtcgatgatctgatggagcccttccggccactggtggatgcctgcgtgcggcgcttggtggagtccggccatgcggagcttggttcgtccgagcgccgtgagctggccatactcggcgcgcgtagtttgcacaccagtcatggcatcagcccggtgggcctggtagcacagcgcttcgtcgccagccttgctcaagcttacgagtcaccggccgcgtcaatcgaatggccgccgagcgacaagaccgtcttggcctcattgtgggatgagtcgcatgacacgcgcgaagacgaggacgccacctgagcggcggccggcgccaccactctgcgcgtaccgactgatgtggatgctggtgatgttcgacctgcccgtggataccgacgagaaccgcaaggcggccaacgactttcgccacgacctgctcgatttcggtttcgagcgctgtcagtattcggtttacctgcgcttctgtgagggccgcgagcaagcggacacctggacgcgccgtgtgcaggccgtgctgccacccggtggcaaggtctactgcctgtactttaccgacaagcagtacgagggcatcgtccgcttcgagcgccgccagcgtcgcaagaaggtgaaaaatcccgaccaataccagttgttttgaaccgccatggcgcgaattacgctagctcaacatccgcgcaagccgtttcgaatcattggcttgcgcggatgcagagcgtaacagatcaggaaatgcgctctggccggaacctggccgggttcctgaaagatctggtgacggagcgtaacagatcaggaaatgcgctctggccggaactaggtgtagctcacgtcctcgacgtggatgaagag

SEQ ID NO: 1533 - DNA, 12164 bp, synthetic construct
  misc_feature 1..12164: note = Synthetic
  source 1..12164: mol_type = other DNA
cacgaaacgtcagaagctcttcaggtctcttcatgcggccatccgcacggtgggtcggccatagtaaacgtcatccggccgcccgtagtctcgtgcctgatgggttctctcagtgttgtagaacgcaatgtacgcgctgagcccgcgtcgcagctcaccgccggtctcgtaggctttgtaaaaacagaaagaacgcatgaaaactcaagaaaaatgcgaacccgcgaaaccatattaacccgacttcgcgcctccacgggtttttcgttctcgccccccgttaaccagcgttttgcaaatcttctctagtcgatctagtcacttaatattttgtttcaattacccataaagcatcagggactggaagtgtcacacctaaaatgaacctcggcgcgagggtagtttcctaagacatacggaggctggctttgtgtagcctccagcaccaccatcattcgccgttgggagttgcagtaagcgtctgcctcacggagcgcgtcgtccttgagagttccaagccctgaaaaaccggttgcagcctgtcgggacacaatataagtgccgctgccactcgggacgacaccagaattcgcggcacaaccggccaacgcgaatgcactcgttacgcagcttccaatcaaccgaaaaaattgctggctcatttgcgctgatcctcaatcacgacacttggatctttggtcaggttcgggcgcgtgtactcgggatcgtcttcagcaacgcaactaaaaactaaagttgttgattgtgttccgtcaaagacacccgcttcactgtcgaagcgtcgaaccactaggaatttttttaaactcgcacagtgagcattcgcttgttgaaccgccaaggtcttgcccttacccctatttaggccgccagcattactgccggtaatcatgtaactgtccttgcccatcggaacgacaggtgaggttgtcacgcatgcggccgtgaaaactggcagcagcaatgcaagaatggacttattcatttatttctctgtcgcgtgtaggttgaatcggaactcaatttcggcggatgctatccgcctaaacccgctatcggtttctcggtcgcttaccgtttcgaagtcttttctttgcttcgcgcagaaggcgactgcgtcttggagcgctttcgccttctacgcgccggcggaggactaccccatcgttcggtgatttgcgattaaaaaagcgccgggaccggtttgcaccgcctcgttggtaatgccagtacatccgacggcgggaattgcaggcagcaaaagcacattgatctttcgcataaaagcggtccataggtgggcgttgacttggcgccacctcaagcatggccctaacgatggcgccttgcaacggtggatcattagttgatcttacgagcctaagaagcgctgattctcgtcatttcgtaacccagaaatgacgaaggccacctttcggtggcctcctgatttggtgcatctttcagcttgttattggaaagagcgcatttcctgatctgctagcgtaataatactatcgggatacggaaccaggcgtcaataggggtttgggcatgaaaatcagatataggcttggcttagatcttggagctaactcgctcggatggtgcgtttaccgtctcggcggtggcaatgaacccatagacattgtccgagccgggtcccgcatattctctgacggacgggatcccaagagtttggcatcgagggcggcggaccgtcgtcttgcccggcaggcccggaggcggcgcgaccgtatgctaaagcgtcggaaacgcatcatggaagcattaatccgattcggcctaatgccggctacggccgagctacgtaaggaactccaggttgaggatccattcgaacttcgggccaccggactcgacaagccactcacgccacaccagctaggacgcgcgttgttccacctatgccggaagcggggattcaagagcagtcgaaaggatcagacggctcaggagaaggaaactggcaaggtcaaggccgcgattgccgtgctgcgcgagcgaatcgcggctaccaatagtcgaaccgtcggtgagtacctagcaaaggaacgtgctgaaggacgcccagtacgggcgcgccggcgatccgatggggcttatgtgctctatctgcaacgggacatggttgcggccgaattcgacgccctttgggaggctcagcggcaattccaccccgaggttctgattgaggaagcccgacactacctgcgcgactcgttgctatttcagcgaaagctagttccggtcgagcccggtcggtgcctctttgaaattgacgagccaagagcccgcttgagctcgcctttccagcaagagtttcgcattctccaagagctcaataacctacgcttgatcgatggtgttgaggccaagtcgctgacgctcgaggagcgggacttgcttctcagtcaccttcggactcaggtaaaggcaacctttgcttcgctgagagctctgctaggggtgcgccgaaacagcggcgttcgatttaatcttgagaccgaaaatcgcaaggacattaagggcgacctggttggagtccagttttcgaaaccggaatgtttaggcgatagctggtggactttcgatcgtgaccgtcaagagagcctagccaatctagtcgcaacggttgacgatgcagaggaactcgaaagaatccttaagggaactgcttggttctttccggcatcagttgcagccgcgcttgctcgatgcaacttgccggatgacttcggtagcctaagcctcaaggcgttaaagaagatcgtgcccgagttgcaacgcgaggtcgtgacttacgatgttgcagtgcagcgggccggatatcagcatcactcccagttgcatacgggggagttcttcaagagtctgccttattacggtgaagtcctcgtcggctacacctcaccggcagttaaagcgacggatcccaacgagaagcgacatggaaaggtttcgaatccgactgttcatatcggactgaatcagctccggcaggtcgtcaatgccctgatcaagcgatacgggcaccccactgaagtcgtagtggaattggcgcgagagttcgggatgggcgcggaaaggcgccacgagctacagaagtcgcaaaaagataaccaggaccgaaatcagagagatgacgagcgccttttagagctaggggtcaggctgtccaggatcaataggcaaaagcttcagctttgggatgagttgggtcaagcgaatgccttagaccgcaggtgtatttacagtggtgcaaatctaagtgtcgcgatgctattcagcgatgaggtagagatcgaccatatcttgccgttctctaagtcattgcacgatggaaatggcaacaaggtgctttgcacccggcaggccaatcgagataaagggaaccggacaccgtacgaggccttcgggcattctcctggggtgtacgactggcagtccatactcgatcgtgcggcgaccctgtcacgcgggaaggctgggcatttcagtgaggatgctctactagacttcctcgatgggaaagatttcttagaccgacatctaaacgacacggcctacttgtcgaaggtggctaggcagtatctcagctacgtttgtcacaaagattacgtttgggtatcgacgggaaaactgacgtccatgcttcgtgggaaatttgcgctcaatgaactcttatctgcggaccgcagcaagaatcggagcgatcaccggcatcatgctcttgatgcagcggtcattggattgtgcagtcgggggctaatccagcgcatctcgacggccgcggctagggccgagtcccacggaagcaatcgattattggagagtcttgagttgccgtggccgtcttatcgtgagcagttggaggcggcgctcgccaagatcgtcgtgtcttttaagccagatcacggtcggcaagcccggttacataacgacacgaactacggatttcgaggggcgcctgacgcgtcaggcacgacttccgtcggtcaccgggtgccgctcgagggcatccaactgaaggacattgatcgaattgccggcgacggattgcgcactcgtttgcgtgaggcattaggtggcgccacgtcgcccaaggacatcaaagctgcattggctgctttcaccgagaagaccggcattcgacgggtcatcattgaggaacgtctgtcagttattccaatcaatgaccggcgcacgggtgagccgtatcgctatgttaaaggcgatggtaattattgttacgaaatttatgtagacagcccagggaagtgggcaggcgaagtcattaacaacttctctgcgaatcagcggggttggattgagtcgccaacgatagcgacctgtaggaagccgctggtgatgcggattcgcaaagatgacctagtggtaatcgaagaaaatggcgttcggcgtgtgatgcgggtggcaaagttttcggacggcatgatcgcgctggtggcgccccatgaagccaatgtagatgcgcgcactcgagataaggcatcaggtctgaaatatctttttaaggcaccagggcccttgcgcgcgctacgggcaagaatcgtcggttgcgatgtgctcggttacgttaacgacccggggttcaagaactgacgtgattggcaggatcgtagaaatatcaggcgagtctcgttatttgtctgtcgaccggggattcatggtggtgaagcaccgcgatgaggaagtcggtcgggtcgctttggacgatatttcggggttaatctgtaccgctcatggggcaacctatagcaacaatctgatcatggcgttaagccagcgcggatgtccgatagtgctttgcggcgctaattttatgcccgcggcaataatttggcctacgcaaacgcatcatctgcaatctgcgcgccttgatggccagattgcaatgtcgaagccggcgagggggcggttatggaaggacttggtcaaatccaaaatttcgatgcaggccgctgcgctcgctttgtgcggtaagcgtaatgctcatattaaagccatggtgcgcaaggttagagctgccgacgctagtaacgtagagggccaggcggctcgtgcctactgggtgactatctttggtcgcgagtttaggcgtgatccagacagtgacggagttaacggattattgaattacggttacgcgatcattcggtcggcggtcgcaaggcatttaatggcggctggtcttcatcccggtattccgttgcaccattcgaacgatggaaacccaatgcggctagtcgacgatgtaatggagccatttaggccaatcgttgattgcgttgtgtggcgtatgcacgaacggggcgtcaatgatgtggacgccaatagcaaacgggttcttgctgtgttactggcgcagaatttggtgttggactcaggggttagtccagtgtccctggtgattcaacggctttgtatttctcttgctcagtactgtgtggacggtgagacaaagttggagctgccgcatacatctgatcgccgctggttgatgcgccagcgctgtgcgctgaactagaaaagcatatcgctaccattcttgccaagtggcagcgctctatacgcgccgtgggagagtgaagcgagcaggggggggcacgccgttgtacgtttcaggccgccgggccatcgcgcccattaaccgctgatcattgctgacttgcgggtcgattttggtcggttggcgacactcgggatttacaagcgttgatccgggagccgctactgggccggccgaatttggtttccagcgtccacgaacaccactttcggttttagaccgaccgcttcgtctcggctcatctgttccaatgacagaatgatgacttggtcgccgggttggaacagacgcgccgggcagccgttcagacagacttcgccactctgtggttgaccgggtatggcatacgtttcccaatgcacggcgttggacatgctgttgatgtgcaccaactggtacggcatgatgccggccgcttccatcaagacgggatcaagcgtgatgctaccttcatagtccagccgagcttcagtcacgcggacgcggtgcagtttgcctgtgcagacagtgatggttttcaagccttcattcccttcttttatttcatgcgtgcgccgtcgttctggcgagagaggccgctcgattcggcggttactgctgttatgcccggttgtgccggtgccgtaaagggggcgacgtccctattggcaatttccggcactgcctggtgccctacgcgcctatggggagggagtgttgctggttcgcgcagcgtcggctctgcgtcgcaggagggggtcgcccaccgctactttgtcagcgagtgcgtgggcgcgtgcaccatgtggcgcgacctgtgcgtgggcatgtgcgcccgccatgcaagagcgtgtcgcctcccacgggtatctcgcgccggggcctaatcgtagacttggcgtgccgtatcgaagccccgtccattgtcggaccacggcgcccacgtcatgacaaggaaaaagtgcggctgttagctcgcagcgccgcccgtcggtgttgccgggcagcgttgcttgctagcgctgcgtactacggtgtcagcagtaaccggtttaccgttgcctgttcgaccgctttttgcgagtacaccaacgggaagtagccacccgtgttccacagcggtaagaggtccgcgtagtgggggctgctcggctgcgcactttgtcctggggtgttgatcgcgaccgagtggtcccaatcgctggtgtctagtatttcccgataactcgcgcccgcctgttgctcccagcgatcgccgccggctggggcggtggcgttgaccgtgtagccatcgccggggcgtgcgaggggtccgaggtctaggagtgtcgcggcgttgacttgggcatcgagcggatgtctaaagtggatgacgtgcagttggccccaagaccaacgggcaggatccgcacccagccgttctgtcaggtacgcattggctgcggtgaaggtgcggctgagaaagtgatctcggcccgcgctcggatctgcgccaaaaatggcgccttccggttgattgagcaggcgcaacacgacacgtggcgagagttccgcataccgattcggcactgccgggtagagcagcgccgcaagacctcgacggatctcgcgctcccacacttcaaacacggcagcggcgggcgattcggcgtcgacccgcccattccatgcgaggaacagttgtaggccagggtctgtggccagtgtcgtcgtgcgaacgatgtgctgcagttctactgcgggtagcgacaccacatcgttctgcagcgcttgcaaatcgctgacacgcagggggtggtgctgcgcggcggcgtcaccgaggactgtatggatccgttgcgcccggtagccggggtcccactcgaagccgacggggtaggggtagtttgccggaatcatcttgtggttcgcggtcgcgataaaaccggccgctgggttgtactgatgcggcaactgctggactggcacgaagcctgtccattcctggccgctcgcgcccggtatcggcagcaggccggtccacgaacggcgcggcgccaaccccaccgagtgctcgccgatattgccgtcccgatcggcatagacgatattttctgagggcaccttccagcgggcaacggccgcctcgaactcgtgccaattctgtgcccggtcgatctgcagggaagcgaggtatcccgccgtgccgggctccgcacccacccagcgcagtgcgagtgcgcggctgccgtcttcccagaggaccggtccgtgctgggtagagaacaactgcacatcgaccgggttgccatcgcgtaccgcgatgctctcgtgcgcgaccgacatcgtccgccagccgtgtgcggtcttgtagcgacgtgggttcgtcggatcgagttgttccacgtacaggtcctgttggtctagaccgaaaatggtgaagccccacgcgatgtgcgcgttatggccgagcgcgacaccgggtagacccggttcgccggcgccaataacgttccaacccggcgcgaccaaatgcaccaggtagcgcagtgagggcagcgcgacgacgcggtgcgggtcattggccagcagcggcttaccggaggcggttaagcgtccggcaatcgtccagttattgctgccttcatgggagcgcgccggaaattcgatgtgttggtcactgccgattaagttgcggagcaagaccggcgccaagccgcgcaggtcgagccctgcgctggccctcagcggtacgaccgggtcaagatccagcacccgtgcggcgccctcggcgccgaggtctgtcagcgtctgtgcattggacagttcggatagcgcgttgccggtcatcgagaacgcggccattcggtttaggcagtccgttggttgccaaggggagggtttgaacccggcgagttggaactcgatcggcaagcccggcccgccgggggtctcgagagtgcggatgtaggcattgatgccgtcggtaaacgcggtgaggatcgcccgggcgtcgggcgcataactggcgtactcggcttgcatggcgccgtgatagcgcagcttgcgggcctgtatgtcgcgggcgaccgcactgggaccgagcacttcggcgagccgaccctggccggagcgtttccacagttccatttgaaacagccggtcttgggcggcgacggcgccctgtgcaaagaataggtcgtgctgattgttcgcgtagatatgcgcaacaccccacgtatcgcgcagtacctgcacgggttgctggaggcctgacaggcgcaacgcgcccgacacctgggcctgtgcggcctgcgcctgcgcatgaagatctgctgtggcggggccgccggccagtgcgcagtacggccacagaaaaataatccacgtcaggaacttcatgggaacctcgctgggtatgcgcaatcgctcggcacagcgtgcagccgtgtctttagggtgttggcggtagggtggcgttggctaggatgcgctgctgcgtgatgaaacggtggatatccgcttccagcgccgtcaggggtaccggcccgccgcgcaggatccggtcatgaaagcgtcggacctcgaaacgcgcgccgagtgcgcgctgcgcagtggtccgtaaggcgcggatttttagttccccgactttgtaagcgagcgcttgggcgggataggccacatagcgttcgacctccgcgcgcgcctgttcgtcggtcatggaagaatgcgccagcatccatcgcacgccgtcgtcaaccgaccatccgtacgcgtgtagtcccgtatcaatcacgaggcggttggctcgcaggatggcgtagttgagatggccaaagtattgccaggggtcgtcaaacaagcccatttcttcgccaagggactctgcgtataggccccagccttcgataaatgcagtgtagttgccgtagcggcggaacgcgggcagatcctgctgttccaacgcaatggcagcctggaaatgatggccaggtaggccctcatgcagggcaatcgtcatgacgttgtagcggtcctgcacgccagaagcatagatgttcatccacagaatgcccggacgcgatccatcggcggcgggtgccgcatagtcgccgttgccctggaaggtcttggaagactccgggggtaaggggcgaatttcgtatggtgttgtggggattgtgccgaatagctctggcaggtgcgggatgatctgtgtagtcgctgcgcggtaggcagggacgacctcctcgggcgcggtgaagtggagtgccggattgcggcgtacatattccaggaactgcgcacgcgaccctacaaagcctacgttttctcgcactcggtcgatggcacgactgatgcgctctacctccgtcttacccagcgcatggatctgttcgggcgtcagctcagttgtggtgtgcaggcgtaccaggtggcggtaaagcgcctgcccatggggtagtgccccgaggccgacgctggcacgcgcatgtggctggtactcggttgccaaatagtcgtgtaagcgaccgtaggccggttggatgacggtcgcaatcttttctcgatacgcttgttctagacggctgcgctgctgcgccgtgaaatcgctcggcatggcgacgaccggttgccaaaactctgtttcctcgggtgttttattcaggtgtacctgcagttgcggcagtatccgatccaccacgaggcgcggcaatacgacaccgcttcgcacgccctcctgcaaacggcggatcgcatcgttgatccagtctgcaaaggcgtcagcgcggtgcaaggcgaggtcgtaatcttcgattgtcttaaatgggaacgccccagacccggctgcatcctgcgcaaacacgaggtgagggccctggaattggtcggtcggtagttggcgcgccatctcgaataggggcccactgtagtaacgcaaactttcgtcgagtgcgttacgcaggatgcgcacgctgcggcggtcttctccgggcacaggggtgctctgcgcgtctgccagttctgcgcggtagcgccgcagtgtggcgagcctgtctgcacgccaatcctcttccagcgactgatcgaattgcccaaggtaggatcggtcgcccagttgcatggcttgcgtgggattgaggcgtagttcgtcttgccaatacgccgcgtagagagtggccaggggccgcgcagagccggcgctggggcatagcgcagcgatggccagtaggagcgagaagaattgggcgtgcgttttttggcggcgcatagatcactcagtgggcgtcggggccgccgtttggtgcggtacggaactttaaagtgtctgggccttgaccttcaatgcccaagatttaactgtcgttggtttgtactcttggacctatcaatataaagaggccagtgctacgaagcggacaccagagatcaaggctgctcggttcctaagtttcttgaggcagccagagccgctcgttgaaggtcaggctgcgcaggccgatcacttattaaccgcatggaaaggcaccatcgctaagctgcgaatcaatgaaaaagtaaagcaactctctgccatgccacttgattttgatagtgaggctggcactttggtgggtgatcaggacaaatctaagaccatattgaccgcaacgctggagtagcgctgccatcacggacctgcaagcgcaaggcaacaaagggccttacaacgcgtcggaattggtacctctcatagccgcgaactgccccgagtgccacccacactattagcaccaggcccgacggaacggattggccgagcgctgcgagcgcgccgatggggccgcgaaaaagaagcagtgtggccggagcgaagagcacaacgacctccagaagaattagcacgcgctgaacgcaacgctctacggacggcagaccttcgtgaatggcgtcgcgcagcgggctaatttcaacacgtacagcatgatccggtcgtcgtcgatgccggatgtgcaagtcgtgctgacgcagccgacgaccctcgcgcgcagcagcgtgatcggcggtgtgggtgagttgggcgtgccagctctggcacctgcgattgcccatgcgttctttaaagcaacgggtaagcgcgtacgttcgctgccgttcttcggttgatcgatgggtcgtagaagggccctgaccgttccgcggtcggggccctttttggcgaaatccccaccgtctcagaaagtcgttatccttatcgaaacgagggcggggacatcctcgcggagaccgcccgcaatccctgaccgacctgcataaactgatccactgcctccggtcatcaccacctgtatcggaggaatagtcccctcaatgcttccgacaaatgaaccagcgtcgcgccgttcacgcgattgacgttgatttccctgagtgaaaatgtatattgataatgtacatttctttatgagtgtgtcatggcccttcaaatcgccaatcccacggtcgttgccaaagtcgagcgtttggcaagggcgaaaggcatgaccaaaacggctctggtcgagtgggccgtcgaccgtctggcggcaga

SEQ ID NO: 1534 - DNA, 12024 bp, synthetic construct
  misc_feature 1..12024: note = Synthetic
  source 1..12024: mol_type = other DNA
ctcgccgaggcaatcctcccgttgactcgccctgagcgtgcggagcagctcgccctgttcggagactgattggcctcgcccgtctacatttcgggtgcgaccgaggggccgacggacgcactcgttcgcatccgcacttctcaaagaaggggaccaactccgccgctttcacctcggctaggcctggggcgcggcgccgcccggcgcagttcgtagtcgcgcaaaactgggcagctgctgccatagatacgactgcagtcgtgcacttcgtcagaaaccgcgcggcgcgctacttgcgggaagagtccagattcgactggttaggcgccgagccacacctgttgacagtatgaccagtggtgttaccatcgcgacatgccagccgccaagattgctatctcgatcgacccagaagccctgagccaggtggacgagcttgttcgccggggagtcgccgcaagtcggagccagttgattcaagaagccgttcacgatcggctggctcgcttgagtcggactcgcctggctcaggagtgcgccaagctcgatccggaagcggagcgtgcggaggcggagaactggctcacctcggagacgtcgtggcccgggtattgagaggtgatgttgtctgggccgacctcgatccgacacgcggacatgagcaatcgggccaaagaccggtgttagtccttagccaggatgtgttcaaccaaagatccggaaccgtgatcgcactcgcggtgacgagccgcgaaccgacggccggcttcccactgaccctcgaaatcctctctgcccggctacccaagcgctcctgggtgaagatgggacagattcggacactctcaaccgagagactgggcaagcgccttggcaagctcgctcccgaagagctaagcagagttctggaaggcctaaacgagatcatcggcgcctaagggatctggagctgagcggcgctgcaccatgccgaaccggcgaagccggatgccgtcgctgaacgcgtccgcccgaggggttagccggcaaccgacccctgcagtcgagctagttcgtggattccttgccaaggtcatctgcctgagtcattgcttcggtggccagaaaagctgcagcgtgcccagcgacattgaccatgccggatatatggcccgcagcaagcacgtacctttccgtcacttcgaactgagcctcaaggtcggcagcggcttccgcagggacatccagaacaagattgatgacgaagtatccagattccgacgatcgaaactgaactggggccgatgcaatggcaccggggccacggaccgcaaactcgaggtgccgacacaaccattcaaccgtgacctttccaccctcggccctggtggccacggactcgacacgaccaagccacacaacggtgcgccgcgagtttgggttctgcaccgcctctagcggggtataagaccagtccacggcgccaagtctggccggcaggtctagggcttgtccgaccaaagttgctggagcaagtgcgaggcagatcgagagaagggctcttctgatcacggggtgcctctcggtttcattgccggctagcggctctgagctaagcagcgcgcgaagcgcgttcgcttgagtgatgagatggactcctccttcgacttgaaaggcatctgaggcgccagagtcgtcggagttatcagcgcatactccctcaagaggtgaagtccgtgggaaagcgtacgacgctcgcggtggacccggcaaaggccgtgttcgaggtcgcgttttcggaccggccaggtgaccttgccagcgctccgttcgcggcagcgtcggctgctgcccgtcgaaaccgcaccgagccagtacaggtaggcagaacgcccttctgcttggagatccgctttcccagaccgcggtaggaggtccctcacctcttcttcttgggccacggatccgaggtgccgacggccttcggccgcgccgcatcccccagagggtgcatgcggcgcgaaccgaagcgccgagaaagaaccgggaggagaaggatggttccaagcctggcaatccccgcggaagcttccgctttcgccgttccgaccttcgacccggcggtccggaggacgtttgttggagcctcggagtcggcgtcgctgttcggcctgaacccctggaagtcaccgctcgaactctggatgaccaaggctgggctcatcgacgagccggacctgtcgagcaacgagcgcgtcaagtggggcaagcgcaacgaggacaccgttgccaaggggctcgccgaggactacgggtggcaggtgcgccgcgtgcagcgcgtgatccctcacccgaccgtcgccaacatggcctgcacccccgactacgagatcgtgaatcacgcgaagggtccggggctgctgcaggtcaagaccgtcgattccttcaccttccggcagcactggccgggcaaggagccgccgatcaactacgtgctccagctccagcacgagatggcctgcaccggacgcgcatgggggattctgggagtgctggtcggcggcaaccagggcctcgtcttcgagtacgaacgcgacctcgccaccgtccgcgacatcgaagtggcggtggccggcttctgggcgtcgatcgccgccggcgtttctcccgacccggatttccgggccgacgccgagctgatcctcaagctctatcgccaggtgacgaagggcgaaaccagaacgctcgatgatcccgagctcgagaccgtgatcgcggagctggtcgctttgggtgaggccaaggcgagctgcgagaggaagcacaaggagtttcgcgcccggctgctcgaggcgattggctcggcggagatcgccatctgcggcgactgggaggtccgatcgcgcgaagtgcccgaagtggtcgtgccggtcacgacgcggcgtggctaccgcaccctcaacattctcagccgagtggcgtctgcggccgagtccaccgacgcggccaaggctgcctgaaaggcgaaaggagtcgtcttagatgcacatccgatcgaactcccccgtggcggtccaaggcgccgccattccgatccccggcgaggccgggagcttcgaagacactgccctcggaatccggcagagcgactcggccgagctttccgtggcgagcgcgcaggccgaggagaccgcgctcatccagtcggccgtcgtggcggcccaccggttcccccgggacgaggaccgggtcggccgaaggttgcatgcggcctgcgagcggccctccttcgcccaagaggccgagtggagctttccccgcggcggcgagaccgtccgcggcccgtcgatctacttcgcgcgcgaggccttgcgcatctggggcaatacgcgctcgggcatcgccgtggtccgcgacgacaagtccagccggaagatccgcgcctgggtgctcgacctcgaggacaacaactacatctcgcgcgaagccgagttcgccaagctgattcagcgcaggcgcaagggagggcagacccagtgggtgacgcccgacgagcgcgacctgcgggagctaaccaaccggctcggggcgatcgagctgcgcaatgcgattctctcgattctcccgagctacctggtcgacgaagcgatcgagcgctgccagacgaccgtccgcaaggcggcctcgtcgaacgtggaggcggcccgcgaccgcatcctcggctcgttcgccaagatcaacgtttcccgccaggacctggagcagtacctcgggcacgcctgggagacgacctcggccgacgagctcgccgagctcaggggcgtgggcaagtcgatcatcgacggcaactccacttgggccgagtacgtccgttcgagaacggccgttccttccgtggggccctcccccgggtcgggcgaggtcgcggacggcgcgtctcccgcggcaccttcgacggggagcctgaagtccccgttcgccaagcccgtcgacgccggcccgtcgccggtcgccgacgacgacgagccgggaccactcgacggctgatccgtgcccgccgcgctgcgggaggctctccggaagcggtcgtcaccgccccggggggcctgccgcacctactcgtggagccgcgccatgctcgcgattcgtctttgcgccaccgaccacccggatcggcggttccatctcgtctacgccgggtcgcttttggtcgccctcccgtccagggccctcgccaaagagaccgcggcgctgctcgaagacttcccgtgggaacggctcctggccccaggtgcctcgcacggaactcgcgcggcgaccgtgcgtctgatcggctccgcgggtgctctggcggcattctggtgctcctgccgccgcgagctcgccgaaagctctcggactcatcaccgggtctatcgctcgctgctcgacgagtttggcgcggcgagcgcgtgcgcacgcgggtctctcgaaatgtctcttcgggacgcggcctgaggccgggccgctcgctcggttggcgttcccgcgccgccccgccggggcgagcggaacggaaacgccgccccaacggctcccgcagggagagaaaggaatcgcttccccccatgaacaaggtcatccttctcggcaacgtcggcagccccccggagtcgcggagcctgcccaacggtcaggcggtcacgacgctttcgctcgccaccaaccggaagtacaagtcgagctcaggcgagccgaagaaggagacggagtggcacaagctcgtctgctacggcaagacggccgagatcgccgctcagtacctcaacaagggctcccaggtgctcgtcgaagggcgcctcaagacctcctcgtgggaggacaggcagacgggccagaagcgctacaagaccgagatcgtcgtcgactcgcttgagttcgtcggcggccgcggctccggcgccggccggtcggaggagagctccgacttcgccggcgcgtcggagtcgagcgccggtggcttcgcagacgacccttcggacgacgacattccgttctgagcgccggtcgctctctagccggggtcgactcgagagcgcatacgcggcattctgacgctggccgcgtggcgctctccccggtcgccgaatggccgccttcaagccggactccggcgagggccgaagctgcgactctgaacggatcctgttcagtccgtaggattcttagtgacttcccagattgaggggccggagggtgttctgcgttccggccagagcgcatttcctgattccgctggttcagtcgcctgcagccgcgacatcaagccagccgccgctctggaagtgcgtcaaaaactgacgtaaggctctgatcaaatccacgcccatgtgtggacccgatgcagatgcctctcaggaagccgcgctgctggcggcacgctccggccccaaaaacgagaagggccggtttcccggccctctctgatttggtgcatctttcagcttgttagcggaaagagcgcatttcctgatctgctagcttgtggcacgataagtcggttctcgaccattgtcaagagggggcaacgagatggcgaaggtccgctaccgcctggggctcgacatcggtaccaactcgctcggctggtgcgtctacgacttgagcgacacggcggaacccatagccattcgacgcttgggagtccggatcttcagcgatgggcgagagccgaagagtctggcctccaaggccgccgaccgccggctggcccggcagatgcggcgccggcgagatcgggtcctgaagcggaggcagcgccttctcgatgctctggttcgcttcgggctcatgccttctgacgcggctgagcgaaaggaattgcagcagctcgatccgtgggtccttcgcgcgcgtgccttggacgaggagctctcacccttcgaggccgggcgcgccctctttcatctgtccagaaagcggggcttccggagcagccgcaaggatggccgtgacgccgaggccgagaaggagcgcgggaaggtccatgccgcgatttccgagacgcggcagcgagttgccgatgccggcttccggacggtcggagagtacctggccagtctccatgcggaacgtcaacccgtccgcgcccgccgcagtccggacggcggctatgtcctctaccttcagcgcgacatggtcagcgaggagttcgaccggatctgggcagcccaggcgagccacgccccggcggtcttcaccagcgaagcacatgcggcgctcaaggacatcctcctcttccagcggcgcctcctccccgtgcgcccgggccgttgtgttttcgagcccagcgagcctcgggcccggctctgctcgcccctccagcagcgctttcgaatgctgcaggaactcgcgaacctgaggatccgcgagggtcttgccagccggccgctttcgctcgacgagcgagatcgcatgctggggcgactggcggaggatccgggagtcgtctcgttcacggccctggccaagtccgccggattcaagaactccacggtcttcaacttcgggaatgatccgaagcggaagggattccggggagatgtcgtgggcgcgggcttctcccgcaaggacgcactcggggctgaatggaggaagctcgatccggcgatccagcagggatttgccgtgctggtcgaacaggcggatcagcaggacgcactcgtcgcggctctcttggcgcttccggcaaacaccgacccggcggccgagattctcggcaagcaggaggacgccccggacgtcctcaaggccctctcacgtttgccgttcacgatctcggagcccgtggcccgcgtgctcgctggcctgaagctgccggacgatttcggaagcgtcagcctcaaggcacttcgaaggatcgtcccggagctcgaaaaggaggtcgtgactttcgacgtggcggtccagcgggccggctacacccaccactcccagttctacgacggcgtcctccacgatctcttgccctactacggtgagctgctgcgtggctacacgtcgccggcggacaaggccaaggaccccggcgaacgcgagttcgggaagatcgccaacccgaccgtgcatatcggcctcaaccaggttcggcagctggtcaacgctctgatccgccgttacggccacccggccgagatcatcatcgagttgacgcgggagttcggcgcttcgggtgagaagcggagagagatcctcaagaagcaggccgagaatcaggagcgcaacgagcgctacgaccgggaactcgaggcactgggagttcgggtcaaccgcgagaaccggatcaaactccagctctgggaggagttgggcaaggacgacgcgctcgcccgctactgcgtctactccggcacccgcctcagcaaggcggcgctcttcagcgacgagatcgaggtggaccacgtcctccccttctccaggtcgctgcacgatggcatcggaaacaaggtcctctgcactcgtcaggccaaccgcgacaagggaaaccggactccgttcgaggcatccgggcacactccgaactgggacgggattgtcgaacgggctgcttctcttcccgggcgcaagcccgagctgttcgccgaagccgcgctcgagacgttcctccaaggtcgcgacttcctggcccgccacctcacggacaccgcctatctcggccgggttgccaagcagtacttgtcggccgtctgcccaccggatcgcgtctgggtttcgagcggccgcctgaccggcatgctgcgcggaaagtggggcctgtccaggttgctttcggacgacagccagaagaatcgcgacgatcaccggcatcacgccctcgatgccgcggtgatcggcgcctgttcccggagcgtgatccagcgaatcgccacggcagctgcccgcgcggaggcaggtggcgagcaacgcctgctggaacgcctggagctgccctggacctcgtatcgagaggatctggccgagaaactccgcggagtcaacgtctcctacaagccggatcatggccgcgaagccgcactgcacaacgacaccaactacggaatgcgcgagccagcaggcgacaatcggaatcccttggtcggccgacgcgtgcccgtcgagagcctggactcggtggcgaaggccgagacgatattcgacgagcggcttcgctcggaactcgtcgccctgctcgctcccctgtcgggaaccaaggagatccgcggcgccctggccgcctggatccagaagaccggaacgcggcgcgtcttctgtgtcgagcgcctgaacgtgatcccgattcatgaccggcgaaccgggcttccctaccgctacgtcaagggggacagcaactactgctacgagatctatcgccagtcggacggcaagtggggcggcgaggtcatcagcacgttcgaagcgaaccagcgcggcttcgacccacacgccagtacctctcggagcggccagccgctgctgtttcggcttcacaaagatgacgttctcgcgctcgaggcggactcgagcttccggctcgttcgcgtggcgagattcaccgacggcatgatcgcgctcattgatctgcacgaagcaaacgtcgacgcccgcacccgaacaaaggggggcggcctgaagtacctcttcaaggctccaggtacgctgagaccgctcaaggcacgcatcgtcggagtgaacgtcctcgggtacgtcaacgaccccggcccgttggagtagagatgctcggcagaatcgtcgagatcgcggaggatgagtgcgccctctcgctcgaccgggggttcctcgtcgttcgcggcgccgagggggagcggggccggacaccggttgacgacgtggccgcgttgatcgggaatgctcacggcctgagctactcgaacaacctcctcgtcgcccttgccgagcgctctatccccttcgtcctgtgtgcgcgcaatcactcgccggtcggactgctctggccggttgccgggcaccatcgtcaaggtgcccgcatggatgggcagctccgagccacgttgcctttgcgcaagcgcctgtggaaacagctcgtggcccggaagatcgagatgcaggccgcggtcctggactttttcggtgaaccgggcccacgggtccggcgcctggtagcggaagtccgggccggagaccccggcaatgtcgagggtcgggcggcagccgcctactggccgctcgtcatgggtccgcggttccggcgggatcggcacgcggacggcgcgaactcgctgctcaactacggctacaccgtcctgcgcgcaacggtagctcgacacgtgatggccgcagggctccaccccgggatccccctccaccatggcaacgaaggcaacgccatgcgcctggtcgacgacctgatggagcccttccggccgctagtggacgcctgggtgcgacggttggttgtcggaggcgcggaacgcctcgaccgcagcgagaagcgggctctcgctctgctgccgattcggctgctggtcagcccgcgaggcgccggcccggtgacggtggccattcagcgtctgacggtctcgctggcccagatctacgagggccaacggagccagctcgagcttcccgtgggcacgcaggccgccttggcgcgactattcgatgagccgggctcggaaatcgacgaggcgacgccgcccgcgccgtgagagcgcgctcagcggctatcgcctgatgtggctactcgtgatgttcgaccttcccgtcgaaacccgagaggagcgcaagcaggccaaccggtttcgccacgatctcctgggtctcggattcgagcggtgccagttctcggtctacctgaggttctgcgaaggccgcgaacaggtcgagacggcgacccgcagagtcgagaaggtgctgcccaaaggcggactggtctactgcctggcctttaccgaccgacagtacgagtcgatcatccgtttcgaccaccgaaagcgccttccgggcctgaaaagcccggaccagttcctcctcttctgatgatggggagtcagtttcccggcccccaaaaatggggcaaccccctcaatttcagggggttgcgtgaagccggaagctagcagatcaggaaatgcgctctggccggaacggaaccgccgccggagccaccacacgctgcgaagctagcagatcaggaaatgcgctctggccggaaccgggcggacatctcgaacgcacccggcaggaagctagcagatcaggaaatgcgctctggccggaacgacaatggaagtcaaggtcgacgcgctcgagaagctagcagatcaggaaatgcgctctggccggaacagctacggcaaggggccggaagtggcgatggaagctagcagatcaggaaatgcgctctggccggaacaaccaccgcttcgagcagccgatccagcagaagctagcagatcaggaaatgcgctctggccggaactgcagatccacttcggcccaggtcaactccgaagctagcagatcaggaaatgcgctctggccggaaccgttcgggtagcggtaatgattagcgattcgaagctagcagatcaggaaatgcgctctggccggaacctgaatggagtagtgcccaccgcactgaaggaagctagcagatcaggaaatgcgctctggccggaacccgcagaccatgcattcggcgtccgcgacggaagctagcagatcaggaaatgcgctctggccggaacctgagcgatcgtcaataccactagcccgtgaagctagcagatcaggaaatgcgctctggccggaacccacgggttgaaaccagcacgacgaaccgagaagctagcagatcaggaaatgcgctctggccggaacggagcgacgatgctggacggcccggtttcggaagctagcagatcaggaaatgcgctctggccggaaccgccgcgtcctgacgactcgcggggaagaggaagctagcagatcaggaaatgcgctctggccggaaccgcggtgtccttggaccagccgtcgagcagaagctagcagatcaggaaatgcgctctggccggaaccgcgtggcgattcgccgcggcggtcgaccagaagctagcagatcaggaaatgcgctctggccggaacttgagcgagcgggcgaaggagccggtgtcggaagctagcagatcaggaaatgcgctctggccggaacctcgccgcgccgcggtcgcccgtcgcgctcgaagctagcagatcaggaaatgcgctctggccggaacaagtcgatcagcgccttgtcggctgacgggaagctagcagatcaggaaatgcgctctggccggaacaagtcgatcagcgccttgtcggctgacgggaagctagcagatcaggaaatgcgctctggccggaaccaccacggcaagctcggaacgcttccgtgggaagctagcagatcaggaaatgcgctctggccggaactcgtactcctgttggaagacgagcgggtcagaagctagcagatcaggaaatgcgctctggccggaaccgctcgacgctgctgctcggcgacgccgaggaagctagcagatcaggaaatgcgctctggccggaacgtaaccccacgcgagtaaacggatcgcctcgaagctagcagatcaggaaatgcgctctggccggaaccagtggaactggagcccaagccccgcgtacgaagctagcagatcaggaaatgcgctctggccggaactctggcggtagcgattcccgtcggctccgagaagctagcagatcaggaaatgcgctctggccggaactgcgcgttccaccgctccaccacggcggccgaagctagcagatcaggaaatgcgctctggccggaacgccgtcgaagatctggtagaagaaggtggcgaagctagccctcggtggacacccaaaaccggccattaatggacacctcaaaaccggccatttcctgaggccgtaggggccgagacgttgaccgcgacgtggagcttgtggctccctccgtcgcatggggaacgt

SEQ ID NO: 1535 - DNA, 10590 bp, synthetic construct
  source 1..10590: mol_type = other DNA
  misc_feature 1..10590: note = Synthetic
gaactggcagagcacgccatagggcttgttgaaggcgatcagcatggggtcagcggagaatccgggtcacgcaccgtggcgcctatcggccgcggtcgcggcgcggcgggtggttattcgctggccggcttgcggaagcgcagggtcatgcggtcgctctcgccgatcgcccggtacttctccgcatcggtcgcctcgtggcggttggtgggcggcagcgtccacacgccattgggatgatcggcgctgtcggccggattggcgttcacttcgctgcgcgcgtccagcacgaagccggcacgtgtagccagctcgatcaccagcgcttcggtcaggtagccggacttcttcatggcgtcgaggtcggtgcccggcttggcgcgatggtccaccacgcccagcgtgccgcccggcttgagcgcggcgaagaacgcctggaagtaggcgtcggcgctgccggcggccacccagttgtgcacgttgcggaaggtcagcacggcgtcggcgctggcgggcgcgcccagcgacggcgccttgccgtcgtacaggtgcaggctggtgcgcccgtagcgcgtgggatcggcggcgaacagcgccggcagcgggttgctgcggccgggcgcgggggtggcgctggcggcgatgtagcggccgctgtcgcgcaggtagggcgccaggatcgcgctgtaccagccgctgcccgggctgatctcgatgacggtgtcggtgggcttcaggccgaagaacgccagcgtttcggccgggtggcggtagcggtcgcgtgcccgctgggcggcatcgcggccgggatctgccaccgctgcctgcagcgcggcatccaccgcggacgtggccgccgccggcgcggacgtcgagttgggcgtgccggcgcaggcggccagcagcagggcaagcgcggggatcgacaggcgggtcatgcggtggctccggatgcgatgggcctgcagggtaaaccggcatcgacgcaaatacgaagcccggcgcgcggccgggcttcgggggtcgatgaagggcgggccgttacagcgtcgccagcgccgaattcagcgtggccgacggccgcattgccgccgccagcttggccatgtcgggctggtagtagccgccgatgtccacgggcttgccctgcacggcgacgagttcctcgacgatcttcgcctcgttctccgccagcgccttggcgaccgccgcgaacttcgccgccagctcggcgtccgcggtctgttcggccagcgcctgcgcccagtacagcgcgacgtagaagtggctgccgcgattatcaatggtgcccagcttgcggccgggcgaacggtcgttgtcgaggaacttcgcgttggccgcgtccagcgcatcggccagcacctgcgcccgcttgttgccggtggtgttggccaggtgttcgaacgaggcggccagcgccaggaattcgcccagcgaatcccagcgcaagtagtcctcttccacgaactgctgcacgtgcttgggcgcactgccgccggcgccggtctcgaacaggccgccgccgttcatcagcggcacgatggagagcatcttcgcgctggtgcccagctccatgatcgggaacaggtcggtcaggtaatcgcggagcacgttgccggtggcactgatggtgtccaggccttcgcggatgcgcttgagcgagaacttcatcgcttccaccggggagaggatgcggatgtcgaggccggcggtgtcgtggtcgttgagataggcggcgaccttggcgatcaggccgcggtcgtggtcgcgctgcgggtccagccagaacaccaccggcgtgtcggaaagccgtgcgcggctgaccgccagcttcacccagtcgcggatcggcgcgtccttggtctggcacatgcgccagatatcgccggccttgaccgggtgctgcagcagcacggtgccatgctcgtcgatcacccgcaccacgccgtcgccggcgatcttgaaggtcttgtcgtggctgccgtattcctcggccgcctgcgccatcaggccgacgttgggcacgctgcccatcgtcgccgggtcgaacgcgccgtgctcccggcagtcctcgatcaccacctggtagatgccggcgtagcagcggtccgggatcaccgccttggtgtcctgcagttcgccgcgggcgttccacatgcggccgctgtcgcggatcatcgccggcatcgaggcatccacgatcacgtcggacggcacgtgcaggttggtgatgcccttgtcggaattgaccatcgccagccccgggcgctgcgcgtacagcgcggcgatgtccgcctcgatcgcgttgcgctcggattcggccagctggcccagcttggcgtacaggtcgccgatgccgttgttggggtcgaagccgatctcggccagcgtgcgcgggtgcttttccagcaccggtgcgtagaagcgcgacaccgcgatgccgaacatgatcgggtcgctgaccttcatcatggtcgccttcaggtgcagcgagaacagcacgtcctgcgccttggcatcggcgatctgcgcgtcgatgaaatcggccagcgcaccggcgctcagtacggatgcgtcgatcatctcgccggcctgcagcatgaccggcccgcgcagcgggaagctgctgccggtcacgctggtgtattcgatccgcaccgggccggcgttgaccatggtgtagctctgctcgctgccgtagaaatcgccggcgtccatatgcgccacgtgcgacttcgaggacgcctcccacttgcccatgcggtgcggatgcttctttgcgtaggccttcaccgccttcggcgcgcggcggtcggaattgccctcgcgcagcaccgggttcaccgcgctgcccttgacccggtcgtagcgcgccttggcgtccttctcgccctcgccctgcggcgcgtccgggtagtcgggcagcgggtagccgcggtcctgcagctccctgatcgcggccttcagctgcgggatcgaggcgctgatgttcggcagcttgatgatgttggcttccggcgtcttggccagctcgcccagctccgcaaggtcatccgccaccgcgcgctcgcccagcagctccgggaactgcgccaggatccgcgccgccagcgagatgtcgcgcgtctccacgtccacgcccgcggtcttcgcatacgcctgcacgatcggcaggaacgacgcggtggcgaggaacggcgcttcgtcggtcagggtgtagaggatcttggacatggcggctcgggttcgcggaggaagccgtcattgtcgcgccttgccgccccgacgggcaaagcctccggtcatgggccggaagtctcgggatatgagaccggaaaagcataagaacgacaaaggccggttgcccggccttgtctgatttggtgcatctttcagctctgagctgatcagcttgttagcggaaagagcgcatttcctgatctgctagtaggctcaagcctacggcgctgattctcgaacgtcaaggaggggtcgtggcgaagatcaaatatcggctgggcgtggatctcggggcaaattcgctgggctggtgcgtgtatcggctggatgcgcaggatgaaccggacaagatcgtgcgcctgggttcgcggatttttgccgatgggcgcgaccccaaaacattggcttcacgtgccgcggatcgcaggcaggcaaggcaagcacgccgccgccgtgatcgcgttttgaaacggcgtcacaaactgatgcaggcattgatcaagttgggccttatgcccgcagacggcgctgcgcgcaaggccatgcaaggaagtgatccgtatgcattgcgcgcgcgggggttggatcagccgcttgcgttgcatgagcttggtcgtgcgctgtaccacctcgcacgcaagcgcggcttccgcagcagcaagaaagatactcgtggtgacgatgccgccaaggaggcagggaaagtcaatcaagccattgcgatgttgcgtgcccgcgtgcaggaggctggttgcagaacagttggcgaatatctggcgtaccagcatgccgagcgggcaccggtacgcgcgcgtcgcagcagtgacggcggatacgtgctgtatctgcagcgcaccatggtcgaggaggagtttgatgccttgtggcaggcgcagcaggcgcaccaccctgacgtgctcacggataccgcccgtgaaattctgcgtgacatcctgctgttccagcgtcgtttgaagccggtcgaggcgggccgctgcctgtttgagccatcggaataccgcgcgcgtctgtgtgcccccctgcagcaacgattccgcatgctgcaggaactgaatcacatgcgtgtgaaagatgggatcgaggagcgtgcactgacgctggatgaacgcaaccgcatgcttgcggtgcttgaaaaagacgtggggccaaggcctgtcagtttcgcaaaacttgccaaggcggcgggcttgcgcaccagcgatttcaaccttgggcgagatggcaagcgaacaggtctaaggggcgacgcggttggttcacgtttcgcgtcggacaacgcgcttggcaacgcatggatgtcgctgtcgtccacgcagcaatacgccatggccgtattgacgacattggccgatcaggtgcccgtgctggaagccgccttgttggccttgccggccaattcgccagcttgcgaggacatcttgaagggtgtcttcgacaaagatgagcgcgaagcggtggcgctggtgttgcagtcacttcctctccggctcagcgaggcacaggcgcgcactgttgccagtttcaatcttcctgacgattacggcagcctgagcctgaaggcgcttgcgcgcatcgtgccggagctggaacgcgaagtggtgacatacgacgaagcggtgcggcgcgccggttatacgagccactcgcagctgcatacgggtgaaatcttcagccgccttccctactacggagaagtgcttgccggctacaccgcgccgacgcctacggcgaagaatcccgacgagcagcgctacggcaaaatccccaatcccaccgtgcatatcggcctgaatcagctgcgcctgctggtgaatgctctcatcaagcgctatggctcgccgcaccagatcgtgatcgagctgacgcgtgagttcggtgcttccggcgagaagcgccgcgagatcacgagccggcagaaggagaatcaggagcgcaacgcggcatacgatcaagagctgagggcgcttggcgttcgcgccaatcgtgagaaccgccagaagctgcaactctgggaggaacttggcaaagacgatgcaatggatcgtttctgcatctacagcggaaagcatctgagcaagaccatgctgttcagcgatgaagtcgagatcgaccacatccttccgttttcgcaatccctgcatgacggcatcggcaacaagatcttgtgtacccggcagagcaaccgggacaagggtaaccgcacgccattcgaggcctggggtcatacggaaggctgggcggatatcgaagctcgtgcggagcgcctgcctgcgcacaaacgcaaactgttccgagaagctgcattgcaggaattactcggcgatggcgatttcctcgcgcgccatctcactgataccgcctatctgagccgggcagcgaagcagtacctgagctacgtctgtccgcagaacgaggtctgggtttccagcggcaagttgaccgggatgattcgcggcaaatttgatctgagcaggctgctgtcagaggatgccagcaagaaccgtaacgatcatcgccaccacgcgttggatgccgccgtgatcggcctatgcagccgcagcctgatccagcgcatggccaatgccgcggcaagggcggaggagcacggtgagaatcgtctgctggagcgtctggatctgccgtggcccagctatcgtgatgagctggactcagcgcttgccgccgtcgtggtatcgcacaagccagaccatggcaagcaggcagccctgcacaatgacaccaattacggtttgcgaggatctccggataagcgtggcaacccgcttgttgggcgccggcaaacactggacagcatcaagaatgcgaaagatgcagaatcgattgctggcgaggcgttgcgagaagaaattgtgcggctgttggcgccgctttcttctccgaaggagatcaaagcagcgcttgaggcctattccgcccgcaccggcgtgcgccgggtgatctgcgaaaagcgcttgtcggtcatccccatcatggatcggcgcaacggccagccttatcgctatgtgaaaggcgacggcaactattgttacgaaatcttccgcaagccggatggtcggtgggacggtgaggtcatcagtacattcgaagcgaaccagaagggtttcaaggagtcggcaacgcatgcgcagaatggcatgccgctggtgatgcgactgcacaaggatgatgtgcttgccataaatgacggtgattcgatgacgaaaatggtacgcgttgcttatttcacgccgggcaaaatagcaatggttggcatagttgaagcaaatgcggacgcgcgcgtcagggcgaagcatctgaattatttgttcaagacgccatcaacgctcaggtcactgtgcgctcgtgcggtaggcgtagatgtcctcggctacgtcaacgaccccggtttcaagggatgacatgattggccgcatcgtcgagatcgccggggacgggcgttacctgtcgctggatcgtggcttccttgtagtcagccacaagggccaagaactggggcgcacccccatcgacgatgtggccgccttgatcggcaatgcgcatgggttggtctacagcaacaacttgttggtggcgctggccgagcgcggcgcacctttcgtgctgtgcggtgccaaccacaagccggttggcctgctgtggccggtcgaggggcaccaccgccaagcggcgcgcatggatgcacaactgcgcgcctctctgccgttgcgcaaacgactatggaagcaggtcgtgcaggcgaagatcggcatgcaagcggcagtgattggtttgtttgatgggccggagccaccactgcggcggctggccggaaaggtgcgtgcaggagatccgtccaatgtggaagggcaagctgcacggcagtactggagccttctgctgggcaaggcgttccggcgtgatcgcgatgccgaaggcatcaatgccatgctcaactatggctatacggtgctgcgggcgctggtggcgcgccaggtcatggcggcagggctgcatcccggcgtgccgctgcatcatgcgaacgaaggcaacccgatgcgtcttgtcgacgacttgatggagccattccgtccgctggtggatgccatcgtgcgtcgcctgtgcgacaccggtgcagtgacgctggatgccgaaacgcgacgtgagttggcgttgctgggaacgcgaagcatgcggactgcgcaaggaatcagtccggtcacggtgacagtgcagcgccttgcggtgagccttgcccaagtctacgaaaagcaggcaatggcattggacttgcccgaaacaggtcgcggcgcattggccaatctgtgggatcaagcccatgcccaagcagggaaagacgaggaggaggcgtgagcggatagctgcaccgccgctctgtgcctacagactgatgtggatgctggtgatgttcgacttgccggtggacacggaggaaaaccgcaaggcagccaatgatttccggcatgacttgctcgacttcggtttcgagcgctgccagtattccgtgtatctacgcttctgtgaagggcgtgagcaggccgatacctggacgcggcgggtgcagtccgtactgccaccgggaggcaaggtctactgcctctacttcacagacaaacagtacgaaggcatcgtccgtttcgagcggcggaagcgcgaaaaacagcgcaaaaacccggatcagtaccagcttttctgagacaaaacgcatggattcaacgctcatactcccaagcaagtcatttgaaatcaatgacttgcttgggagcggagcgtaacagatcaggaaatgcgctctggccggaacggtcgaaatacttcacgctgacgctgttgagagcgtaacagatcaggaaatgcgctctggccggaaccagatagccgaagcggattttcagctggtcgagcgtaacagatcaggaaatgcgctctggccggaacggagggtgggttgtcaccagtgccgccagagagcgtaacagatcaggaaatgcgctctggccggaacgccaccggtgccgggtgtgccgccggtgccgagcgtaacagatcaggaaatgcgctctggccggaactaataaccccgggcagggtggtggtggcaagagcgtaacagatcaggaaatgcgctctggccggaacgcctgttctccagttgcttacagacgcgcgagcgtaacagatcaggaaatgcgctctggccggaacactgttcggtgtcagcggcgtcgatgaggcgagcgtaacagatcaggaaatgcgctctggccggaactgagatggccgaccgcttcgtcaatgatccgagcgtaacagatcaggaaatgcgctctggccggaaccgcatccgcgcgaagcactatgccccgagcgagcgtaacagatcaggaaatgcgctctggccggaacgtaatacgcgcgcgcctgttccagcgcgaagagcgtaacagatcaggaaatgcgctctggccggaacggaatggcttttgcataacggcggccgacagagcgtaacagatcaggaaatgcgctctggccggaacgatccgcgcattgaacgcatcccgcaactggagcgtaacagatcaggaaatgcgctctggccggaacatccactgccctgcccttgtggcgagcaaggagcgtaacagatcaggaaatgcgctctggccggaactacagacgcgcgcgtaacgccaagatgccggagcgtaacagatcaggaaatgcgctctggccggaactggcatccggcgtgctgctgcaaagttgtgagcgtaacagatcaggaaatgcgctctggccggaacgggggcgctgccgtatgcggggccggattggagcgtaacagatcaggaaatgcgctctggccggaacgaatagcaccgcccacaccccggcgctggagagcgtaacagatcaggaaatgcgctctggccggaactcatcggaaccggccgacaagccgcgcgacgagcgtaacagatcaggaaatgcgctctggccggaacccgcccgacattgacgaccgtagcgcgtttgagcgtaacagatcaggaaatgcgctctggccggaactgacttcacgaaccgctgggagctggcgacgagcgtaacagatcaggaaatgcgctctggccggaacgcgccgtatatgccagccagtccggccagcgagcgtaacagatcaggaaatgcgctctggccggaacacagcatctcgggggtgtagagcgtaaggtgagcgtaacagatcaggaaatgcgctctggccggaaccagcgtgcggttcacctcgccggccttgtggagcgtaacagatcaggaaatgcgctctggccggaaccgggcttaggcgtgactgcatggctgtctggagcgtaacagatcaggaaatgcgctctggccggaacctcgccggcttcctcgacttcgccgcaggagagcgtaacagatcaggaaatgcgctctggccggaacttgcgcttactcatggcccacctctgccgtgagcgtaacagatcaggaaatgcgctctggccggaacctacactcaaaaaattctaatcccgtcgaattcgacgggattagaaggtgagcggcatcaacaatgtcgaaaaacaatacaagggtcagggtgcaagattgccgacgctgtacgacatacccgcatccacctgcaaaaaggcgcggccgaagccgcgccctccagccatcgaagcggattgagcgcgctcagcgcacctcgaactcgcgagtctgcaccacgttgccgtccagcgagatctccaccttgtacttgccggtcggccagccgctgggcttgctgatctggaagtcggtgacgccgtcgccagtaaaggtgacgtccttggtttcctcgttgacggtctggttgctgtccacgtgggtccacttcgcgcccagcttggccggaaccgaggccatcgggtcggaggtggcggtggcgaccgcggcatggatggtgtccttcgggctgaaggtggtcatcggcgcggtgacgcgcatgtcggcgcccaccgcgttgccgaggtcgacggcggtgaccgaggcagtggccggcatcggtgcgggcggttccgccatcggtgccggttcgctggccaccggcggcggcgccggctcttccttcttcttgcagccgaccagtgccacgctgcccagcaggacggcgagcacgctcatgtgcaggcgattgcgcttgttcatatcggatttcctcgtcgttcgtcgaaaggggcctgtattcagtcttcccgcgcggggatcttc

SEQ ID NO: 1536 - DNA, 6439 bp, synthetic construct
  misc_feature 1..6439: note = Synthetic
  source 1..6439: mol_type = other DNA
gtaggcattggccgttgccgtaatgggcgatgccggcgccgctgccttcggctccggccgctgcgcggggtccggcggtggcggggccgagcacgcggcgagtaggcacaacatcggcaacaacagcgaattccaacgcatgatgcttcctccaagcagggcttggcctatcctacgctgaacctcatgatggagccgcccatgccctcaccccgctggagtcttgatggccaacgcgcccttgtcaccggcgctagcgccggcattggcttggccatttgtcgcgagctgctggggttgggtgcgcaggtgttgatggtggcgcgtgacgccgaattattggagtccgcacgcgccgaactggaagacgaattccccggccctgaagatgccgtgttggccctgcccgccgatgtgacggatgacgagcagcgcacggaaattctcgactgggcggcggacttgggcggtctgcacatcctcatcaacaacgccggtggcaacctcacccgccccgcactggactatggcgaagaccagtggcgcaacatcttcgaaaccaatctgttctccgcgtttgaactgtgccggctggcgcacccgttgctcagcaaacacgccgcctccgccatcgtgaatatcggcagcgtgtccggcatcacccacgtgcgcagcggcgcgccctatggcatgagcaaagccgcactgcatcagatgacccgcaaccttgcggtggagtgggccgaagacggcatccgcgtcaatgcggtggccccgtggtacatccgcacccgtcgcaccagcaacaaattggccgatccggattatttggatgaagttttgctgcgcaccccgatgggccgcatcggcgaacccgaagaagtcgccagcgccgccgccttcctgtgcctgcccgccgccagctacatcaccggcgaatgtattgccgtcgatggcgggtttttgcggtatgggttttagggcaggcaccgtctcagtctgtgcgacagagacccgctacaaaagacaagggccggctaggccggccctcagatttggtgcatctttcagcttgttgccggaaagagcgcaattcctgatctacttcatgggaaaaactagcagcgacgcaccgccgcgtcaacagggggcgaaatgaaattcaagaaacgctatcgcttgggcttggatatcggcaccaactcgattggctggtgcgtacttcaattgagtgatgatgatcagcccattggcattatccgtgcgggttcacgaattttttccgatggcagaagcccaaaaacgctagcgtcactggcagcggatcgccgcgcagcacgccaaatgcgccgccgtcacgaccgcgtgctgaagcgacaaacgcgcttcatggatggcttgattcgttttggcttgatgccaaatgacgatgacgaaagactcgcgttgtctgcactcgacccgtacgaactgcgccacaaaggtctggatgagcccctgacagctttcgagttagggcgcgcgttgtatcaccttgccaagcggcgcggcttcaagagcagccgtaagtccaagggcgagaatgaaaacgaggccggcaagattgcgacggccatcggcaagacgcgcgagcgcatcgcagccgctggctgccggacgatgggcgaatacctcgccaaacgccacgaacaacgcgaaaccgtgcgcgcccgcacgacggcggatggcaaggaatacctgctctacacgcagcgtgcgatggtcgccgaagagttcgatgcgttatgggccgcacaggctccgcatcatccgaatgtttgcacggaagcagcgcgcgcctttctgcgcgacacgctgctgttccagcgtcctttgctacccgtccagcccggccgctgcatttttgagaccgaggagtttcgcgagccgttgtggtcgcccttgcagcagcaattccgcgtattgcaggaactgaacaacctgcgcgtcatcgaaggattggaagaacgcccgttgacgctggacgagcgcaacaccctgcgcgatgccctttatcgcaagcgggaaatgacgttcgccgccatcgttagggcgctcaagctgccgaaagacacacgcttcaatctagagtcggaaaagcgcaaaggattgaagggcgatgtggttgcatcccaactcggtgtagaaaattcgttgggagatgcatggttcgccatgtcgcggcagcaacaacgcgacttagccgaattgatcgacatcatcgacgataccgaggaattgaagagccgtctgatggacgggccatggcgcttcgatgccgccattgccgcgcagttggccaaagcgcgactgccggaagactacggcagcttgagtcgcaaagcgttggagaagatcgttccgattctggatgccgacgtcatcacctacgacaaggcggcgcagaaggccggctacaaccactcggatttttatacgggcgagatcttcgagcgattgccgtactacggggaaatcctgcgcagctacacgtcccccacgccgaaggcgaaagatccgaacgagaggacgttcggcaaattggcgaacccgactgtacatatcggcctgaatcagttgcggcaactggtcaacgagatcatccggcgttggggccatccgaccgaaatcatcgtggagcttgcgcgcgatttcggtttgtccggacagaagcgccgagacctcgaaggcgagcaggccaagaatcaggggcgcaatgaaaaactgaaccagcggttgagcgctttgggacaacgcgaaaatcgggagaaccgccaacgcctgatgctgtgggatgaactgggccgcgaagatgcaaacgacaggcattgcatctactccggccagcgcttcagcatgagccagttgttcgacgggacggtagaaatcgaccatatcttgccgttctcacgctcactggacgatagcttgtccaacaaggtgctttgtctttcgcgcgccaaccgggataagaagaattcgacgccgttcgaggcgttcgggcactccccgtcgggttacgactggaaggaaatcgaagaacgcgccgcccggttgcacaagaacaaggcaaagcgtttcaaggaaaacgccttgcagaatttcctaggagagaaggatttccttgatcggcatctcacggatacggcgtacctgtcgcgcgttgcccgtcaatacctcacggccgtttgtccgccaaacaaggtctgggtggcgacgggccgcctgacagccatgctgcggcagaagtacgggctgaatgagattctcgatccggaacacaagggcaagaaccgcgatgaccaccgccatcacgccgtggatgcggctgtcattgcggtctgtgaccgctcgctcatccagcgtatatccaccgccgcgaagaaggccgaggccgacggcgaaaatcgattgctgaaatcgctggacgtaccgtgggtaggcttccgggaggagcttgccgaagtggtgcgcaggattgtcgtctcccacaagcccgaccatggccgtgaagcgggcctgcacaacgacaccaattacggacagcgcggagaacccaatgccagcggcgcgatgttggtatcggtacgcaagccgttgactgcattgactccgaagaacgtggatgccgttgccgatcctgcattacgtggtgaactaaagaaacttttggatggcctgtctggtcaggagctgaaagccgcactggatgcctacaccatacgaacaggtgtgcgccgcattcgtatggaagaacgcttatccgtcattcctatccaagaccgcgcaaccaaacagccctaccgatacgtcaagggtgacggcaattattgctacgacatttaccgtacagagaatggcaaatggaatggcgatgtggtggatatctacaccgccaaccagcctgactttgatccgaagtccaagactgcctatagctcaggtaagtctttggtgatgcggctgcggaagggcgacatacttaaactagaacatgatgggcggttcaagctgatgcgggtcgctcttttttcacgtaatggtgtcgctttacatgagcacaacgaatctaatgttgacgctagggatcgagatcgagagaacagcttttcctatatacgcaagggtgccgatccactccgcaagctaggcgcgagactggttggcgtggacattctcggctacatcaacgaccccggcttcaaggaatagctgactgcaatggcaacgcatcacaggatgcgctagcctcttaccccatgagaccgtccactgccttgagcacgcaccgtgaggctatccgtcgcatcgtggcggcgcaccgcgccaccaatccgcgagtgtttggctctgtgctttatggtgcagacaccgaaggcagcgaccttgacctgctggttgacccactagagggcacaacactgtttgatcttggtggcatcgtttacgagctggagcagctgctaggtgtccccatcgacttgttgacacccaaggccatctccaggcacttccgcgatgacgtgatcgcgcaagcgcagcctgtatgaagcaccaggatcgccgcctgctgcactacttgcaggatattgtggaagcgcaagagcgcatcgccgagtacgtggaccattcggattttgacgcattccttgcaaaccgcatgatgcaagatgccgtcattcgcaattttgaagtcatcggtgaggccagtaagcacctgctacagcgcttcaaggcgtttgttgacgcgcacccggaattaccacttgcaaaggcctatgggctgcgcaacatcgtcgcacacggctatcacgatgtggactttcaggtgatttgggacaccacgcgccatgatctgcctgagcttgcacaacagttacgaatttgcctgcaatcctttgctagcccatcacaagagctatgattggccgcattgttgagattgcaggggattcgcgctacctgcacaaggagcgcgggtttctggtggtctcgcacaaaaatgcagaacaaggccgtgtcccactggatgacgtggccgcactcatctgcaatgcgcatgggttggtttacagcaacaatctgctggttgcattggccgagcgcggttgccccatcgtgctgtgcgggaaaaaccatatgcccgtgggcattgtctgcgctgtagacagccactatcgccaaggcgcacggttggatgcacaagctgctgcatcaagcccaaccaaaaagcggctgtggcaagaattggtgcgcaaaaagttgagcatgcaggccgcaacactgggtgcatttggtttacctgaggcccccctgcgtgcactgattccaaaggtgacatccggtgatacgcgcaatatggagggcgtgggtgcgcgccgctattggcgcttactacttggccccaactttcgccggaaccaaggtgccgatggcatcaatgccctgctcaattacggctataccgtgttgcgggcaaccgtagcgcggcatttgcttgccacagggctgcatccgggtatgccattgcatcacgccaatgatgccaatgccttgcggttagtagacgatttgatggaaccatttcggcccttcgtggatgcgcaggtgcggcaattggctgatctaggccgttatgacgtagatgcgcccaacaagcgggagctgtccttgatgatggcccgtggtattcagacagaagatggacttagcccgatttccgtggccattgaacacttgtgcacgtcattggcgcatgtgttcgaaaagaagcgcaaacacctcaatctgccttatgatcgggccgagagcgtgtctgcttggttgggaaacaaggccttgtgcaagaccccatggagtagtgatggcgaggacgaaacgctaccgtccattgccgaggaagactgaaggccacaagtcgcctaaccaacccttgagtgggtatcggctaatgtgggtattggtcatgtttgacctaccggtggatacgcaagaggccgtcaaggcagccaacgactttcgccatgacctgctggatcttgggtttgaacgctgccaatattcagtgtacttgcgcttcgtagaggggcgcgatcaagccgacaccacaacacggcgtgtgcaagcggtattgccgaatggaggtaaggtgtatgtgctctatttcacggacaagcaatacgccggtatcgtccgttttgagaacaaaaaacggcgtgaaaaacttaccaatccagagcagtttcagcttttctgacgtgttaacgtcaaaatttctcgcaaatagaaaacaaaaagccactgaaatcagtggcttatgttgctaacgaggttagcagatcaggaattgcgctctagccggaactattacaagtggacaccctcgctacatcgaaggtta

SEQ ID NO: 1537 - DNA, 24101 bp, synthetic construct
  source 1..24101: mol_type = other DNA
  misc_feature 1..24101: note = Synthetic
tgctgaaatactatttatagaatctttgttttttaaactttctaaaattttatttttagtgattttgtaatcatcaacattaatttctaactctttatttaactcaattagtaaggtttcatccatactatttattttttcttcaatagatgaatttagcgcaatattaaaatcattttttttatttatttctttaagtttagctattgagaagacttcaaatgaaaataataaatttccttcccaattattatttgctatttcgttcctgtaagattgaattaaaaaaattgcatttgagaaattttctagataaatttcttgttttattttagtttttaatgaatctcctttttttattttcttaaatcctagatattcattttttacaatttgatttaattctttgtttaatagaattgtatcatttaaaatatctttggatataaaataattttgtgaaatagaaatactatattttaataaaagtaataaaaaaatctttattttcataagaacaaaactatatctctatttttaaattaaaaacatgagtcaaaatcgttttgtcaaatggaattcaaatttataaagtaatcattttttactaatcgtaaatcaatttagttttataaaaacgaagtttttaaaatctataaaattaatttattccatattcttaataaacacagaaggtttaacctgtattctttcataaaaagctttactaaatgctttagcattattataacctacttcctctgcaatagattcaatactatattttctaatttttttgtcttcttttaacaattgaatcacataatcgattcttaaattatttatataacttgaaaatgaataacctttatcttcattaattattttagacaagtaagtcttgttagtattgaaatcttttgctaaattttctagtgaacaatttttatttatgtaatctttatttttttcaaataaatctaggttttttagtatgttttcttttgctaaatctgacattttcccttgtgattcattgttcttttcataattattaataaaatctccagtagaatttttatttttatattcaaaaattttatgttggtttaacaaaaatttttctaaatcattttttattaattcaattttttgtttgttgttctttttatttctgtaaaataaatatatcaatagacttataattattatagagattagattggttattttggataaagaatcatactttcttaattttttaattagattttctttttcaaaaattaagtttgggatatcgaattctttatttgtttttttaaatgtatattcattattttttagtaataagctgtctactttaattaggcgttctgtgtaaataagttgtttttttatttcctttttctctttataatagtcaattaaaaatttatatgtatctatgttccagtaatatacatcgttgtgtttggtgaatattgaatccacttttttaaaatattttagagccaaatccttgtcgtttaattcttgataactttttcctatataatagcttacaaatgcaaagtctgaataatcttcttttacaaaattagcatcttgtaaaattggtaaaagtaattctaaagtctctttgtattcttttctgtaatataaattaactcctttagtggttataaatctatcatacattaattttgagccttctctttttgataagataataccttcatcaattatatatctagcggtttctagatctaaaagtgaattatatatttctgccatattatactgaaggaatagataattttcaactgatttcgttttgaagtaattttcagtttcttttaaaatatttatagcttctttgtcttgacctagagtgcttctgataattccaatttgccttttaattgcataataatatttttcttcacatcctttacaatttttataagcttttaaataggaatcgagagcttttttattttttctgttacttgcataaagatttcccaatttaaaataatataagaataataaatttggcgctttatttgtgattatagaatacattgaatcggcattttttattgcttcattaaaagggtattcttctactttaaaaccatacccttttattaaatattcgacattgttttccctctttgctttttttatataataatcaacataaaatttaaaagagtttttattttcaatattatctactaattttaatcttatatcttcaaaacttaacttttttagagtatcattttgaatactattgtttgttggataactaaattttagaaaaaatagcattattaatatgtaagttttcataaatggttgcttaattgttataaatacgaaactaaatcaaatttttatcatatcacacaaaacaattaaaatgaatttgaaattagcaattagttacatccatttgataaaaaaggactatgatttataaaaaggaagtacgttcatttgtacagataaaaaaagccaactagttttggtatcagaattagaaaataaaatttctgcaaaaaacgagattatgttagattatgattttatgctgcaagtggtgttattagtgtctattgtaattatcctttattatttggttcgcttactcaaaaaaatattaaagctattagacaagttcgaataaaatataaagaagatgttactgctaaaccttttctttacaatatagttggccactatttgggattgattcagctgtttgtaacccataaaaaaagacgagcaaaacaggaattggtagactttctaaaacaaaactatcaaacaagaataaagaaagagttggctttgtttttgtttactcgatcaaccaactaaaaaaaacagtcacaccttatacaatgttttgaagaacaaaggcatgactgtaattaatttaattaaataacaaatttatgaaaaatttattttttggcttaatggcaacggttttattttcggtaactggttttgcaaacaatggaggcgacgataattttaacgggaaagttaaaattgctacagtagaaaatgtaaatgcgcaaaaggtaaacagtgaaatgataatcaatttcaaaaccgataaagattttgagaattttacaggtgaaggtttagaaattgtgacgctttgtgatgtaactgttacggtaagtgttggtgtaggatcaacatatgctagcgcaacagttaccgctaaagatattgattgtgctactttaacagacgcaattaaaagattaaaagcacaagctttagctgcaatacaataaattaaaattatgtactgcctaattaaaattaggcagtgctactaaatctaattttatgaaaaaaagtattttcatcttatgttgtctttttacttttttaaacacaattaaagcacaaaacaacatttctcagttatatgtagaatatgagatgtatctcaattttaaaggagctgttgaatatcaagcacaattagtacttaattctaattattccttatttagatataagccatctgataaagtgtctaattataaagaagatataattgatacagagtctaaaattgatataaaaattatagacagttcctttttttatgtttttatagacaagataaaaaatgtaatagcagaggacaaaaaatccatttattctaagaaaaactatgtggtggaagaagtaatccctgtaattgattgggttttaaaagatgatataaaaatgattaacaatttatcttgtaaaaaggcagtatgtttttttaaaggaagaaattataccgtgtggtattgtcctgagatacctattaatagtggaccatggaaattaaatggacttccaggtttaatagtagaagccatagatgatgatcacgaagttgctttttacttaaaaaaaatagtttctccttttaatcatgaaatagaattagatcttactaagattaaaaagaaatactccatgaaggagtttttagagattcaaaataaagaaaaagaagagtttgaatcaaaatttgcatcaaagtttgatagaggtctacatgttaaagtagattttaaatatgatgatatagagaaataacgattttctattagtaattaacaataaaaatataaaaatgaaaaattataaaatactactttctgtactgttgttttctgtaatctcaggagtttcagcaaatacaaaagaaaaaaacagtaaaaacgaaactgttaaagaaaaaaaccaagaagatgatatttgttctataacctattctgtaaaacaaaatatcgatggtgctacgatgatcatagattatactttcacagcaactacatgtgaagaagttgaagcagcagcaatagaagcaggaataattaaaaagaaaaagtagcaataaaacaaaactcttggtattttattgctatttaaaacgtataaaaaaacaaaagaatttatagttcctatgcaaaagctttattttttattatttgtgcaacttcttttttctcaaagtgatgtttcagatgggaaaatagaatataaaatgattcttggattaactaatattacttcttacaatgcaactgttttgtttaattctaaattatccttatttgaacataaattatcagaagaagaaaagttatattctgaaaaacaattagaaaatggaatagttgaaataataaaaagagatagcgtttcacattttcttctcattgataaaaacaagaaaaaggttttagagttgatgaagattttcaatgagaatatgcctgtaatagtagaagaggatattcctgaaatgaattgggacttacaagaaggtactaaacaaatagggaagtactattgtaaccaagccacaactacttttagaggaagaaattatactgcttggtattcattagaattaccgtataacattggaccttggaagtttaataatcttcccggagtgatattggaagttaaagatgatacgaatgaagtaatgtatactgttacttctattacgataccttataatgttaagattaaggatatttcaaaaaatgtcaaaacaatatcaagaaaagaatatttgattgaattagatgactatttgaaaaattttgaaagtagatcgttgtcaaaagcaaatagaaatgttagtgctaaaataagtattaaaataaataccattgaaaaagagtaaaaacgtgctaatactgttgcataaaattgttttttttatttgtagtttgtttaacctaacagccgttttgttgctgttaggtactttttcattggctcaaacaactataaaaggaaccattacagatactaatggacaagcagttgttgcggctaatgttgttttaaagcccgaaaattcgcaaagtattattgcctatgcttacagcgatgaaaatggaaactatgaattaacaacaaccaaaacggggaactttgtgttaagctattcagcattgaactatgaaacagcaacaattgaagtgttgcttgttagcgaatcgcaaaccttgctaaaagatgcgatgctgacttataaagctattgcattaaatgaagtagtaatcgaatccagtagacccattacaattaaaaacgacaagattgtttttgatgttaaagcttttgcacaaggcaacgaagaagttgtggaagatttattgaaaaaattacccggacttaccgtggatagtgatggaactataaaagcaggaaatcaggaagtagagaaagtaatggttgataatgatgatttctttgaaaaaggatataaagtactcactaaaaacatgccttcgagtccaattgaaaaagtggaactactacagcgttattctaataacaaacatttgaaagggattgagaatagcgataaagtagctttaaatttagttctaaaagaagatgctaaaaggcagtggtttggtaattttcaattaggatatggcttggtttcagaaaatagatatgaaggtagaagtaatttgatgaatttcggaaagaaaaataaatattatttcctaacaagtgtaaataatacaggagaaacagccacaggagatgtgtctcatttaatttattcttttggagacgaaactattggagatcacgaaaagaatcaaactttattaggtttagatgtatatgtgccacaacttaaacagaaaagagtgaattttaataatgcggagttactttctctaaatagtatttttacgctttctcaaaaaatgaagctgaaggccttagcgtttataaatcaagacgaaaatcagttttatagaaacagtatgcaatcgttttttgcaaacaatacttcgtttcaaaataaggaagattttgcgttgcgaaagaatatcttagtaggttttgggaaaatagattttgattatgatatttctccaacaaaagcaattcagttggtgagtaagttaaatatatctagaaacaaggaccgaagcgacctgttatttaatgacgacttattacaggaaagactaaccagtaacaatcaattattcgatcagaaactggtatttactaataaactatcagcgacaaaagccatgttgttttcagctagagcaattaatgaaaaaacacctcaagcgtatacattaaatcagtttttgtataatgatttatttataactaatgcagataacttagctcagattaacgaaaataaaatggatttttatggagtagaagggtatttgttagatcggaaaaagaagggtgatttactagaaattaaaataggggatcaatatagaagagatatcttgcattccaattttcaactcaaaaatgcaaaccaactcacagaaatccctgtcgattatcaaaacaaaacgacctatggagtgaacgatttgtatgctcatttaaaatacacctaccgatttaaaaagattaaccttgtacctcaagttaacgtacatcagttttcaaatactctagcgtcttttgagataaaaacgacacaaaatccgttttttgttgctcccaaattaagtgtagaatatgaagtagataaaaaaaacaaactgcttgcatcatatgctttcaatagaactaacgctacaatcgttgatgtgtattctaattatgtgcatagtgggtttcgctcttttacgaaaggaaccggaacattcaatcaattggatgcttctaatgccttgttaagttatacttatggtaattggggagataagttttttgccaatacttttgttatgtatacacaaaatcatgattttttgagtactaatgctataattgcacaaaattattctcaatctgaaaaaatagtaattaaaaacagagcgtttgctaccttcagtacttctgttgattattattttagaggtattgcttctaatttgaaattgctttttggaggttctacatctaactataaaaatagagtgaatcattctagtttaagagaagtgaaaaataatttgtttcattatggttttgaattgcgttctggttttaaaggaatttttaattatcatgtgggtacaaaatgggaatataatgaagtgaaaacaacccttcagaattcttttaccaatgccacttcatttttggatctgtcatttgtaattaattcaaagtttaattttcaaatacaatcagaaagatactatttcggaaatttagacagtagtaataacacctattattttgctgacctagaagcaaaatacaccataaaagaaaataaattgtctttttttctttcggggaacaatttgttcaataccacaactttcaggaattatagtattagcgatattagtatttccagtaccgaatatcgattgcaacccagataccttttattaaaaatggaatatcgattttagaataaactacagcctgttctaaatgatgtttataaaaatgatgtatacgccatgtagctagtaatgaatgtatgccgcaaaaaaagcgttcttttaggaggacgcttttgtttgttttatattctgtaaacatatatttcttctccagagagaaacagatttacattttaccctaattggaataaaaaaaaaactattgcttaaattaaagagacaaggaaagaagatcttctattagttaatacaaaaagggttgacttaataaaagtcaacccttttcgtacttataaaattttatttataaggtagctttatgatttgtaatagtagtaataaaagtgtctacttcttcaagttctttattaatacgttctaaatcaagttctttttctagtaatgctacagcaccgtaactttctttacgattttctagtaagaattttttgtactctaattttactttctttttaatttcgtcgtctttagtttgaccttctggtaaaacactaattatagtatctaccgctgaaatttcagctaaaacaccttgtagaatagcttctacttctaatgaagtgctggcgtatttatttgttaaacgttcctctgaaatttttttaaaagttaattctgctttctctttttctgcccaagatagtaacacatcgcaatctgcaatttgtgttacgttgctaattgaataattcataatttaaaattttaggtttttattatggtatcattcacaaaccaaatgccaacgtgtatgccaaaattaagtttaccagaaatttaactttctgtaagaaaaattgtaaattaaggttaaaatttatacgaaatgatttcttagttcgttatcctagcttttgtaatttattttttaaaatttcttcttccttttttaaggtttctaatttaacttcatattctagttgcactaaacttccatttttttctacattaatttttgttctatccttcatcacttctaatagtagatctttattatggtttaattttactggatttgattccaaataaagcattacttttaatcgatttatgttaaaatcatgtttcttttttatttcatttaattttgtgacaattattaattggttctgtttatttataacaagtaagtcttctaaaacctttttcttttgttcagttttttcatgtaaaaaaggaaattgttttttccagatactatcaggttgctgaacaaatgttagcatttccgctagttttaatttggacgtggtaggtaaatcacgtttgccagtttcatacattgcccattggcttctggatatttctaatactgaagcaatctcttcttgtttcattcccagtatctctctaatttttactttttcttttttcatttataattatttactactgaataattcatttctttattaagattggaacgtgttttatctaaattgtgtgacatttctctttttacttttattttgtcacaaaaattgtgacattttatattttatttcaagaatatcacaaaaaccgtgacttttttttcaaagagtaaagaaagtcacaatgtttttttaaatatgaataatcaaatgtaggaaaccgtaagctacatttagttgggttttataattttaaaggaaataaaataactataggatagaaaataaatcagttgtttttggaaaaatttgaaaagccttttatttactacattttataaaataattttttctacgtatttatacgtagaaaaaacattgaaaaataagtataaatacgtattgacaggttgagaaaaacgatgtaagtttatacaattgttgtttttacaaataaaaaaagcgacccattaaaggaaataaaaaagccccgtattgaaagacgaggcgacttaaatgttttcacaacggaataatccttattgtgaattgcttcaaaattgtactgcaatatacaacaaaaaaaattacattgtattacggttaaccgtaaagaagatgattttcttttaattaaatttaaaaattcattaaatagcaaataatattcgattataaatgaaaaaaatattaggactggatttagggaccaatagcattggatgggcttttataaaagaagccgaaaatgataatgaaaaatctgaaatagttaatacaggagtccgtattgtacctcttactacagatgaagagacggattttaaaaaagggaatactatttcaataaatgcagatcgaacattgaaacgaggtgcaagaagaaatttacagcgtttcaaacaaagaagagataatcttttggaaattttcaagaaaataaaattcattccaaataattttacatatgcagaaacaggaacagctactacattttcatcttatgaattaagagcacaagctgctaatgataaaatatctaaagaagaactggtaaaagttttacttatgattaataaaaaaagaggatataaaagcagtagaaaagcaaaatcagcagaagaaggagaagctatcgatggtatgaaaatagctaaagaattgtttgataataattacactccaggacaatgggtgtttacttccttatctaaagggaaaacatttatacctgatttttatcgttccgatttacaaaaagaattagaaaaaattattgcattccagaatcagtttcatcctcaaataattaatgatgaactattcgaagctattcaaggaaaaaacagaacatttacttcacaatatttttcaaaaacattaaatattcctttggtagaaaataaaggaacaaaggaagaaaccaaattgcaacattataaatggagaaatgaagcgataagtactgaattagacctagaaataatagcctttatcataaccgaaattaataatcaaattaataaatctagtggttatttaggagcaattagcgatcgaagtaaagaattgtattttaatcaagaaactgtaggtcaatttttatgccgacaattaaaaaataataatcatgcaaaactaaaaaatcaagttttttacagacaagattatttagatgaatttgaaaaaatatgggaaacccaagctaaatttcactcagaattaaatgaggatttaaaaaaagaaataagagatattactattttctatcaaagaaaattaaaatcacaaaaacacttagtcagtttttgtgaatttgaaaaagggcacaaagtcataccaaaatcgtctcctttatttcaagaatttagaatatggcaaaacatcaataatattgttgttaaaaatgaaattacaaaagaatcctttcttttagaagaagaattaaaacagcaactagcacaagaattattttttaaagaaaatttttcagatagtcaattcattactttttgtggtcttaaaaaaactgattatagtgttaattttaaaaaaatagaagggaatagaaccaatactgagatttacaaagcttttgaaaaaatattggttgttgaaggttatgacgaattggatatatcaaaattagaaccgttagaaataagtaaagtatttaaaacggcttttactgatttaggtattaatacctctcttttagattttgaccctaccgtacaaggaaatgattttgataaacaaccatattatcaattatggcatttattatatgcagctgaagatgatgataaattaaaagaaagtttaaaaagtaaatttggttttaaagaagagcacttgccttttcttttaaatgtcaagttacaagccgattatgggagtttgagtgcaagggctattaagaaaatattacctcatttaatggatggtcatatttatgacaaggcttgtgaacttgttaggcttgacaatattaaaaatttaactaataaagggttagaaataaaagaagctaaaaaaattgcgggttataatcattcttcttctttgactaaggaacaaaataatgatagggttttaaaagatactttagaactacttaaaaagaatagtttgagaaatcctgtggttgagaaaattcttaatcaaatgattaatgtaattaatgctattataaatgatccaatgatgggtaaacccgatgaaattcgtgtggaattggctcgtgagttgaaaaacaacaacgaacaacgcaaagaaatgactaatagtattaacaaagcaactgcggagcatgaaaaaattagaaaaatattacatacagaattcggatttccaagagttacccgtaatgacatcattagatataagttatggaaagaaaccgatggtatttctttatatactgggcaacccatagaagcttctaagttatttaccaaagaatacgatatcgaacacattatcccaaaatcacgtttgtttgatgatagcttttctaataaaacaatttgtgaacgtcgattgaatatcgataaaagtaataaaactgcttatagttttttgaaagaaaaattatccattgaagaatttgagcagtttgaacaaagagtaaaaagtttttacggaaaaattagtagaacaaaacagaataaacttttaatggcagaccatgaaatcccagaaggattcatagaacgtcaattgagagaaacacaatacattgctaaaaaagcaaaagaaattttactagaagtttctagaaatgtaaccactaccataggaagtgtaacagataaattgcgtgaagattgggaactagttgaaataatgaaagaactaaattggaacaaatatgacaagctaggtttaacttatgaagataaaggcaaaagcggagaacgtttatataaaataaaagattggtctaaacgaaacgatcatcgtcatcatgcgatggatgctttaacagtagcttttacaaaaccagcatatatacagtatttaaacaatctaaatgccaaaacacaaggtgaacaaaaagcaaaatctattctaggaatagaaaacaaacatctctacagagacaaaaacaacaaacttagatttattgctcccatacctaattttagagaagaagcaaaaaaacatttagaacgtattttaatttcttacaaagccaaaaataaagtagtaactaacaataaaaacagtattaagataaaaggagatgtactagaaaaaatacaattaacgccaagagggcaattgcataaagaaactatttatggaaagttgcaacagtatgtaaccaaagaagaaaaaataaatgcgagttttgatgaaaaacgcattcaactagtagctaagaaacagtatcgagaattgctattaaagcgactgcaagaaaatagcaatgatcctaaaaaagcctttacaggtaaaaacagtttagcaaaaacacctatttatattagtcttgaaaataatagtgtagttcccgagaaagtaaaacttgtgtggttagaagataattacaccattagaaaagacattacacccgacttaaaaattgataaagtaattgatgtaggtttaaagaaaatacttcaagcacgtttagataaatttggcggagatgctaaaaaagcatttgttaacttagagggaagccctatttggcaaaataaagaaaaaggaattgctttaaaacgagttactataagtggtgtgagtaatgcactagctttgcatactaaaaagaaccattttggcaatgaaattttagacggaaatggaaaaccagttcctgtagattttgtaagtacaggcaacaaccaccatgttgctatttatcgtgatgaaaaaggcaacttacaagaagaggttgtttcattctttgatgcggtagtacgaaaaaatctaggattgccaataattaacaaaaatcatgaaaaaggatgggaattcttgtttagtatgaaacagaatgaatattttgtttttccttcggatgattttaactctcatgaaatagatttgataaatcctgataattaccatttgattagtccaaatttgtttagagtacaaaaatttacaataaaagattacttctttaggcatcatttagaaacaacagtaggggacaataaggagttaaaagatatttcgtttaaaagagtaggattgaacggaattaatgatattattaaggttagacttaatcatttaggtcaaattgtacaaataggagaatagtaatcatgatcaaacgcaccctcttttttggtaatcctgtctatttgagtactaaaaacaaacaactagtagtgtcttaccctgataaggaacaagataccaagacagtggctatagaagacataggggttgttgttttagaaaatcagcaaattacgattactaatggtgtgctaaacaaattgacgcaaaacaacgtggctataattagttgcgatacacaacacctgcctacaggtttattattgcctttgcaaggacatagcgagcaaaccgaacgctataaacatcagataaatgcctcggtgcctttacaaaagaatttatggcaacaaactattagtgcaaagattttaaatcaggcgagtttgttaaaagaaagaagtatacccatgcgaaagatggaattatgggctaaggaagtaacatcgggtgatgctttaaatcatgaatcgagagctgctgtttattattgggaaaaactcattcctattcctcattttacgagaggacaaaaagggatagcccctaataatttgttgaattatggctatgctattttaagagcaattaccgctcgtgctttagtaagttctgggatgttgccaagtctaggtatttttcatagaaacaaatacaatgcgtattgccttgctgacgatattatggaaccctatcgcccctatgtggatttaatagtttgtcatattatggatacggaagacaattatgaggaattaaccgttgcacttaaaaaacagttgttgagtattgcaagtatggatgtggtgcttgatggcaaaagaagtcctttgcttgtagctatgagtcgcacaaccaattctttgtatgaatgttttgaaggaaaggctagaaaaattttatatccagtttatggggttttataatgcttcccgataagcgtcactttgagtacgaagcgtattgcgaagttttgttagactatctatgcaaaaaataaggggcaggaaaatgattcctaagaagaaagtcaaaatttaagtaataactatgtatgatactcattatacacgtttaaaccaatatagaagtttgtggatattagtcttttttgatttgccaaccgaaacccgaaaggaacgtaaaatagctgcaggctttcgaaagagattgctagatgatggttttacaatgtttcagttttctatttatatgcgtttttgtgccagtagagagaatgcggaagtacatacgaaacgaataaaaaatagtttacccgaacatggcaagataggagttatgcaaataaccgacaagcaatttggaatgatggaattattttatgggaaaaaacctgtggaaaccgaaaaaccttctcagcaattagaactcttttaggaaaactagcatttaaaaaatagactatattacttcatttcaaggacttaaagtattgttttttattttctagccaatgtcataactcgcaacatatcagctttttagggcttgatatgttgagaatcatgagtaaaaatacaattttgaaagcaattcacaacggaatgcttggcgtaatactttggtactagttgagaatcatgagtaaaaatacaattttgaaagcaattcacaaccggctcatcaaaactgcttcgtctgaaattgttgagaatcatgagtaaaaatacaattttgaaagcaattcacaactggtcaaagtcattttgtctaaataaattcgttgagaatcatgagtaaaaatacaattttgaaagcaattcacaacacctggattgacgttgaaacaggagaaaaggttgagaatcatgagtaaaaatacaattttgaaagcaattcacaacaaattgtggaaagggtatttgatatagttggttgagaatcatgagtaaaaatacaattttgaaagcaattcacaacgggttatgattgttggaatggcattaaagagttgagaatcatgagtaaaaatacaattttgaaagcaattcacaactattaatgactgcttcagttgtaccacaaagttgagaatcatgagtaaaaatacaattttgaaagcaattcacaacttaactgttaaattttgaattaaaatacggttgagaatcatgagtaaaaatacaattttgaaagcaattcacaacataattgtgaaaatccttttttttgggttgttgagaatcatgagtaaaaatacaattttgaaagcaattcacaaccattctttttttgcttcatctgaaaaattagttgagaatcatgagtaaaaatacaattttgaaagcaattcacaacgtgtacagcctgttacagctttacccattagttgagaatcatgagtaaaaatacaattttgaattatcaatcatcgaatacttttaaaaaataataggcaatgagataaagcaattcacaactcctccaccaccttgcccgtacatcaatccgttgagaatcatgagtaaaaatacaattttgaattatcaatcatcgaatacttttaaaaaataataagcaatgagataaagcaattcacaactgcttttccaatgctctaataccatcttgagttgagaatcatgagtaaaaatacaattttgaattatcaatcatcgaatacttttaaaaaataataagcaatgagataaagcaattcacaaccagtactctaaacaagaagcattagcggctgttgagaatcatgagtaaaaatacaattttgaattatcaatcatcgaatactttaaaaaaatagtaagccatgagataagcaaaaaaagcgttcttttaggaggacgctttttattattttatattcctttttttaagcttatttctgctgccattttcatagcattataagtgtttaaaacttttcccgaggtacacaattcagagaaagaaaccatttcattttctgtccctggtttaattacttttttgttaatagtaataccagatgttaagataatttcttttatttcttgtgctgttaaatttggatgatagagccaaatcaaagcggctgtgcccgagaccattggtgcagctaatgaagttcccgaatcggtttcataggtgttgtgttttctacaaacatatatctcttctccaggagcaaacagatctacattttttttgccataattagaataaaaagaaacaaaagtgctatccgtttttttgtttatagaacccacattaataaagttgtctataatgtcttcttctttagaataatcaaaatcagaaggataaaaagaatttacgtctatattcatagcatcattgcctgcgcaatgaattaataaaacccctttggatgctgcatattgtaaggcttcaaaaacccattttttatgtatagaaaattcttttccaaatgacatattaataatcttggcaccgttatcaaccgcataataaataccgtttgcaatatctttatcgtgttcacttccattatttgcaatacaaatgggcattattttaatattattagaaaagccttttatacctatgttgttttttcggttagcggctataattccagaaacttccgtattatgatttaattgcctgtcgtaaatgttaacatacggatttccataattatgatttaagatattcacatcatcaccgatatattttctctcttgtaaatgaatattaatgttagtatttacgattgaatcaaaacttttttcaagttcgtctatttgttcgtatgtaaaatgattcaattgataaaatgattttaaagctaaaactaaggctacaaaatctgttgcatttgtgtttttaatatcattgaatgttcgggtatcatttttcttaattaggagatagatactatcgagttctttgtatttaaattggttctttgggtaataatagaacaaactatctttggctaaattaaatatcttttttccatattttaaggaatttaaataggttgtgtaataattttcatagctagtaaaatattctaacgctttttcatattcttttttttcaaatggacttaaaagattggcatcgtataattttttgttctctcttataatttttacatattcataattattcttaggagtatgatttcctccttttgtaccaagaaaattccagccattataatcgtctatatatccgtttttatcatcgtctattccgttatcaggaatttcgtttacattaacccaaaattgaccttgtaaatcttcatgattaaggtcaatttgagtgtctaatgtggctacaataatttgttctttagtttttttaaaattttctctataccatttttctaatgaaattccatagacaccttctttcgtaaagtctttttgataccaataaatatcatctggagtattgttgttttgaatctgtttgtcagaaacggagcaactaaggagtagtagtggtaagataaagaaaattttataggacatgttcgattaagttatatttattcttttttgcaaatagcagaagagttagttggtcttactgttgtgttattggtattggttgttgggtcattatcatctccatctaaatatagtccgcccactataacttttggatttgataatttagcaatttggaactttgaaatttggaactttctttgatttttcatgtttttttgttttaagaatttccacaaagatataatgggattctctagtaatagtgggtaaaaacagtgaaattgccccagattctggaatttaggttgctaaaaaagaggtgttttttttataaatcatgatttttgtttttcttctactttatttaattctttaatgaaaaaagaaggttttaaacctgttgttttttcaaaagcagctgaaaaagaatccgaattattaaagccagcttcttttgaaatggcatttatggtataatttttcaaaagcttatttgtctttaattcttttacaatataattaatgcgaagctggttcagataattaggaaacgtttttttataatttacattcactactttagataaatacttactattcgtttctaaaatggtagccaatttttcaagagtgaggctgctatctaaaaaaatattttctttttcaaatgtttttaacttctggagaatgttgtcaaaaacttctaatggcatgccaatgtctttaatttcctttttatcattggaaacaggaatgtttttctccttgtctaaatgtaaatcctcaatgattttctcaaagcgttgcttcagttttttctgttttttatattgaaaagttaaaaaacctatcaatataagaataagtaaaaaggtaatgactaaatatttttttaaccaacttcttttggtgtctaaggaattaataattgcttctttttcttgtaataattgaggaatttcgtatttgtttttcaataattctttgtaactgttgtttttagtttgcaaaatactgtcgatagttacaaatcggttaatatattggagttgtttttgtaaatcttccttttttttataatactctattaagtatttatagccactaataaattttggatttaagatattaggattcgtaaaaagagagtccatttttatataatttgtagccgctaaataagggttgttcatgccttcatagtttcggcctttgtaataatatgctgcggctaaatttccttgtaagtcgcatttttggagtatgttgatagttttattaatactatcaatacttttttggaagtttttgttttccacttccacagcagcttgattcagaatgaacaaactattataacattcatagtgattttttttagttaatttatatcctaatctattataataggaagaagagtctaattgatgaagatctttataattactggctaaagcaaataacgaccaataatatctttctttaccatcaaaacttttgctgtcttggtttgctctataatagtctgatacttttttgtaaagaataatactttcctcaaattttcctaaatcttcagattttatggttgcaattttttgtaaaatatcaatttttaaaatatcgttttcgttttctgggttgttatatatttctaaatataattttaaagcatcaatttttttatccaattcataatttaaaatatctgctttgtttaagagtgttcctaatatataagtagtatttccagtttttacaaaatacttataggtgctatcattaaaagacaaagcgagtttgccatgatgcatcttttccttaaggaaataactatatgctatttcattgtcgttcttgttttttttacctctttctaaaagttcttctgcacatttttgttttataagagtatcggtattggaatcaaaaaagagggagacgatttcttttaaagatttttttttaaggtcgtggtcttttatttgtccatgagagaaatgtaaaacaaataaaaatggtaacaataagaaagatttcatatatggctgtaaaactttttcaaaaatacagcttttgggtaaaaaaaagcaaaaatacactgatttgttttacaggtagttaagatttttttttacctaaattcaagaatttagggtgtaaattcaagaatgtaggtagctttagtttgtaaggattattttcctcatatacatttgctttaacaaaataacaaaacgtttttgtttggttgtaacaattcttgtagctacgaatttgcggaagtttgtctttcttccaaagaaactataaaagacactagtactttcattttaatgataggtttaggaagtacttgtaagacaaaatctgtctataggcacagtcattatttgctatattctgttttataagaatgaaaaataggactgtaattaatttaactaaataacaaattatgaaaaattttttaaaattaggattggttgtggttggttttacaatggcaactcttgcttctactgaaaaagcttctgctgatatttctagagatgattctttagttgtaggtggagcaggatgtgttggagaaagtggaacttgtggaagaacttcaaacggaactactctttacggtaaatggagagaatggtaaaaaaccgatttgcaataactatcgttagatagttattgctttttttatataactttaacttcatctaattatgtcaaacattttaaaaatatttttcgttgctgtagctctttttttattagcaatagcaactacagaaaaagtttttgcaaaagaaagaacaattgaaccttgccctggcggtagaccaggtactacctgttatataacagcaaacggaacagtcgtttatcattaattttcataaaatacgcaaacagcttatttgtttgtggatttaatttttaacaaactatgacaagcaaaaagctattatatttaataattgtattattctcaatatattcctactctcaagaagtgcatctaaaaggaatcgtaaatgataaccaaataccagttgctgatgttctaattcaaattataagtgctaataataaaacaatagcaataacaaatgagaatggtttgtttgaaattaaaaattttaaaacagcatcagattctataaccatacttttatctaaaacaggatatattgaatttaaaaaagaaatagctttacaagatgatttaacaaatttaaggtttgatatagaaaaagaaagagttgttgaactgaatgaagtaactgtaaatgcaagtaatactatagttaaatcgaataaaacaacgtatagaattgatagtaaggattttataaaaaatgcaaaatcagataaagtattacaaacactccctaatgtatcgatatcaaattcagatgttttagtcgataatagaaaaaaagctaccatttttattgacgggatagaatctagtttagatgaactaaaacgactcgatgttaaagagataaacaaagtcgaagttatttctaacccagctgcttcttttggaacagatcatataagtgctgttgtacaagtcattactaaagttaaaaatgagaagtttatcaaaggcgaaatagaatcttatgcaggggtaagacttggtaagttcggtattattccagcaatatcaatcaaaactaagaacgttatttttaaagcattttatagttatagtacaaataatcaaaatattaaatctgatttaacaagaaacgaaaacaacaatttatttgttcaaacaaatcagagagatgtaaaaggatggcaggatttttttaattctaaaatgaagataaatttaaataaaaaatcttcaataaacttaagtggaaatttgtttggttataagtttgatggcagaaatacaggtagttatcaagataatacaaacctgtttacttataaaatagatgacgtagaaaaactaaaaaaatggagtgtatcatctatttataactacaactttaattccaaaagtaaattgttattaaaatttaaatattttgattataaaaacaagaacgaatctatttacacggcagatacgcaaaccccaattgtaaatactatattttcagataccaaagaaacatctgaagaaattgtatttgagaagaaggacgttaaaatattacaaatgcctatggaatatactgtaggatataagaatatctatcgaaaattttactttcaagcaaataattttgatttaaatcaatatgttaattctttgtatatcaatacagatttagaaattaatgataaattctccgtttttttatcatttgcaacagattttacaaaaaacaaaaatgctgtaataaatcaagattatacttcgatattgcctactttttctgcattgtataagtttgataataaaattaacttagttttagattattctcgtaaaataactagacccagtgctaattatttaaatccgcaagccatattttttaatccaacattcagtttgcaaggaaatagtgacctgttaccagaagttcgtaatatctatgaaataggaataaacaaaagatttgagaaagggagttatgtttcttttaaagtctttaatgagtatacacccaatgcgattatggaaacttttataaacgataataatagtgttataaactcatatgcaaacattggtaaagcaactatttctggagcgaatataagctttaatacaactgtttttaaagttttggatgttaaccttaataatggattgtcttacagtaagtatatctcaaattctgagacttcattaattaaagaaaacagcggtttttcttttaatagtaatttatatctttccacaatggttaaaaagaaagtctccctttcgttaagtggcaactttaattcaccaaactattctttaatatctaaaacatatactaatccattatttacgtttgaatcggagtctacttttctaaaagatagattaaatgtaagactttcttattttgacatttttggattaataacaagaacaagggatgaaatttcaagtccccaattcaatcaaattagtataagagaaaatagaattaccaattttaccatttctttaatttacaattttggaaagacatttaatgataggtttagtaatccagtaattaataacgatgatataataataaaataacccatgcaattgtataagaaaacaatacaaatagtttactattttttgatactatttatttcatataccacaatgaataaatttctttctattgaatcgtttcagacgaatcttctaaaaacaggcttctttgaagatagtacaacaatatatttatcctatttgatcatattaactgaatttgttgccgttcttattttaatattttacaagaaattaggcgcattattaatggcatccatgttgtctgtttttacgatctatattctaattttaagattttatggaagatatgaagtttgtggttgtggaggagttttaaatggactacaat

SEQ ID NO: 1538 - DNA, 24095 bp, synthetic construct
  misc_feature 1..24095: note = Synthetic
  source 1..24095: mol_type = other DNA
tcttaatgattgaaaaagatttagatatacaatttcaagaagccgttgaaacagcttcgcatatgacgcaagcatccttaccccaagatgtacaactacgtctttatgcctattacaagcacgctacatttgacaaaactatattcaatatttcagagaatgccgatttaagaaatgcttttaaaacaaatgcttggattcaaattagccaccttactcaagacgaagccaaagaacaatatattgaattaatacattcgctatcaaagtaactgtaatactcacatgaaatcgccatgattcaaaatcacaaattaaaatgaagaatggcgataccatgttcctataaagaacaaatgtaatctacacatgaaaaaaaacacttttctattatcaggcttactcttcgtttctgtcttaatttcttgcaatgaaaaaaaattgacagaagttgttgaagtgccgctaccatcggtacaagaaaaagtaacattaggaagtccaaatgatgcaaaagccagtgaggggtcttttcaactagaaaaactgccctttgcttatgatgctttggctcccgatttttcggcaattacattagagtctcattacgggaaacattatttaaattacaccaataatttaaacaaagcggttctaggcaccgaacttgaaaatctaactattgaggaagttttaaaaaaactagacataaacgaccctctgatacgaaataatgcgggtggttattataatcatggtttatactttaaatgtatgactgcaaaaagcgatgcagaaccaaaagatactttagctggaacaatagcaaaaaatttcggttctttttctaattttaaaaccacttttaaagaaacagcaaccaaacaatttggttcaggatggctttggttagtcgttgataaaactggtgtacttcaattgactacaacccaaaatcaagacaatccattaatgccaaatgtgcctgttgttggatttcacggaacgcctattttaggaattgatctttgggagcatgcctattttatagattttcaatacaaaaagaaaaattatattgatgcctttttcaatcatatcaactgggaagtcgttaacgaaaattaccaagccacttttaagaaatagataatactaaaaaagctgataccgtttaagtatcagctttttttgtaaattgaatccaatcaatcaaacctacattgataaataaaagattctaaaggagcaatagtaattgatgctttaccttcgccattaacaacttgtaattggattgtactttttccatataattggtcttttacagtgtaacttccgtcttttaacttccatttaccaataatatcggcagggattttcaattcaaaagtatttgtggattctgatgaaaaattagtaagcacaattaatctttgagtatccgaccagcgaacaaaagaatacacatggttgggatcatacccaagacccgcttgacggtttacttcttgaagatcttgaaattgccccattactgccgaactttttgcagccaaattcaataatcttttataaaaaccacgtaaatctttttcgctttgcgataatttacctccatcaaacgcaccgtcgttcatccatctttgatgatttggcacaccaacgtaatcaaaaatagatgttctggaatgtgtcccgaaacctccgttttcatttcctgcctcccctacttcttgaccaaaataaaccataattggagccgagcttatcatagttgaaactaccatcataggtttgcctttttctggcgatcctgcaaattctggacttgccaatcgttgttcgtcatgattgtctaaaaacttcaacatgtggacatcaatatcggctaatcctttttgaatataagacaatccatcgggaggtgttttcccttgaataacatctttcagtttatcataggtttccactttatcatataaataatccattttacccaaatgaatgtaattgcggtattctttcggattgtacacttcggccattaagaaagcatcgggattagcattttttatggctgagttcatataactccaaaactcgtaaggaaccatttcggccatatcatatcgaaaaccatcaacgcctttggctgtccaatacaaggcaatatctctgaatttaatccaagagctaggcacacttttgtctttccaaaaggcataatgttctttattcgataatttatcatagccagccggcaattctggaaagtcctttaagccatcaggacgaattccgtaatttactttgaccgtttcataccaatcgtttttatctggttttgccaaacgcgaaccgttacccgtccattttgctgggttttcgtcaaatttaccatcaataagtggatgagcttccccgtttaaaggtgaatccccacctggcaactgaaaaggtgtattgggtatgtaataaaaattattatctcttttgtattctaccgtaacatcatcatcggcaccaaaatctctcacgcctttaggattgcttttcccttcgtatttacgggcaatatgattgggaacaatatcaataatgaccttcaaattggcttcatgcgttctttttataagcgcttcgaattcttctaaacgtttctctggatgtacagccaaatctggatttacattataataatcttttaccgcataaggagaacccgctcttcctttgaccacttcgggatcatcataagaaactcctatgactgtataatctcgtaccactgcatgatgaggaacacctgtgtaccaaacgtaagtaactcctaaatctttaatttcatgcaatgcttttgcagtaaaatcattgaatttccccactccattttcttcaatggttccccaaggtttattggtggtgtttttatttccaaacaatcgagtaaaaacctgatacactacttcctttttttcggaaacggttactttcttttctgagttcatttttacatctttagttttacaggcaattgccataagcaatatactcattcctgccacaaaggttgttttctttagcatattaatttattttaaaaaattgaaaccatttttaatatttaatttcaattatcagtttataaatttaatctttttttgaaaaatagtttagaaaaaacaattctttcaaaccctttttagaccaaaaatggcactataacgagatagtacgagacaatgtttataacttaaattctcaatctttcaaattttacacaccaactctaattatgtgaatccagcgttaaaaatctctttctttgtgccgttaggcactaaatattagtagtgaattacatttgcaataagcacaatgtcccgtaggtactatacattttcacataatttagatacgaaaaatgattgtttagtccctaaggggacaaaaaagcggatgaaattgtttttctaccaatatttagtgcctaacggcacattcgaacccttaattcgcattaattataaataaatcctaatatatataaggattgactcctttttcataaatttaccaaaaattaaatccattgaagaaatctttaaatttcataacctatactttagtattcttttgcgcccatattattttggcacaagctcctaaaaaaataaatattgaacattctgattttgcagatgtcgatcaactcaaagtcccagatgcccttttactaacgggaaatgtacgtgtaagccatgatggtgtcgttcttacttgtaatagagcgtatttttttcaaaaggaaaactacctaaaagcttttggaaatgtgcaattggttcaaggcgacactttattcctgaacagtaaatacgctgaatatagcgggcaattaaaaaaagcatttgctactggcgatgccgttatgagctccccagatgcaactttggcgacagacaccatcaattttgaccgaaacacacaggaagttttttataatactcaaggaactattatcaacaaagacaataccttaaaaagcaaatcgggtaggtattatgtagcgcaaaagaaattccagttcttaacagcggttacccttaccaataaaacttacgaaatcaagtccaatcatttggattattacagtaattctgggcattcctatctttttgggccatccaccattaccagtaaggccaattatatctataccgaaaaaggcttttatgacactaaaaaaaatctggcgcattttcttaacaaatcctacatcaaatatgatgaccggattataaaaggagatagtttgtattatgatcgaaataaggaatttgcgtcggctacgcgaaatgtaaaaattaccgattctgtcaaccgtggggttatacgaggtcattatgccgaattgtacaaaaagaaagattcgatgtttgttactaaaagagccgtggcggtaaactttgtagagaatgactcggtatatattcatggtaaaaaacttatggttactggtaaagaaggagaccgcatcattcgcgcttataataacgtacgtttttttaaaattgacatgagcggaaaatgtgattcgatacattctcgttctaaaacagcattgacaaaattgatcggaaatccaatactctggaatggcgacaaccaaattaccggagatgtgatgcatcttataggagataataacactcaaaaattggattcgctcaaagtgctaaacaatacttttctcgtctcgaaagacactcttggaaccggttttaatcaagtcaaggggcaaaatctatttggaaaatttcaagacggaaaactccatgatgttgacatcataaaaaacaccgaagtgatttattatatgcgaaatgacgccaaagaactcatcgggatcaataaaaatgtcagcagcaagatcaatattatttttgacaaaaatgcggtagaaaccatcacttttttcaagcaagtagatggagacatctatcccgaaaaagatttacccgaaaacgcaagaacccttcggggactcaattggcgtggagacgaaaggataaaatctaaagacgatatttttagcgaagaagaaaatgccgaagaactcaaagtcgctgcagcaaccgtgaaagacaaagcaaaaaaagagactccaatgaaaattcgaaaggaaacattgaattatgacaagaagagtcggaagaagtgatcagttttcagattgcagttttcagtcgcagttttcagttttcagtctcgagactttgaaagcagttttcagttctcacaactaaacttttaaactcctaaactttaaactcttttaaacttttaaacttttaaacttctaaacccctaaacttttaaacctttaaactcttaaaaaagtgaatcccgatttcataaaataccaagcacaaacctctccttatccattgggtatggaagtttcgcatgcaataggttcctatattttcgatactaataacaaaaaatatttagattttgtggctggtgtttcggcttgtacacttgggcatcaaaacaaaagggtcaatgatgccatcaaggatcaattagacaagtattcacacgtaatggtttatggcgaatattcccaaagtcctgccgttgagtattgcaaacttatggcctcgctcctgcccgctcctttagacaaaacctatttggtcaattcgggtaccgaagctatagaaggtgctttgaaactagccagaagaactacgggaagaagccagttaatttcgtgtcacaatgcctaccacggcaacactatgggatcgatgagcgtcatgggatttgaggaacgcaaacaagtcttccgtcctttaattcctgatgtcgattttataaccttcaacaacgaagccgatttagagaaaataaccaccaaaactgccggaatcattctcgaaaccattcaaggtggggctggatttattgaaccccataatgatttcctcaaaaaagtaagagctcgttgtaccgaagtaggagccatgatgatactcgacgaaatccaaccgggttttggaagaacgggtactctttttggttttcaaaactatgatgttgtgccagatatagtcgtaatgggaaaaggaatgggtggcggaatgcccgtgggagcctttaccgcttcagctgccatgatggatttattgagcgaaaacccaaagctaggacacattaccacttttgggggacaccctgtcattgcgtcagcttgcttggcaactttgaaagaattaactgaaaccaacttaatggcagacgctttagagaaagaaaagctctttagatcgcttttggtacatcctttgatacaagaaataagaggcaaaggattaatgcttgctgcaatgacagcgagtgcggatattaccaatgaagtaatcctaaaatgtcaagacagaggtctcattttattttggttactctttgagggatgcgctatccgaattacaccaccccttaccatttctgacgaagaaatcagagaagggtgcactataattctcgaagtaatgaatgaagttaagatttaagatttttgattgatgattaacgattttagattttttagaacatagaataaagaatatagaacatagattttagaataaagattttgtaaatttgatattgatattgatattgctattgccattgagatcgccatcgccattaatcttgaaatcttgttaattaaattgttcacaataattaaaattcttcctcacaacaacagttcgatttcctatttttattttaggataatttaaaaacagacagcatgcaattaagcgacgaagaagaagagtataacttatccctatccaaatttgagtctatgttgaaaaccaacaaagtcctcttttttgactccgaagaatttgaagaaatcattcttcattatctcgacatgggtaagacagccttggccaaaaaagccctaaaactagcactagatcaacaccctaaatcaaccggactaaaattagttcaagtggaaatgttgatctatgatgacaaactagaaatagccgaaaagctattgaatgagctttatgccatagaacccaccaacgaagagatctatattcagaaggccaatatctgttccaaaagggatcaacatgaaaaagcggttgaaatgctgaaaatagcattagattataccgatgattatgctgatgtctacaacttaattggaatggaatacctttttatggataatcttgagttagccaaagaaagctttatcaaatgtcttgaagaagatttcgaggatcagtccgcattatacaatgtggtgtattgttttgaatttttagatcaaaatcaagatgccattgtttatctcaataaatacattgaccaaaacccgtatagcgaaatcgcttggcatcaattgggacgtttgtattatggcgtaaaagaatacgaaagtgccattcgtgcctttgattatgctacgctaatcgatgatgagtttctaggtgcttttatggaaaaagcaaaagcattggaacgcttaaaaaaatatgaactcgccatcgaaagttacaacagaacaatcgaattggatgatgctacctcttatgccttactccgaataggaaaatgctatgagagattaggcaataaagttttggctctaaaatactttaacaaaacagttcatgaagacccgcttttagacaaaggctggattgccataaccgatttttacgtacgccaaaaaaacttccaaaaagcattgttttttgtcaataaagcattggcaatagacaatcaaaaccgtttgtattggaaacgttttgcctctataaacaaacagatgaacttctttgaagaagctgaatttgggtatcgaaaagcggttgaatttggagattaccaactggacacttggttgttttgggttgatattcttcagtttttgggtgagttcgaaagtgccatacaaaccttattgcaagcgtcagaatattttccggaagatcatgaaatcgaataccgtttggctggattgtattatatgatttccgacaacgtaaaagcaaaattccatttaagcaatgccttgcgtttgaattctgaaaacattcaaatattcgaagatttatttcccgtagtttgggcaagaaaagtagtccaaaattacattgctaaacacagaaagcaatagataagtgagtttcaaaaaaaaaaaaaaaactgacacaaattacactgattagcacaaatttcacaatttaatctgtgctaatttgtgtaatttgtgtcaaaaaaaatagcaatgttgaaaaagcgttttgggttactgggtcgtaacatcagttattccttttcaaaaggatattttacagaaaagttcagcaatgagcattttacggattgttcctacgagaattttgatattccagaaataaacttttttacggaattaacaaaaaacaatacggatctcagcggattaaacgttactattccttacaaagaaacagtaattccttttttggataaattgtccaaaaacgcttctcaaattggagcggttaatactataaaattcaccaaaaaaggaaaactaaaaggttacaataccgattattacggtttcaaaaaatcattgaaacctttattgcaaccgcatcataaaaaagcattgattttaggtacaggtggtgcttcaaaaggagttgcttttgctctagatcaattaaaaatcgcttatacttttgtctctcgcgaggccaaagacaactgtatcgattacaagcgaatcaataccactacatttgacaattaccaaatcattatcaactgtacaccggtaggaactagcccaaataccgatttattcccgcttattccttacgaattctttaccgacaaacacattgcttacgacttgatttacaatccagcagaaacccaattccttaaaaaagccaaagcacaaggcgcacaaataaaaaatggtttggatatgcttatttttcaagcagagaaagcctggaagatttggaataagtagactcgttacactttagatttataaagcagaaaagccctcaataattgtgggcttttctatttaaataaatcgctgtgggttccagttcttaccagtttaattattttactctcatcatcctgtaaccaaattagcaaccagtctggttttatatgacattcccaatgttctttataattgccttttaataaatgaggattgtaaatctcaggtaattctccaaatgcttccaataaatcataaactttgtcaaagagattaaaatcgtaatttctcttttcacaaagcttaaaatcttttttaaattttgtggtagttttaaattcatacatccttaagctctcatttttttataaaaatcagatttgctttttacgctaattaaatttacattttcttctgcatcttccatcgcttttacagtttcaatatttggaatattttcactcacttttgcagttgattttttaaattctacatcattttccaccatttcaatagcttttgaatctttaaagaaattagctatttccataaaagccttccctgctttagaacgctcattcaatgtaatagttatagtagtcataatcttcgttttataattacaaatatacgaataaatccaattcgtattatttattggaaaacagcttttttgatagtagtgtgttttttcaagaataaacaaataaaactgaattgcataaaaaaagcgacccttttgaggccgctttgaatgttttcacaacggaataatccttattgtgaattgcttcaaaattgtagtacaatgatacaacaaaagttttattatttgtatgtggttttccgtaaactagttaattttcttttcattaaatttagggattaatttacaactaggtaaaatttatcaaaaatactgctataaaaatgaagaaaatattaggattggatttgggaactacatcgattggttggtcttttatcaacgaagctgataatgacaatgaaacctcatccattataaatacaggtgttcggattactcaatttgataatttttcaaaagttgataaaaatggaaaagttacagaatctaaaaaccccgttgttgattttaattctggaaatggactatcaccaaacgctgggagaacattaaaacgtggtgcaagaagaggtttacaacgttttaaacaaagaagaaacgctttgttagaaacattcaacagaataaaattcattgctcccgattttgtttatgcagaaactggcacagcaacaactttttcatcttatcaattaagagcaaaagcagccgttgaagccgtttccaaagaggaattggttcaagttttattaatgctcaacaaaaaaagagggtataaaagtagtcgaaaagcaaaaactgccgaagaaggcgatgcaattgacggaatgaaaattgctaaagaaattttcgaaaataacctaacaccaggacaatgggtttataattctttatcgaaaggtggcaaattcattcccgatttttatcgttcagatttgcagaaggaattagagaagatagttcgttttcagaatcaatttcattcggtacaaataaatgataaattactggaagacattcaaggaaaatcaagaacgcagacttctcaacatttttcaaaaacattgaatattccacttgccgaaaataaaggaactagagaagaaaccaaattacaacattacaaatggagaaatgatgctttggcaaatgaactcgatttgaaagttttggcatttattattactgaaatcaacaatcaaattaaccaatccagcggttatcttggtgctattagtgaccgaagcaaggaattgtatttcaatcaagaaaccgttggtcaatttcagtacaaacaacttcagaaaaacacacatgccaaactaaaaaatcaggttttttatcgtcaggattatttagatgagttcgaaaaaatatgggaaatacaaactagatttcatcccgaattaaatgacaaactcaaatcagaagttcgtgacattacaattttctaccaaagaaaattaaagtctcaaaaacatttagtaagtttttgcgaatttgaaaaaggacataaagccattccaaaatcatctcctttatttcaggaattcaggatttggcagaacatcaataatattgaatttaaaaaagataaagaagtttatcctattggagaagaattaaaacaaattattagtcaagaccttttgttcaaagaaagtatgactgatgcccagtttatcaaatttattgtcaatcaatgtaaattagaaaaaggtaattattccattaatttcaaaaaaattgaaggtaacagaactaacactgagatttacaaagcttttgagaaaattttagttttagagggttacgacgaattagacctttcgaaacttgagtctttagacataaaaaatatcatcaaatcggctttttctgatttagaaatcaatactgctattttagatttcgatccaaccattcaaggtaatgattttgacaaacaaccttattatcaattgtggcatttattatattcggcagaagatgatgataaattaaaagaaactttaaaaaacaaatttggtttcaaagaaaaccacattccttatcttttaaatataaaactgcaagccgattatggaagtttgagtgccaaagcgataaaaaaaatattgcctaatttgatggatggacatatttatgacaaagcttgtttaatggtaggttataatcattcatcatcattaactacagaacaaaataatgagagagttttaaaagacaatcttgaattactcaagaaaaatagtttacgaaatcctgtggtggagaaaatcctcaatcaaatgattaatgtgattaatgccattatgaaagatcccgcaatgggaaaaccagatgaaattcgagtagaattagctcgtgagttgaaagcaaataatgaacaacgaaaaaaagctacttcggatattaataccacaactactgaacacgaaagaattagaaaattattgcattccgaatttaatatacctagagtaaccagaaatgatattattcgatacaaactttggttagaaactggagggatttctttatacacaggaaatccaattaaaggatctgatttattttccaaagattatgacatcgaacatattatcccaaaatcacgcttatttgacgacagtttctcaaataaaactctatgcgaaagacagctaaatattgacaaaagtaacaaaacagcttattcctttttgcaagaaaaacttttagaaaatgattttgctgaatatgaaaatagagtaaaagatttatttaaaactggaaaaataaaaagctatacaaagtacaaaaaactcttgatggcagataacgaaattccagaaggatttattgaccgtcaattgagagaaacacaatacatcgccaagaaagccaaagaaattttattggaaatttccagaaatgtaacagcaactattggtagcgttaccgataaactgcgtgaggattgggaattggtcgatgttatgaaagaactcaattgggagaaatacgataaattaggtttgacccatattgaagaaggaaaacatggagaacgtttgtacaaaataaaagattggacgaaacgaaacgaccatcgccatcacgctatggatgcgataacggttgcctttaccaaaccagcatacattcaatatttgaatagcctaaatgcaaaaacacaaggcgaggaaaaagcaggagcaatttacggaatagaaaccaaatatttagaaagggataaaaataacaaactacgttttaaagctccaatggaaaactttagagaggaagctaaaaagcaactcgaaagtattttgatttcctataaagccaaaaataaagtggttaccaaaaataaaaatatcactaaaaagagcggcggaaccaatcaaaaaattcagcttacaccaagaggacaattgcataaagaaactgtttatggaaaattacaacaatatgcaaccaaagaagagaaagtaaatgcaaattttactgaagaatacatccaaaaagtggcgaaaaaagaatatcgtgaagcccttttgaaacgattgcaagaaaatggcaacgaccctaaaaaagcatttacaggtaaaaatgctttaaacaaaacacccgtttatgttagtttaaaagacaatattgtagttccagaaaaagtaaaaatagtctggttagaagctgattataccattagaaaagacattacacccgatttaaaaattgataaagtaatagacattggcttaaaaaccattcttcaaaatcgtttgaacgaatttaatggagaccctaaaaaagcatttgttaatctggacgagaatcctatttggcaaaataaagaaaaaggaattgcaataaaacgagtaagtattagcggagtgagcaatgcacaagctttgcataccaaaaaagaccattttggcaatgaaattttagacgaaaataacaaccctattcctgttgactttgttagcacagggaacaatcatcatgtagctatttacaaagacgaaaaaggcaatctacaagaagaagttgtctcgttttacgatgctgtagttcgcaggaatttaggcttgtcagttattaataaaacccatgagaaaggttgggagttcttgttttctatgaaacaaaatgaattttttatatttccatcggagagttttaatccacacgaaatggatttattgaatccaagtaactatcatttaattagtcctaatattttcagggtgcagaaatttacgataaaagattatttttttagacatcatttagaaactacagttgaagataaaaaagagcttaaagatatttcatttaaacggttaggaataaatggaataaataacataacaaaagtccgcatcaatcatttaggtcaaattgttcaactaggagaatattaatttctagattcaaaaatcaataggattgggctttagcccattcaacaaaaaacaggaataaacaaaatggctttagccaaaatatttcggctaaagcctttcctaaatcaattatcatccccctccatttaaaaatggaggcaattgatgaaaaaatcataagcaatttaaacaataaattatgccttatatcaaaacctacatccattttgtttggagtacaaaaaacagaattccttttttggacaacaaagaattaagacaaaaagtttggcatcacattaaagaaaatgccaaagagaaagggatttttgttgattatgttaatggatattcagatcattgtcattgtttggtttctataggagctgatcaaaccattcaaaaaattatgcaactcataaaaggggaatcttcgttttggattaacaaaaataaattgtgtttaaataaatttgaatggcaagatgaatattttgcggtttctgtttcggaatctatggttgataaagttcgaaattatattaaaaaccaagaagaacatcatagcaaacaaacatttgaggaagaatacaacgaatttatcactaaatataagtttcaaaaagaatagaatttggctaaagccatttacattattatcatatcctccctccagctaaagctggaggcaattcaaaagctggtggcaattcatggaggcaattctgaagacaattcaaaagttatagggttcaataggattgggctttagcccattcaacaaaaaaatgagattaaaaggctttagcctaatgttttagcgaagtgtttttatttataaacagctgattataaatttgtaaatccaaaaaagaatgataaaacgaacccttttcttcggcaatcccgcttatttgagcactaaaaatgaacaaatagtaatctcttatcccgacaaggaacaagaaaccaaaaccgtggctattgaagatattggtgttatcgttttggagaaccagcaaatcacgattaccaatggtttactcgaaaaactgaccaataataatgtggcattaatcaattgtgaccagtatcatttgcctattggcttgttaatgccactcaacggacataccgaacaaacagagcgttttaaaaaccaaattaatgcttctgccccactcaaaaagaatttgtggcaacaaactattagtgccaaaattatgaaccaagcgggacttctcaaagaaaaaggaataccgtgccgaaaaatggagctttgggcaaaagaagttacatcgggagatgcactcaatcacgaatccagagcagctgtttattattggcaaaacctcatcaccgtagaaaatttcactagaggacaaaaaggaattccgcccaataatttattgaattatggctatgccattttgagagcgattacagcaagagcaattgtcagttccggaatgttacccactttaggtatctttcatcgcaacaaatacaacgcctattgcctagccgatgatattatggagccctatcggccgtacgtggacttgatcgtgtgtcacattatggaaaccgaagattcatacgacgaattgacaacagatataaaaaaacaattgttaagtattgccagtatagatgtttttattgacggaaagaatagtccgttgatggtcgcgatgagtagaactacacattccttacacgaatgttttgagggaacagcaaggaaaattttatatcctctttatgtatgacgaacattacacccgtttaaaccaatatagaagtttgtggatattagtcttttttgatctgcccaccgaaacgcgcaaagagcgtaaaattgccagtggatttcgcaagaaattactggacgatggtttttctatgttccaattttctatctatatgcggttttgtgccagtagagaaaactccgaagtacatacaaaacgaattaggaataatttacctgaacatggcaaaattggggtaatgcaaataaccgataaacaatttgggatgatggaacttttttatggaaaaaaacctgtagaaacggataaaccttcacaacaattagaacttttctaaaaaacaggattctaaaaaggtacaactacctgtacctcagtaaacaaacacaactctttttcgatttcaaaataagctcataactaccaacatatcaaacgattaactcgcggtatgttgggaattataagctaaaatacaattttgaaagcaattcacaacacgaagcaaagactctttttgataaccttggttgggaattataagctaaaatacaattttgaaagcaattcacaacaacaatagaacttttaatccccatcattgcgttgggaattataagctaaaatacaattttgaaagcaattcacaacgattagtgacaattcgtgaaattcgtgttgttgggaattataagctaaaatacaattttgaaagcaattcacaacgtaaagagagaactacctgcggaattaaacgttgggaattataagctaaaatacaattttgaaagcaattcacaactgtgttggcaattgacaattgatacccaaagttgggaattataagctaaaatacaattttgaaagcaattcacaactagaagatttggtgtaaggaaatccatttggttgggaattataagctaaaatacaattttgaaagcaattcacaacaatgatctacaacctcgaaaatcaacttcagttgggaattataagctaaaatacaattttgaaagcaattcacaacatctttggaagcaatactttccatatttcggttgggaattataagctaaaatacaattttgaaagcaattcacaactctggcgatgttaatagtcttgtctattcggttgggaattataagctaaaatacaattttgaaagcaattcacaacattgtcaatagtgcaatgacttaaatcgatgttgggaattataagctaaaatacaattttgaaagcaattcacaacaaagaatttgaacccatattacgcccacttgttgggaattataagctaaaatacaattttgaaagcaattcacaactagccttatcggtcaaagatacaccttcgtgttgggaattataagctaaaatacaattttgaaagcaattcacaacagctgttgggtagtaattttaacgcttgaagttgggaattataagctaaaatacaattttgaaagcaattcacaacaagtacatctgcttgttgtttggcaataggttgggaattataagctaaaatacaattttgaaagcaattcacaacaggacgtacttactaataggctaacactgtgttgggaattataagctaaaatacaattttgaaagcaattcacaacattgaaattgtgattgttttttgcatctttgttgggaattataagctaaaatacaattttgaaagcaattcacaacaaaatttaatttactttgtttggtttcgtagttgggaattataagctaaaatacaattttgaaagcaattcacaacaatagacaatccagaagccccagccaaagtgttgggaattataagctaaaatacaattttgaaagcaattcacaacacgtggtatgccactaacaaccgctatattgttgggaattataagctaaaatacaattttgaaagcaattcacaacatacggcaaccgaatagttacattgttattgttgggaattataagctaaaatacaattttgaaagcaattcacaactaacgtatctgcacgcactactccatccttgttgggaattataagctaaaatacaattttgaaagcaattcacaacagtacaaacaactctttttgcgcaaagtaagttgggaattataagctaaaatacaattttgaaagcaattcacaactgggggaatgtttataatcaaatcgtaagggttgggaattataagctaaaatacaattttgaaagcaattcacaacaaagtggtataaaactactccggacgcaatgttgggaattataagctaaaatacaattttgaaagcaattcacaacaggtttaaccgccacgccttaccgattatcgttgggaattataagctaaaatacaattttgaaagcaattcacaacatataacactcttatctactgccgtattagttgggaattataagctaaaatacaattttgaaagcaattcacaactttctgaatcttatttagatgcattaattgttgggaattataagctaaaatacaattttgaaagcaattcacaacaaagccctttaaaaataactcgcttggtagttgggaattataagctaaaatacaattttgaaagcaattcacaacttatcgctcatcttacattattgttttaaggttgggaattataagctaaaatacaattttgaaagcaattcacaacgggattattctcattgttcttgttttataggttgggaattataagctaaaatacaattttgaaagcaattcacaactgaaagttactgcatccctgctgggcggatgccataactttcagttgtgaattggatgtttaagaggtcgaaaaaacgtataccaaagaacttacatttttattatcagaaatcttgtcttccaattatggtgataatttctacttcttctttattgatattataataaatggtgtcaactccacaaacacaaaatcgttccgcatttttataatttgatgcaactggaaacatatatggatttgatgcaattctgtcaaagcaatcatgaaacatcatcagatatatgtctgcttgtgtttctccgaatctgtaaactccaaattcataaatcctccataaatcttctttggcttcacgagtcaaaaaataactatacattttttaatcgctgtttgaactcagctaacatttcttcacgagtttgtttttttgcaaaaccacttttaatccctctatcaattttcatttgaacgtagttgtgatattcttcacgctcacgtgcttgcttgattaaataattaactgcttcacttttactagtaaattcttctttactaatttgttgttttaaccattcatcattttgattggctaaagagatactttgtcgtgtcataacaataattttgtctggtgtaaatttacaccaaacttttgaaattgaatgacatttttaaaatttttcctgaaactgaattttctctttaattggactaaaagaatcccaacccgttttacctgaactaaattcttttatttgttcataaattaggtgaaatttgttttgagattcaacattaatagactgtctaaactcatattattggttctacccttacccgacacttcaggacttagttgaacaaaaaaaatacagaaacaaggaatatggttttataaaatgatttttaaaccttaaatttgagtttttacacccaacttaaaaggaaagcaagtaatttgaaattcaaaaaaaacatagtattaaaatttagcaaactaaaaaaatggcagaattaaaatcggaaggacagtgtgtattttgcaacgaagtgtttgatagagcagtaatttcaaggcatttgaaaacacattttacaaaaatggaaaaaacaattgacaacgaaaactcctatcacataaaagtggagaatgacccaagatacggaaaatcgccctatttcttgaatttatgggtttcacacaaagcgagatttgaagatattgatgatttcttgagaggcatttgggtggaatgttgtggccacatgagctcttttactgacattgaaaccagaaaaaagaatagaaaagccccatatgttttcgattttaattttaattttgattttgacaaaaaaaatgaggtagaaatagacatgtccaaaaaagtatccaaactgttttatgaaaagcaaaaaatagaatatcaatatgattttggcactactacaacactactaattacagttgtggcagttttgccaataaaagcaccacaaatcattacacttttgagcagaaatgagcccttggagttagtatgtgaaacatgcaaaaaagaacctgcaacacaaatttgttccgtacatggctataatggcgaagacaatattttttgcaaaaaatgcgccaaaaaacatgctaaaatttgtgaggattttgacgattatgccgcaatgccaatagtcaatagccccagaatgggagaatgtgggtacgagggcggtagtattgataaaaaaagagatggagtttttgcgaaaaaataaaactatgtaaacatcttacccatttcattcaaacacatgctttacactttaaaaaaattaaaatccaagcaaaaatccccaatgaattcaaatccccacccaaaaacaggaattttcaaaacaaactagctataaataaaggttttattttgaattttgacgcacctttactacctttcgcattcaataaataaaaaccttaaacatttacaaaatgttagaagaaaagaacgataacctgtctcttcacgaaaatgagacagacggaaaaacagtcaatgaattgcaagaaacaattcaatcagaaacgcctatagtagccgaaactgaaatcagtgatgctgcagcagaagaaaacacagtaaaccctgtttctgaaccaatcctttcgaatgaagttgaggcaaacgaaaatcaaaacgttattgatgccattgcagatacgaatgccgaagaaagtgaagatgaaacgctaaaagaacgtcatgacattccgatgctggattacgaagcattaccgatggatacccttgtagaagaattgaaagatttggttacaaacgaaaaagtaatgtctgtaaaggaacatgtagaagaaattcgaaaagcatttttagccaaatacaaccacctcatagaagagaaaaaagaagaattcaatcaggaaaatcaagatcctaatgaagagtttcaataccattctcctctaaaaacgaagtttgatcaatattacaccacatataaggataataaaaacactcattttaagagtttgcaaaccaatttaaaatcaaacttagaaattcgattggcaattgttgaagagttaaaagagttaatcaatccgcaagcaaacataaaagacaccttaaaacattttaatgaattaagggaccgttggaaaaatgcaggttctattccaaaagacaaatacaatcacgtttggaataatttccattttcatgttgagaatttttatgattatttacatcttgacagagaagccagagacattgatttcaagcacaatttagagcaaaaacaaaaaattattgctcgtgtggaagaattggtcaacgaagccgatatcaacaaagcttttagagaattacaggatttacaccgaatctggaaagaggaaattggacctgtttcaagagagcaccgtgatgccatttggaaccaatttagcgaactaacaaaaaaaatgcatgataagcgtgaagtattgtttgaaaacctaagaggaactgaacttgaaaatttaaacaagaaaaaagaaatcattgctgccattgaagttttggctaccgaaaaagtaaattcacattcgcaatggctagcccaaattgaaaaagtagaagcattacgtaccgcttttttctctgcaggaaaagttccatcggatgtaaatgaggatacctggttagcttttaaaacagccgttagaaattttaatacttttaaaaattcgttttataaagacattaaaaaagaccaaaacgaaaatctaaataaaaaaatagcacttgtaaataaagcgaaagaactacaagaaagcgttgatttttctgcgactactccaatcatgaagcaaattcaagaagagtggaaacagattggtcacgtgcctagaaaatattcagataaaatctggaacgaatttagagaagcttgcaatcattattttgacaaactaaaagagcaaaaaaacgaagagaatgttgaagaagtagaagcttttgacaaaaagaaagcttacttagaaacgttaagagagtttcagttgactggagaccacaaaactgatttggatgccatcaaattgcatatcgaaacttggaaaaaccttggcaaagttcctttcccaagaagacatattgaagggaaattcaataaaatcctggatgctttgtttgacaaattgagcttgagcaaaaaagataccgaaatgatgcgtttcgccaacagaatggatcatttatctgaaagcaacgacactagaaaactggataatgagaagattttcttaatgcgcaaaattgaagaggtacagaatgaaatattccaactagagaataacattcaattttttaccaatacaagaaatgcaaaaaaagaaaattcaatagttttagaagttcgaaaaaacatcgctatccacaaagaaagccttgatgtttggaaagaaaaactaaaacaattgagaaacatgaatcaagaatagagttctaccacgaattgtgtagataaaaatttttcgccacgaattacacgaattattcacaaattttttcttttttaatttaaaggaattagtgtaaattcgtataattcgtggcttaatttttctatccgatttgtaaaaacctacttaattagtggtaggagctagaatagagtcaaaataaattgaaccctcgagtatttagattctcgaggttttttttgtataaaatgtctagtcctgaaatagcgatacacaaaataatacatcatggcagatatgcattaaattggcggaaaaatgggttggtttaatcaatgattgcctaatctaataacacttcaaagaggttccaacgaacctctttgtttgtatatagctatcatgtaacatgataaatatcattttaaatacaaaaaagtctcattaattttggcttacatataaaatgtatagtatgaaaacctcactgattcaaaaatacaatgttcctggaccaagatacacaagctatcccacagtaccatattgggatgaagatgatttcacgaatcaaaattggattgaaacccttaaaaaatcttttgttgagagtaatactcaagaaggaataagcctttacatacaccttcctttttgcgaaagcttatgtactttttgtgggtgcaataaacggatcacaaagaatcataaagtagaaaacccttacattgaagccgttttaaaagaatgggctctatattgcaacattttagaagaaaaaccgatcattaaagaaattcatttaggaggcggaactcctacttttttctccccagagaaccttgaagatctaatcaatgggattttttgctatgcagaaaaagccaagcatcatgagtttagttttgaaggtcatccaaacaatacaacacacacacatctacaaaaattatatgatttaggatttagaagagtaagttttggcgttcaagattactcagcaaaagttcaaaaagcaattaatagggagcaaccttttcataatgtggcaaaagtgaccttttgggcaaaagaaattgggtatacttctgttggtcatgatattattttcggtttgccttttcaagaaattgaggatgtagtagacacaattgaaaaaacaaaatcactgcaacctgatcgattagccttttatagctatgctcatgttccgtggataaaagggaatgggcaacgaggatttaaagatgaagacatcccaaaagatgaaaagaaaagaatactatacgaagttgggaaaaccttattgtataaaaatggatattatgaaataggaatggatcattttgcattaaaagaggacagtttatacgaatcttttgaaagcggaaaactacatagaaatttcatgggttatagctcaagtaaaacccaattaatgataggcctaggtgtatcttccataagtgacagttggtatagttt

SEQ ID NO: 1539 - DNA, 24077 bp, synthetic construct
  misc_feature 1..24077: note = Synthetic
  source 1..24077: mol_type = other DNA
aaggaactgttttaaaagggactttgtgctttttagaacgacctaaagaaaatgattataaagtaaatatatatgttgattccagcgttactgtaaaaggagaaatatactgcgaaggcaatttggagttgaaagggaatgttataggtacagtgtacactaatcaatttgtagccaatgaaagaggtactatatttgtaaatcatttatatgatgcaactatttcgagtgcaaaattgcccgaagcttttggaggactgctttttgaaaatgaagttaaaacagtgatgaaatggctttattaaaaaaaatacaatcggctactttaatagaaaccctcatggcaactgtgcttattgtgattgtttttatagtggcaagccttatacttaataacttaatatttaactcgttttccagaaagacacacgatgtagagacccgaatttatgagttagaatatcagatacagcataatgctataaaactaccctaccacgaagagtttggtaactggaaaatagatataactacagaaaaagaaaaccggaatatatggctttatgccactgcaaaacacaaactaaatgaaaaagagataacgataaacagtatatatgacacagcacgctaaagtaaaatcttttaccttatccgaaatgctggttgtaatgattattacagccatagtagtaggtattgcttttagtgtattaagtcttgtacaaaaacaaattagaacggttgaacgtaactttgcaaaaacaaccgaaatttctctctttgagcaacgcctatggcaagattttaattctcataacactattaaagccattgataataaagtaatctgcacttcggatattgataccgttacctattcttttaatccggagtatttactaaggaatgctgataccatacattcacaattaactgtagataaattttattaccttggtaacgaggtaaagtcaggatttatcgatgctgttactatctctgcacaaaaagaacttcctaattatactatatttgtttccatgcagtatgatgcaacacattacatgaacaacaatggcatttaagttagataacatatctgcaaataattccgatgaatctgtcgggaatagcattgaaaagttactcaaaaccgagataacatttttcagtagtggattttctaataaaaaaaaacaagctttttatctggaactatccgttctgttaaaagccggaattactataaaagaagctcttggcttaataattgaatctttaaaaaaggagaaagacaaacaactgttgagtggtgtattgcagcaagtaataaacgggaaaccattttctgaagccttatatgctacaaagcagttttctgaatatgagtacttctctttaaaaataggagaagaaaccggtactacagcgcgagtaagcaaagaactaggtattttttatgaacgtaaaaatgagcagaaaagaattattatagctgctcttacttacccatctatagtattatctacggcagtattagtagtaatttttatgcttagctatgtagttcctatgttccaggatatttttaaacaaaatgatatggagctgccttatcttactcgcgtaattgtaaagctgtcagaaattaccaaatcatacggattgattctctttctctcaatactattgcttttcatgctaagtaggtttttaaaagacaattatgcctatcggaaaaacattcacttgctgatgctcaaaatcccggtagtaggtcgttttataagtaaaatttacttggcacagtttacacaagctgttacactccttacatcctcaaaagtacccatactaaacagtatccagatggttactaaaatgattcgttttgtaccgttacaagaagccctaacccaggttgaagctaacatcatgaaaggggaaagccttagcgaaagccttaaaaacaacaaactgtttgataatagaattatatctcttgttaaagtagcggaagaaaccaatcaaacagaatatatttttaaccaattaaacgaacaatataaccaagaggttatgcagcagtctaaagtgttatcaactgttttagaaccctttattattctttttgttggcgtattggttgcggtattacttgttgcaatgtacttgcctatgttccaattgagcagtgctatagggtaattcttctttaaaaaacacataaatagctcaaaataaaaagagtcataagaaaataccttataactctttttttaccggtagcgaagtattttattctagttttataatttaaatatttcacccttattatctctaacattttctaatcatttgtaataaaatcttttataatctggtttgtgtttgatggtaaagctgtggttactatcttgtattttttaaccttcatattattaaaccactgttcccaatagtactttattacggattcttcataaggatttctattatccggattaattcctaatacaagtatttctatatcggacagattgttatttgctggtataaagccatagttttcattctcaattttgactttccagttttcatcatttaattttaaatgcttaattaatttaggagttaaaaaagaggtcttatttccttgggtaatttttgagtctttatgaaaaatgtagccgtctgttaaaatcactaaaatatttctatggttttcgcgaacacaataatctttaatgttagttttaaaaaagcgccaagtatccgagcctacgtaatccttatcctttattgcagctttataaatttctaaaggctttttagaataagatgcatctattttattcaataattttaatgttgcatttttactgtttatattaaacttcaattcatcagacagcctgtttacatctttatttttaggagcaggatcaaaatatagctggatattatcatttataagttttgtttttttagtctttaaactcgatgcaaatacttttgctaccgattcaatgtaagccacatcacgtaaatagtattccatagattcattaggatgccgttcagggtcaatcctatcagaaaggtctaaaagaaagcttatgtttaagtttttaactgatttaactttttcttgtccccctttattttcttctatctcgtaattagtttcgttatcatttttacatgaaggtgaaacagaaataaccagtattacaagaattttaaataatgtaaatttcataatattagtttttagtgtaaaccaagtgttgataatccatttcttcttttaaactcaattgtgaaagatgtttttcggatacttcttcgcacatctttatcagttcatttttttctttagagggaagtgctaattcaacattgatagcttgataccacccctctttgtattgataatgataatggagatattctttaataggaaatataaaaccctcaatcttagattgtagttcagatattttaccattaatagatactatttcctgctttacattttctattttagatacaatatcattctttttagcagattcattatccagctcttctcttttgtgttgaatgaattcttttattttatccatattttcatgttctttcattacaaaatcaaatactaccccccatataatataaaccaaaaaacctgcgaatattattccccaaaaacctactctttctatagcaattgagaatgaaaaattttcccctatagttctattaaaatcaaagattttattttcaattatgtaggctaatatgaaatcaaaaatgaatgtgactataaaaagagcagtaagttttgagtatgaaaaaacatttttatttttttggaacatatgtattaaatagcctaaccccataaatacaaatggtattgtgccaacaaaaataacttctaaccaaccatcttttactgctttacctaaagcatttgcatcaaaaattgctgcggttaagctatccgtttcaaaatctttaaaaaaggcggaatatgaagcggatatataaaacacaaataaatatatggttataggtaaaaggattaataagcctatataaaattgtgctttgggacgcttactaatatcaaccccatacttttccggagtttgttttacattaacaatttcaaacttaaacccttctatattcttactaacctcatctttttgttcttcataaattgctaaagctgtttctcgtttttttaattctgttctttgtctttcttgctcttccttataaggctgcttaagcatttcctgttcatttaactgtttcctgcataagtcttcaaaagcgaaataaagatttcttaaacacactcctaaaatagtcgccccaccacttgcttttatagaagccccatacccactttggtagtaggtaattctttcctgctctctcgcactctctgtgctgtcttcttcaggaatagaattgctattatccttaagtttaaataaatttttaattgaatccattttcttattggtttatttcattgattatatcttcttttttgaaaccctttttagcacaatccaataaataatctgctaatgctgtgatgttctcgtcaagaaactcaaactttttacagtattttttaagtgttatgtactcatcttctgttactttttcatctgcccaaatcattactgccaaatcatataaatactctattctttgctctaatgactcggggattgaagaatcgtgcgacggatttaaaagaatatcgtttaattgttcttttgacagccctctttcttcggcaaatttgtacagcatctgcatttctaaaacatcaaaattatcatctgaaaatgctatttgatatagacgcagaaagtgactttttaattcagtagaaatcataattgtatggttagtattaataatgatatacttgtaactaaaagaagtaagaacactgcaaggcaaccatttttagatgatttagaaaaagtttttctataagttaagcccggaatacctgaccttatagagtaaccttttgagctgattgtacctctttttgttctgtaacttggatatattccggacttactaatgttaacaccaagccctttacctatttttattcttttttgaaatctcagtcccattttattttattttggaggttgtcgtttatgaggtttaacaggtactgttttagtaccaggtttaggcttatttgggttttcttcttgtatgcgggtgaacataagtgccatcttttctgtaataaccttttacatgtaccgtaccacctgaactacgataacttgatgatttcttttttttcttgaggactttaaaagtccccgtgtattcgtactttttcttattcttaattcgggggatataagcccagccaattgtatcgttatattttactttataatatatggctttaggtttttctttaataataacctgcttacccttaggtattacagttatttgctcccctccattagacttattaaaatatattggtgttggcgcatctgtttcgcatatatagtagtttgtgtaacaagaatttaatacaagcggtagtagtaaaaagaatagtaattttgttttcataattttattagtttggtcaaacttatgcctattaaagaataaagccttacgggattccgtaaggctcttgagtttgtgaaaacttttacgcgtactggattaatttccaagtagccgaatcacccccatatggaggcattatgtttccttcagctataggagctgtagttgaaggtgttcctgttactttccaaacacctgattcagggcatttttcccctgtctttgctgttgtacctaatggttttctagccataatgattttaatttaaagattaataataccccaaaattaaagtcaatatttgcctaaacattacggcaaacctcattctaaaagttattttacttgattatctataaagtgtgtaggagtatctctaaacctttaatatttaagctaatggcactaaaccaattatattaaccccatatcctttactatagtaacaaggtgtgttgtattaacagcctgaaactgatcttttagtttgtttatcctcttttctatagagcttaagctggagggagatgctttttgttccttaaacaaaaagctaatttggtcttgggacatacctttagataattccgttattattcgtatatcgtaatcagaaatctccaaatcgagtttttcacttaatgcattttttacaattggagagaggtattgttttttagcataattatctttaattgccattgctaattcatctaaacctttacgccctttacaaacataagcgttaatattaaaattaaggaaaaggcttcttactttttgcagcctgtcatcaattgaaaaaacgattatattaatatcaattgagtctttataaagtgcttcaacaagcgcctctcccgaaactaatttttgctccctatggtcttttttaaaagacaaatcagttataagaagctgataaggttggttatctttaatgccttttttaatttttaaataagcatcatcacaatattgaacttgctctatagtatgtattcctaaattagttaaaacactttttacaccttgatttatgctgcctaagtcatcagctactattactttcgaaaacatatattacacttttatactggctttaaaaccattgttgacttctgattcaaatgtaacagtcccattaattgtttttatacggttttccacattaagcaaacctccggtttttttcagcgtacaccccttaccattatctttatagtctattactaatttgttaccttcctgatagaatttaagtgctacatgagcagcattactatgctttttcatatttaccattaactcttgcaacactctgtaaatagtatttttcttaatttcggataactgatcccagtttactttattaaaattctgagtaattactacagtgttatcgttcctaaaacttaataacatatcatataaacattcattaaatttttcttttaaatcgatggtattattttgtctggaaatatcccttgttttattataaatgttctctaagctatctaaaacattataattatctgattgtatttttgacataacatgatatacatcgttagctacctcatcatgaattttttttgatattcttatttccgtattatatacctgtaatagtttttctcttttgtgcctcgctcttagatacaaaattaatagtgttcctaataagagagttgaaatacctaatagtaaatatatttgggctctccttttctctttttctcttaaaagctcgttttcatctgccctgcgcttttctttagtgaaatcatattgaatggaagcatattgattttgcatttcgtttttagcctttttaatactatcatttagttttatatatgatactaccattttatcatcactaagctctaataatcgtgatagtgcatcttcaataaaactgctgctttttatttcttctgctatttcataggctctatcagcatatgcgattgctgaatttttatcaccttcttctttataataatcggaaaggtgagctaaactgctgtatgatcctttagtatcacctatctttaatctatagtcaagtgatttttttaagtttattattccttccggcatcgctaatttcgactggacaaatcctaaattatctaatgccatagctattaaaacagtatctttcacttccatgctccttttataaacttttgaaagctcagttatagctttatcatattggttaaggtctctatatatgttcgctttattgtttaatatagtaagactatccgtaagttttccagagaaatatagtgctttatcataataatcaagtgctttatcttgattatccaaatctctatatatctttcctaactgattataaactccctttttagcttctcttgattctggcgtgtgttttaaatcatccagtagttctaatcccgatacggaagtctcttcactttcatgtaaaaagcctaaattaaactcaattattgcaagcattcttaagctgtttacagcagataaagtgtctttcttatttaatgatttttgaacttcctttttataaaacaaataagcgtctgttaaatcatttttatgcgttgggttgattactttatcacggtagtacctcaagctatcattgtttgtttgctgtgagtataggcaatgtgtatttatgtaataaatagctattacaaaataaaaaaagagggagaagttctttagttctttcatccctctaaattaaacaatctttttatatcagataattatatattatcccttccatcccggattgattgggggtggaggtggcaaatctccatcttcaccgcaacaatcatctgcttgtaccgcattgttttttacatctgttaaatcctctgtagtacatgaagaaaatgttacattgaggaaaaccgtaagcaataataaatatatttttttcattttgaatcattaaaaattagacactggtgtagctgtccggtaattttatattccggatgtctttcgagatgctacacgttattattgaaaaaaggagacgtctctccttgcgggaagtaaggagcaacagataaagaagtataactgcttcccgtgtgttacgcagctttatcttatagctcccatagaatttaatttcgcaaaccttattgcgtgtaaggccataattaattctgagacaaatgaagtaactttatgctttatgtattggaaatacgattgagaagaaatggaaaattttgagaatttattttcaacaaaatttctaaaaaattaatattcaataaagtacatttaaattatgcatagaaatttgatgattaaggcttttgaaaagatgaaagccgaacaagagaaagaacacggtataagactttctgataatgcaactgcaaaattgttgtctgactttatttatgaaagccaaaaatttcaatttggagaaagaagtttaattgattgctataaatcagcgaagaatgaaagtgaagaagaaataactattaaacagccaaaagttgtacaggctttatgtctttatttaggttatgatagttttaaaagttttaaagatgctaatgaagttcgtaatgcagtaaaagaagattctcctgaaagttcaggaagtagtaatgtattagcaattgtaaaagaaaacaaaatattatctataattagtgctgttattattagtagtataattatagttgtgctacttatttatttttctaataaagagcgttggatggtatggcagaatgataggtatgttgaagtaagtttcgacttagaaaaatataatctttatcaattaaaattatataatgaatatcgagttgataatctaagaaagatacctgttgattgtaataccaaattttttgatgcaaacggggaagttaaaatttggtacggaaagaatgcaaaaaaagagttagagttttttacttcgtatggactacaccctgaaacagggaaaacattaaaaccaataaccagctatatgattaataagtatgtatgtcccaaaatgtaaattttggtccctatttgttttaggggtaaataaaaaaatgcgatccgaagaccgcattgaatgttttcacaacggaataatccttattgcgaattgttttcaaaattgtagtacaattatacaaaataattttttaataatatctcgttttttactggcattcaaaaaatacccattaatagggatactgttttattaatactttattagttttattaaaaactaaaataaaccatattattactaaacgtattcacaaattgaatacagccctcattataactaaaataattatgaaaaaaatattaggacttgatttaggttcagcatccataggctgggcattcgtacatgagtcagacgacatagacgaaaaatctgaaattataaataccggagttcgtattgtaccactaactacagaggaggagtcggactttaaaaaagggaatacgatttctattaatgccgacagaacattgaaacgcggagcaaggagaaacctgcaacgctttaaactgagacgtgaagctttacttgaaatttttaaagaagttggatttataccggaagattaccattatgccgaagatagagagcatactactttttctacttacgaattaagagcaaaagcagcaaacgagatgatttcgaaagaggaattagtcaaggtactgctgatgattaataaaaaacggggctataaaagcagccgtaaagcaaagtcggaagaagacggacaggcaattgatggtatggcaatagccaaagaattgtacaacaaagacatcactccggggcagtgggtatatgccagcctatctgaaggcggtaaatacattcctgatttttaccgctctgaccttatcagtgaatttgaaaaaattgtgtactttcaaaatcagttttatcctgaagtttttaatgataatttactggaagttataaaggcagaaaaatctaaagtatatgactatttcaaagcattacatattgagcttgccgagaataaaggcaattatcaggaaaaaagattacaacagtatgaatggcgggctaatgcggtaaagcagcaattaaccgtacaagaaacagcgtatatactaacagagattaacaagcaaattaataactcaagcggctatttaggagctataagcgaccgtagtaaagagctgtattttaacaaccttaccgtagggcaatatttataccgacagcttgcagaaaacccacatatcagcctgaaaaatcaagtgttttatcgtcaggactatatggatgagtttgacaggatatgggaagtacaatcaaagtatcataaagaacttaccgaagcgcttagaaaagaagttagagatattactattttttaccaaaggcgtttaaaatcgcaaaaacacctgataagccattgcgagtttgaaaaacagcacagggtaatcccaaaatcatctcccctatttcaggagttcaggatatggcaaaatattaatgccattattattaaaaatactgaaacaaaagaaacattacttttagatgaagatgataaaaaaagccttgatgaagagctcaattttaaagataatttaaccgaccttcaattacttaaattctttaatctggacaaacgtgtgcatgaggttaatttaaaaaaaattgaaggtaacagaactaatacagcattatataaagcttttgaagctgtctttcgtcaagaaggacaagatgatcttgacttctctaaaatgaatgctgaagatataaagagtacaacagcgtcattatttaaagacctgaatatcgatacccgtattttagattttaatgcggaactgcaaggcaatgactttgacaagcaatcctattaccagctatggcacctactctattcagcagaagatgatgctaaactgaaaaaaacattgcaagaaaagtttggttttaagccggagcatacacaccatattgctaatatagacctgcaaactgattatggcaaccttagtgctaaagccataaaaaagattcttcctcatttaaaagatgggcttatttatgataaagcctgtgctatggctggatacaaccattcttcatcattaacaaaggaagagaatgaaaacagacggctagaagaaaagcttgagcttctaaaaaagaacagtcttcgcaatcctgtggttgagaaaatacttaaccaaatgataaatgtggttaatgctattattgccgacccagcgatgggtactcccgatgagatacgtgtagagttagctcgtgagcttaaggctaatagcgaacaacgtggggaaatgactaaggcaataaataaagcaaccaaagagcatgaagaaataagagcattactaaaatccgaatttggcttaccaagagtaacgcgaaatgatattatccgctataaactatggaaagaaacagatggtatatctctttataccggcaaacccatagaagcctctaaactttttacaaaagagtacgatattgagcatataatacctaaatcacggttgtttgatgatagtttttcaaacaaaacactatgcgaaagacagtttaatattgataaaagtaaccgtactgcattttctatttgtcaagaaaaacatagtgaatttgacttcgaacaataccaaagtcgtgttaatgacttgtttaaaacaggtaagataaaatatacgaaatataaaaaacttttaatgcctgataatgaaatcccggaaggatttattgaaaggcagttaagagaatcacaatacatcgccaaaaaggctaaagaattattacgggaagtttcaagaaatgtaaactctaccattggtagtattacggataaactacgcgaagactggcaattggttgaagtaatgaaagaacttaactgggagaaataccacaaacttgggctaaccagagaagaaaccggtaaaggtggcgagcgtttaaaaaagattgatgagtggacaaaacgtaacgaccaccgccaccatgctatggatgcaattactgttgcttttacaaaagacgtttatattcagtatttaagtaatcttaatgccagagataagggtgataaaaaagcggataatatattaggcattgagaaaaaatatttattaaaagataagggcaaactaaaattcaaatcgcccattccaaactttagagaagaagcaaaaaaacatttagaaaatattattgtttcgtataaagccaaaaataaagtagttactaaaaacaagaatattactaaaacagccaaaggtacaaaaacaaaagagcagcttactccccgcggacaactgcataaagaaactgtttatggtaaaataatacaatatgttaccaaagaagaaaaagtaaatgcaagctttaccgccgaagttatcaatacaatagtcaaaaaagattatcgtaatgctttattggatcgtttagcagcctatgataacgaccctaaaaaagcatttacaggtaaaaatggactaactaaaaaccctgtttatttgcacagtaatactcaggtagtgccggataaggtagaaacatcaatacccatagagatatataccatacggaaagaggttactcctgataactttaaagatgagaaaagtatcaataaagtaattgatgctaaagtaagggaactgcttttaaaccgactgcaagaatatggcgatgctaaaaaggctttttccaaccttgatgaaaatcctatttggttaaataaagaaaaaaatataacggtaaaacgagttactataagcggtgtcagtaatgtagaggcattacatactaaaaaggattataagggtaacgaagtcttagataaggacggtaaacccatccctgctgattttgtaagtacgggtaataatcatcatgttgctatttacaaagacgagaaagaaaatttacaggataatgttgtttctttttacgaagcagtaatacgcaaaaatttagggcttcccattattgataaaaatcataaaaatggctgggagtttttatttactatgaaacaaaatgagttttttgttttcccaaatattgaaaccggttttgaccctgcaactattgatttacttgatcctaaaaacagagaaataatcagccctaatttgtttagagtacaaaagttttccaaagttgaatatggtaatagtgccgtaagagattatgtttttaggcatcacttagaaactactcttaatgatgccaaagagttgaaagatgtaacttataaatccataaaaagtttaccatatttaaaagatatcataaaagtaagagttaatcatttagggcaaatagtacaagtaggagaatattaatccatcatgatatgataaagcgtactttatttttcggcaatccagcttatctaagtactaaaaatgagcaactggtggttacctatcctgatagtgaagaaactaaaactgttcctatagaagacattggcgtgctggtactggaaaatcagcaaattactataactaacggtctccttgaaaagttaatttacaataaagcagccattataaattgcaatcaacagcacatgcccataggtctacttatgcctctcagcgggcatacggaacagtctgaacgttttaaaaatcaaattaatgcttctttacccttaaaaaagaatttgtggcaacaaacagtatcagcaaaaattttaaatcaggctgggttattacaagagcgtggcacacccattagaaatatgcaacattgggcaaaaaatgtaacttcgggagacacgcttaaccatgaagcaagagcagccgtttattattggcagaatttattcgacatagaaaattttacaagacatcaaaatggcgcacctcccaataatttactcaactatggctatgctatactaagaggtattacagcaagagctttagtcagttcgggaatgttaccaactttgggaatatttcaccggaataaatataatgcctattgccttgcagatgatataatggaaccgtatagaccttttgtagatctcattgtttgccatattttagaaaatgaagatagttgtgaggaactgactattgatataaaaaagcacctgttaagtgttgctactattgatgttaccatagatggcaaaaaaagccctttaatggtggctatgagccgtactacaaattcattatatgagtgctttgaaggaacttcaaggaaaattttatatcctgtatatgtatgatgacagttattacacacgtttaaaccaatatagaagtttgtgggtattagtattttttgatttgccaacagaaacgcgaaacgacaggaaaatagcaacctcatttagaaaaagacttttagatgatggtttctcaatgtttcagttttctatctatatgcgtttttgtgccagtagagaaaatgctgaagtgcatacaaaacgagtgcgcaataatttgccacctcacggcaaagtaggcgttatgcaaataacggataagcaatttggaatgatggaaattttttatggtagaaaatctgtaagtactgaaaaaccttctcaacaattagagcttttttaactatgatacaaaaattgatattgtttatagaatctgtaaataaaaacagtcatttttttatttcaaaaacaccttataattaacaacataccaacgttttatatgatggtatgttgagaactataagtaaaaatacaattttgaaagcaattcacaacttttaccttgaaaatcttccggtaatacaagttgagaactataagtaaaaatacaattttgaaagcaattcacaacctggaaagctattgctttcgatggttcgggttgagaactataagtaaaaatacaattttgaaagcaattcacaactggcatcccaatatttaccctgtcaatacggttgagaactataagtaaaaatacaattttgaaagcaattcacaacaggggtaataacttgcttgtttttgcaaagttgagaactataagtaaaaatacaattttgaaagcaattcacaacctatagccacgattataataccaatagggtgttgagaactataagtaaaaatacaattttgaaagcaattcacaacaaacttgttacagctaagtctaattgacttgttgagaactataagtaaaaatacaattttgaaagcaattcacaacattttagaagccgatgtttcaaaattattcgttgagaactataagtaaaaatacaattttgaaagcaattcacaaccgtgcttttattttggtggataattattttgttgagaactataagtaaaaatacaattttgaaagcaattcacaacagctataatagcatcaataggacgtacaacgttgagaactataagtaaaaatacaattttgaaagcaattcacaactagaattgaaaaaagaattagtagggggtagttgagaactataagtaaaaatacaattttgaaagcaattcacaaccattattcttttggttctaatagctttttcgttgagaactataagtaaaaatacaattttgaaagcaattcacaacatatttattctgttttcgctacccccgccagttgagaactataagtaaaaatacaattttgaaagcaattcacaacatccgatacaatgtttattcaggaaaagttgttgagaactataagtaaaaatacaattttgaaagcaattcacaacacgcgaaggacttttaaaatatagagaacagttgagaactataagtaaaaatacaattttgaaagcaattcacaacattgaaagtaaaaggcatgcgtttgtaagtgttgagaactataagtaaaaatacaattttgaaagcaattcacaacacattaaatgatggtaaattttataacccgttgagaactataagtaaaaatacaattttgaaagcaattcacaactagaaatacaagatatgcaaaaggactttcgttgagaactataagtaaaaatacaattttgaaagcaattcacaacacaggtaaataatctaaattgttagggtctgttgagaactataagtaaaaatacaattttgaaagcaattcacaactcggtaacttcgtctatattgactacatttgttgagaactataagtaaaaatacaattttgaaagcaattcacaaccaccgtagctgtttcgtaagtacctgcattgttgagaactataagtaaaaatacaattttgaaagcaattcacaacagtgattatacttcttatgatgcacttgttgttgagaactataagtaaaaatacaattttgaaagcaattcacaacgtttacggattagttaaaaagggcggcatggttgagaactataagtaaaaatacaattttgaaagcaattcacaacacctttacgcaaagctattcgtactatgtagttgagaactataagtaaaaatacaattttgaaagcaattcacaacgcataagcattaacatcccttacagcttcagttgagaactataagtaaaaatacaattttgaaagcaattcacaactaaaaactctcatgttactattgatgaaaggttgagaactataagtaaaaatacaattttgaaagcaattcacaacgaacaaagaatttacagtaaacagcatggagttgagaactataagtaaaaatacaattttgaaagcaattcacaacaaaatgtataaaatatattttcatgtttaagttgagaactataagtaaaaatacaattttgaaagcaattcacaacgccgttaacgaagtggctaagctcggttacgttgagaactataagtaaaaatacaattttgaaagcaattcacaactctcttatgttgaacaactttttaacatggttgagaactataagtaaaaatacaattttgaaagcaattcacaacgtcgtcaatgggcgacgagatagtacacaagttgagaactataagtaaaaatacaattttgaaagcaattcacaaccatgtcattactgcctgtgccttatatcttatggttaaaggattttataaaatatgtagattttatttccatgccctattctgatacatcaagattaaataaaaacattttaaggcttttaaaagccttaaaaataacagaggtagatattatactgcctctgttttttatataataatcttatttcattattgtttttcaatggtttacaatcaaaattaaagcaaaaccctaatctgatacattaccgatattttatcaaatctacccttttatatgattgatttatggaaaatcgtgtaccgtttcgtgtactattattaaactgtaatataatcatttttttaataattatgtacatataaatcatccccaaaaataaattctcaaatgcgcttcaagataaattttactttttgagaaacaaatcgtttttctgcttaatcttttaatatgtgttctcaaagtaagattctttctttcgattctattagtacaatattgaaatcgtttatgaattgtttttggaatcaagctcggatatacattcaatttatcggtgtaaatactagttggttttaataacaaaacattatcaattaagggcttgatattttcctttgatttgttgccaacaaaaaaagcaacaacatttttggtagctctttcaatggcataagttatccatgttacacgggctttacagcctacaaaactccaaagctcatcaatttcaaatttacaaccggatttattaaagtgtataggctttatttggttacttatttttagcatccgcgaaagtactgttttctttgaaatttttaatattcttgaaatactccttatcccacaaccttcttttaatagatccttgattaatgtatttatgcccttcaaatatgctttataactgtatgtactttgaaagttatttttacaacttttacaatagtaacgttgttttccattggcttgttttccgttttttacggctaatgttttacatcttatacagttcataacttttctatcaactaatcgaacccacaaaggtgataaaaatgtatttttagccatataattatattaaaaacataaaaggtgtacataattgtacaccttttataaattctattttcattttaatttattgattttcaacaaaccaaccaatattaattcatcatcaactaatttgaaccattacccaccgccggtatagattttcggagaggaaaattccttttttttaaacaaatttttagagcaattaatttgagaattgtgtactaaatcatgtactttttgtaaatgtaaaaaaattttagacataaaaaaacggtttagcgtacactaaaccgttgattttccgttttttcaatatagtagcgaagacgggagttgaacccgtgacctcagggttatgaatcctgcgctctaaccgactgagctacctcgccatttttcggtttgcattattattccttcaatgcgggtgcaaatatataattttatttaatgcatccaaacatatttttttgaaaaaaatattttatcaaaatgtttttttttaactgtttattattctatatttcgcgaaaattttacagaccgatggacgaaaaaacaaaatatgaactcgaattcccgataacctcatcaccacagcttttatatcaatatatatcaacgccatcaggattgtcagaatggtttgcagataatgttaactccagaggagagttttttacctttatttgggacgactctgaagaaaaagccaggatgtcttctaagaaaagcggagagagaattaaattcagatgggtagatgacgaaaataaagatggagagtactattttgagttaagaatcttagttgatgagataactaaagacgtatcacttatggtggtagattttgcctatgaagatgatgtggaagaagcaaaacagttatgggaaaaccaaatatctgacctaaaacatgttttaggctctgtttaggatatcattgctattaaagttatatttgccctatccaaaatagggcattttttatgataagttataacggcaacttaacaccacaatcagatatatccatacaccaaaaccgggcatttttatatggagatgctatttttgaaacgctgaaagtacttgacggcaaagttttgtttatagaagaccactattttagattaatggcttctatgcgtataataagaatggaaattcctatgtattttaccatggagtatatggaggaaaaagtactggaactggtaaataatttaaaactaagcgcatctgccagagcacgacttacatttttcagaaagcccggaggttattaccttcctaccgataataatactgaatttattataactgctgatagactggagaattcaatatatcaattttcagatgcaatatatgaagtagatctttttaaagatttttatataaccaagcaattactgtcttcattaaagactgttaacaaaatggtacacattacaggtagtgtttatgcatatgaaaacgggcttaataattgcctgctgctgaatgatgataaaaatgtggtagaggcgctacaaggcaatttattcatgcttatgggcaataaattaattactccgcctgtggcagatggctgcctaaatggcatcatgagaaaacaagttttagcagctgcaaaaaagcataaagattttatcgttgaagaagcatccatatccccgtttgaccttcagaaagcggatgaattatttattactaatgtgattgctgggatacaacccatcactaaatacagaaaaaaagagtacgggagtgatttggcatctgatttactgaaaaaactgaatgctcaaataagactgggattagtttaaggcagggttttcaggagcgttagaccatattaaatattcaccacctaattccattattttttctttccagaaagaagcactggattttcctataattttattttgatagctgttttcagatactatccaagaatcttcttcaagttcatcttcaagctggtgggcatcccagccggtatagcctaaaaagaagcgaatattgttctttttaatctttcctgtattgataagatctttagtagactcgaagtcacctccccaataaataccattagatatctcgatactattaggaatgagttcgggaatattgtgtataaaatatagattatcctgctctaccggtcccccattataaattttaaattccccttttatttcaggaataagatcttgtatggtaaatccaaggggcttgtttaagatgaaacccacagaaccctctgcattatgatcggctaataaaaccacagatctgttaaatgacagatctcctatggtcgaaggctctgcaataagcaggtgacctttttttggctttagtgaaatcatagtccttcaatttgaaataaatttaattaaaaaaaacagacatccaaaataaattcagaaagttttataaaaaaagcctctcgttaaggagaggcttaatatacttggttaatttatgttattatttattaacagcaccgtcaagctcagctcctggcttaaatttaacaacatttttagcagcaattttaatagtagctcctgtttgcggatttcttccttctctcgcagccctgttagttacagaccatgaaccgaaacctaccagagatactctattacctttgtttaatgcatcacctacattgctgatgaatgactctaatgctttttttgctgcaccttttgatattcctgcatctgcagccattgcgtcgattaattctgatttgttcataataattgttattaattgtttggtttaaaattaatgtttttatatatcctgtcctacaaatttagcaggaaatccataccacacaagtgttttataattatttcaatttaattgttaataacttttattaaaatgttaacaaaggggcttggaatttataattttttgttaacacttgtgtttactggctattttgccatagcatttgccgtaaatttcataccgttaagcaactcgcctgctgtcatttttttcttaccgggaaattgtaaatcaagtaatataatatatccgttgacaacacttatcttgatttcttttttatcaacaataagtttaccaacttcacatttatgatcttcttctttaaacagagcattatatacctttacattccattcctgcccattatcgttaataaaagtccatgccgcaggatacggactaagccctcttatcaggttataaatagcctgtcccggcatagtccagtctatcttacagttttccttatttagcttataggctgtttttatattcgcatctgtaggttgtatagttgtttcggcttgtccgttgccaataagcgacagcgttttcagcacggtatcaacaccaagcagcataagcctgtcgtgcagttcgcctgccgtttctttgtcacctatagctatttcctcctttaatataatagcacctgtgtcaattttatcatcaataaaaaatgttgttacacctgttgttttctctccattaataatagcccaatttataggtgctgcaccacgatattgcggcaataatgatgcatgcaggttaaatgtgcccaactttggcattttccatacctgagtaggcaacatacggaaagctacaactacttgtaaatttgcctgtagaccttcaagttcttgtaaaaaaacctcatcttttaaattaaccggttgcaacagctttaggtttttttccagtgcatattcttttactgccgagtattttactttttgtcctctgcccgcaggtctgtcaggagcagttataaccccaacaatatcatagttattttgatatatagcatccagaatccctactgcaaattcgggtgttcccataaaaacaattcgtaaacgttccattactttatagtgtattggttattcatatttattttaatctttccattttccaacaaaacctgtaatacatataccgtttctttgggagtaagctcaagtttttgttcaatctcgcgcgaattgtatgagtcattttccagtaattgcaatactgcctcagcgagataggttatacttctagactctttatgtttatttatacaataggagcaaatcccgcaatctgcactttctttctcttcaaagtaatcaagtaacaggcggctcttacacctgttattatttgttgcataatgcactatagcttcaaactgctttatttttattttattctgttgttctaaaaagacagttacccgattgatagtaagatcatcttcccgaacctcgttaaaagtaaggctgctgtcagcccctttactggtatatgttataactcctttttgctgcaagcgttgcattagtgccaaaagttcctgttctgttgattttgcttttttacttataaagttcgcatttatagctgtttccatatcaaatactcctgcataattccttaaaatagtcaaaatcatcgtttcatctgccggattaaggctgatgtagcgcaatacttctttactgggtacaagaaactgcagggttatactctctgaaaattctttagacaatgtaacgataccctgcctgtctaaaaactgtaacgcgttatatgtttttacaacaggaaaatcataatgcctgcaaaactcgttaagattgaacggaaaagtttgccctataccttcgccataggctatctgcaaataattatttaatcgggaatatacattttttaaaaactttttgtcagggagaacttctataaactggttttgagttgccgctatgtcagacttgtttattaacaacactgcaaacgactttttaccatttcgccctgccctccccgcttcctggtaatagttttcaagattttcgggtaactgtatgtgaataactgtttttacattagctttatctatacccatgccaaaagcattggtagctactattacctgtaccttttcctgcatccaagcctgcatattggtttctttctccttctctttaagcccgccatgataatgggtagctttaaagccgagcgattgtaattgttgtgaaacatcatgacatgactttcggttgcgaacatatataatggatggttcaggatttttagtgagtatttgttgcaaacgatgaagtttatcttcggtttcgagaaccatataggctatattctctctaaaaaatgactttttataaactacagggttct

SEQ ID NO: 1540 - DNA, 24065 bp, synthetic construct
  source 1..24065: mol_type = other DNA
  misc_feature 1..24065: note = Synthetic
gtaaatggtattcagtttctttctattattttggaaataattggtttggaaatttttaaattcatttaacaatatggtattcgttattttatctgaagaatttaaaatggaaagacctttattatgtagcacaaatttcgattgatcaagaaattcaaaatcaacaatagatagatttttaaaatcttcatattttattattgcatctaaacgtatttcataaattcctttatcattagaaccaacataaagaacatttcgaagtgtatcatatactacatttaaaattatctttgaatctatttcaaactgattagaaacattaatcattttatcgttttcaattttatacaggccaccatctggattataaacaccatctgcagcagcaaaaattaaagaatcttgaactttggcgtattgaaaaacaaaagaagtcccaaaccgattggctttataatttgcatttaataaattcttaatatttattttttctatgaaaccttctctacttaaaagtaaatcatttttatccaataaagcaccataaaaatttttacctgaatatactggtacaacctttggaatagttgaactttcgtcaattttaaatatgccatcaaaaacacttacaaaatacacttcgtttttatacacaaaaaaattaatgcaaataaaatcttcctttgctttaggaacttttggtgttacaattttatttgtttttacatcaataatcgagataccttgctctgtccccacataaatattgtttttaaaaggaaataattttcgagttttatcagcagccaagccatctttagaaataaaaggagtaaattttttgccatcatatttacttattccaccaccataactggcaaaccacatattaccatcagtatcttgcgaaatatcccaacaactattatgtcctaaaccgtctgcttcacttaaattataaaactgaccatttacaaatcgaaaaacaccattttctgtaccaacccacaaaacattatccttagcaataaataacgatcgaacagcattgtttggtaaaccgtcagaagtagtataattaaaagaagtgagtttttgagcaaaagcagtcgttaaaaccaataaaaatatactaagaagaaatcgcatccattaatttctttttagaaaacaaagtgtccgaaacaggaatactatcacctgtaattaaatctaacttaaactcgtccgatttaaaccctttaatataatttttatttacaatatagcttttatgaattctaataaaattagaatcaactaaaatatcttcaatttcttttaacgatttagaagtaaacaattctttgtcaattatgaatatattagaatatgaaccatccgacttacaataaacaatagaattagcctgaattacctcaaaaccagatttcgttggaaaaacaattctttgcttatctgtaaactgattattaatattctctgttaataatttaaacctatcaaaatcaattttaacattctttttcgacataaatcttgataaagcaatattaaaatcttctttactaaatggtttaaccaaatagtctaaggcgctttttttaatagcttcaatagcatattctttataagcagtagtaaatataatttcaaaattaattttatcaaaatactttaaaaattcaaaaccattttcgtcaggcatttgaatatctaaaaaaaccaaatctggctggtacttttttattgccctaactgcagcttccacagaattacattcttctacaacttcaatagtttctgaatggtatcgctcacaaaatttcctaagaaaactccgagcgtgcatttcatcatcaacaataattactttaattttcatctaataaatcaatatcattcaaaaatacgattaagtttaggagtatccaaaatattttataaaagcatgaaaaaaggaaacaaaatactcattttggtttacataagactcaactttatccttgatctatccctccttgatccgttttactaatattttataaacaaaaaaccctatccgatttggatagggtttctttaaagaaaggcgacgacatactctcccacataaatgcagtaccatctgcgcaggcgggcttaacttctctgttcgagatgggaagaggtgagccccgccgcaataatcaccttaagtttttaagtgaaaagtattaacttttgcactttccatagtaaattttgacttgtgtcgaagaactaatggttaatatcttaacatactgagataaagaagtattttttttttagaaagtttcttcccgagtcttgcaactcgggaaaagtgtgtacataagcttacgggttattagtactactcgactatgacattactgcctttacatctatagcctatcaacgtagtcatctcctacgacccttaaaagaaatctcatcttgtggtgggtttcgcgcttatatgctttcagcgcttatcccttcccaacgtagctactctgcggtgctcctggcggaacaacagatacaccagaggttagtccaattcggtcctctcgtactagaatcagatccactcaaatttcttgcgcccacagtagatagagaccgaactgtctcacgacgttctgaacccagctcgcgtgccactttaatgggcgaacagcccaacccttgggaccttctccagccccaggatgtgacgagccgacatcgaggtgccaaacccccccgtcgatatgagctcttgggggagatcagcctgttatccccggcgtaccttttatcctttgagcgatggcccttccatgcggaaccaccggatcactatgctctactttcgtacctgatcgacctgtatgtctctcagtcaagctcccttatgccattgcactctacgcacggttaccaagcgtgctgagggaacctttagaagcctccgttactcttttggaggcgaccaccccagtcaaactacccaccaagcaatgtcccccacttatgcggggttaggcctcagataaacaaagggttgtatttcaacaatgactccacaacgcctagcgacgccacttcacagtctccaacctatcctacacatcatttatccaaggtcaatactaagctatagtaaaggtgcacagggtcttttcgtcccactgcgggtaaacggcatcttcaccgttactacaatttcaccgagctcatggctgagacagtgtccagatcgttacaccattcgtgcaggtcggaacttacccgacaaggaatttcgctaccttaggaccgttatagttacggccgccgtttactggggcttcatttcaatgcttctggttacccataacatctccacttaaccttccagcaccgggcaggtgtcaggccctatacttcatcttacgattttgcagagccctgtgtttttgataaacagtcgcctggacctcttcactgcggccagcattgctgctggcgacccttctcccgaagttacgggtctattttgcctaattccttagccatgaatctctcgagcaccttaggattctctcctcaactacctgtgtcggtttacggtactggtactattaatctgaagtttagaggtttttcttggaagcccttaggcgcactatctctttgcccgaaagctccgagtactatcgtatttccccaaaaaccgtggatttgcctgcggttcttataggtaggtacttcaacgaactattccgtcagttcgcggcgctttcatcactccgtcaccccatcacaattaatagtagtacgggaatattaacccgttggccatcgactgtccctttcgggttcgccttaggaccagactaacccacagctgattagcatagctgtggaaaccttagtttttcggtgtgcgggtttctcgcccgcattatcgttacttatgcctacattttcttttctaaccagtccagcaagccttacgactcaccttctaccctgttagaatgctcccctaccacttagagtaatctctaaatccatagcttcggtaatatacttatgcccgattattatccatgcccgtccgctcgactagtgagctgttacgcactctttaaatgaatggctgcttccaagccaacatcctagctgtcgatgcagacagacctcgttctttcaacttagtatatatttggggaccttagctgatggtctgggttctttccctctcggacttggaccttagcacccaagccctcactgttatgaaacattatatagcattcggagtttgtcaggaattggtaggcggtgaagcccccgcatccaatcagtagctctacctctatataactttaaccataacgctgcacctaaatgcatttcggggagtacgagctatttccgagtttgattggcctttcacccctacccacagatcatcccaagacttttcaacgtcaacgggttcggacctccactatgtgttaccacagcttcatcctgtccatgggtagatcacacggtttcgcgtctaacactactgactaaagcgccctattcagactcgctttcgctacggatccgtgacttaatcacttaaccttgccagcaacgttaactcgtaggctcattatgcaaaaggcacgccgtcaccccacgaaagggctccgaccgcttgtaagcgtatggtttcaggatctatttcactccgttattcacggttcttttcacctttccctcacggtactggttcactatcggtctctcaggagtatttagccttagcggatggtcccgccaaattcagacaggatttctcgtgtcccgccctactcaggataccactatcgttatcttctattacttatacagggctatcaccttctttggctttactttccagtaaattctaattctatccgcaacaaataacgtggtcctacaaccccaacattgccgtaacaacattggtttgggctaatccgcgttcgctcgccactacttacggaatcacttttgttttcttctcctccgcctacttagatgtttcagttcagcgggtttgcccacctatcggtgtactatgtcttcaacatagtgggttgccccattcgggtatctacggatcaagtcatgtgtgctgatccccgtagcttttcgcagcttatcacgcccttcatcgcctctgagagccaaggcatcccccatacgcccttattttgcttattgtactttttctagccattagccattagtaattaaccattagtttttcaacttatgcctaatgccttttgtctaatcactaaaaagtgttctttctactttttaaatattttcttatctcaatatgtcaatgaactttaataaagtattaagtgttttgtattaagtattaagattttgtcttaatacttgatactatcatcttgatactatctcgtggagaataacggagtcgaaccgttgacctcctgcgtgcaaggcaggcgctctagccagctgagctaatccccctaatagattttagattttttgaattcagattttagattttgaattgtagttctaatttcttttggttgaatcctcaacttctaaaatttcctttactttaatgaacgtatttatcctttttttaatctaaaatcttaattctaaaatcttaaattaatttgttgtctcggacagactcgaactgtcgacccctacattatcagtgtagtactctaaccagctgagctacgagacactcttctaattgataatcaataattatcaattattttttattttgaactaacagcaaagagtaattgagaattttcttatttataaaactaaaaacatgctctagaaaggaggtgttccagccgcaccttccggtacggctaccttgttacgacttagccctagttaccagttttaccctaggcagctccttgcggtcaccgacttcaggcacccccagcttccatggcttgacgggcggtgtgtacaaggcccgggaacgtattcaccggatcatggctgatatccgattactagcgattccagcttcacggagtcgagttgcagactccgatccgaactgagaccggttttgtagattcgctcctacttgcgtagtggctgctctctgtaccggccattgtagcacgtgtgtagcccaaggcgtaagggccgtgatgatttgacgtcatccccaccttcctcacagtttacactggcagtcttgctagagttcccgacatgactcgctggcaactaacaacaggggttgcgctcgttataggacttaacctgacacctcacggcacgagctgacgacaaccatgcagcaccttgtaaattgtcttgcgaaaagtctgtttccaaaccggtcaatctacatttaagccttggtaaggttcctcgcgtatcatcgaattaaaccacatgctccaccgcttgtgcgggcccccgtcaattcctttgagtttcattcttgcgaacgtactccccaggtgggatacttatcactttcgcttagccactgagattgctcccaacagctagtatccatcgtttacggcgtggactaccagggtatctaatcctgttcgctacccacgctttcgtccatcagcgtcaatcaatttgtagtaacctgccttcgcaattggtattccatgtaatctctaagcatttcaccgctacactacatattctagttacttccaaataattcaagccaaacagtatcaatggccgttccatcgttgagcgatgggctttcaccactgacttatctggccgcctacggaccctttaaacccaatgattccggataacgcttggatcctccgtattaccgcggctgctggcacggagttagccgatccttattctcacagtaccgtcaagctcggtcacgaccgagtgtttcttcctgtgcaaaagcagtttacaatccataggaccgtcatcctgcacgcggcatggctggttcaggcttgcgcccattgaccaatattcctcactgctgcctcccgtaggagtctggtccgtgtctcagtaccagtgtgggggatctccctcttaggacccctacccatcgttgccttggtaagccgttaccttaccaactagctaatgggacgcatgctcatcttttaccgttgtgactttaatagtgtgttgatgccaactcactatactatgaggtattaatccaaatttctctgggctatccctctgtaaaaggtagattgcatacgcgttacgcacccgtgcgccggtctcaaatattgctattctacccctcgacttgcatgtgttaagcctgccgctagcgttcatcctgagccaggatcaaactcttcatcgtatattgtttgaagttagcattaatgctttcttctgtttttgatgctctagctttatttcaaatcttacgattcgctcttactctttattcttttgttttaaatatcgctatttaaaacggctgtcaattcaatatgtctaggaacttgtcttgcttttttttagcctcgtttgtgtctttatctgtttctcgaagcgggtgcaaaagtagtggttattttttaactggcaagctttttgataagtttttttgaaaatatttattctcgtttgcttttctttttcttaaccaatttgtcaatgaacttaatctcttgcgggtgcaaaggtagtttctttttactattttcctaatctttttaataaaatttttgttttattttttttcgattcgtttttaatatgtaataagaactgtgtgccaatgcgggtgcaaaagtaatacttctttttggttttgcaagctgttttttgactgtttttttgctttttgctttaaggttttggttttgtggtggttatctttgtttttttttgaagcgttgctaattgttgggggtatttaaggctttattgacatcgattgcgtttctttttagttgtcctagtagggtttgtgcttgctttctcctgttttgctgggttgcttaatgttttgtctttatatttttactccttatatataggtgtaggggttttgtgttatggaatgttgaatcttataacgcgggtatctttattttttaatgggttttgtattattgcatttgcagtttgtggtttgcaacgcagatgacacggatttgataaattaaaaaaaatggatttgtttgtttttggaaatagctgggtcaaaattttgaatgctgatgtgctgatgtgctgcgccgcgtgagggatagcagcggaaatcctttttttgaggcttttcgccgataaaaaagattgtagcgcatagcccgacccgaccttttcgggaggggcacgtccaaaaaattaaaaattaaaaattaaaaaacataccttatatatgatacttgttttatggggtttggggatctaagtttataaacttgtgtggaaatattaaaagtaggatatttgtcgtttaaaaatagatagaaaggcaagattattttgtggaatttatgaagttgttattgtctgaagtgatagtgggttattttggattgatttcttataaaaaaaatatttaatccttgtgcgtttcttaatttcgtatttattaattgaatttaaaagcgataaatgaaaaaagtactacttgccgaagatgattttgattttgctgatgttttaaaacaatatctggagctatataattaccatattacttgggctaaagacggggaagaagccttactcctatttgagaatgaaactttcgatatttgcgtgtttgatatcatgatgccaaaaatggacggttttacactagcccaaaaaataattgatatgaatcctgaaacaccatttgttttcttaactgccagaaaactcaaagaagacaaactaaaaggattgcaattgggtgccgatgattatattgtaaaaccttttgaagccgacgaattggtcttgagattaaacaatattttgaaaagaggcgagcaaaaaaatcaaacaactttttcaggcgatgaaataacaattggcaattatatttttgatccgaataggttagaattaaagttaggtaatcatacacaaaggcttacagtaaaggaagttgctattattttgttttttctaaaaaataaaaacaaacgcataaaacgaaataatattttgcaacatatttggggaaatgacgatttcttttcaggaagaagtatggatgtttttataagtcgaattagaaaatatttctctagcgacaaccgaattactattgaaagtattcgcaatgtaggtttagaatttaagattataacctaaaaaaaaagcagacctataagccggattctgttctcgatattactaacgataccttatcatttatctaggcttgcaattactcacaagctccatctttctacccttcagcaacggacgagaagcccttaactaccgatatacttgaaatttcaccgcatagagtttacctggtttcactacagcattacctgtacatactttctgttgcacttgtcctaaccccaataaattggagccgacgggtgttacccgctatgcttctctctggtgtccggactttcctcccccaataaattggcgacgataaggcggtctgcgctgcaaaagtagtttttttaggagccaatcccgctatccgttgcaatcttttttcggcgaaaagcctcaaaaaggattttcactactatcggggctagggcattgcggtaataaaacaacattttcacaaaatacctaaataaaaaagcgaccctttagaggccgctttaaatgttttcacaacggaataatccttattgtgaattgcttcaaaattgtagtacaatactacaactttttttttatatataataaaaatgtatctaaataatattaattatcttacatttatagttaaaaataaatctagacaactagaataattaaaatataaccaagtacaatgaaaaaaatattaggattagatttaggaacaaatagtattggatgggcgtttataaatgaggcagaaaacgagattgaagtgtcttcaattgtaaatacaggcgttcgcattgttccacttactacagatgaagaatctgatttcaaaaaaggcaatacaatttctataaacgcagatagaaccttaaaacgtggcgcaagaagaggtttgcaacgtttcaaacaaagaagagaagctttattagaaacattcaacagaataaaattcattgcgactgactttgtttatgcagaaactggcgcagcgacaactttttcttcttatcaattaagagctaaatcggctgttgaagccgttacaaaagaagaattagttaaagttttattaatgcttaacaaaaaaagagggtataaaagcagccgaaaagcaaaaactgccgaagaaggcgatgcaattgacggaatgaaaattgccaaagaaattttcgaaaacaatttaactccaggacaatgggtttacaattctttatcaaaaggaggtaaatttattcctgatttttatcattccgatttgcagaaggaattagaaaagatagttcgttttcaaaatcaatttcattccgaacaaataaatgataaattattagcagacattcaaggaaaatcaagaacgcagacttctcaacatttttcaaaaacattgaatattcctcttgccgaaaataaaggaactagagaagaaaccaaattgcaacattaccaatggagaaatgaagctttggcaaatgaactcgatatgaaaattttggcatttattattactgaaatcaacaatcaaattaaccaatccagcggttatttgggtgccataagcgaccgaagcaaagaattgtattttaatcaggaaacggttgggcagtatcaatacaaacaacttcaagaaaatgtacacgctaaacttaaaaatcaagttttttaccgtcaggattatttagatgaatttgaaaaaatttgggaaactcaagcaaaatttcattctgaattgaatgaaaaattaaaagcagaaattagagatataaccatattctatcaaagaaaactaaaatctcaaaaacatttagtaagcttttgcgaatttgaaaaaggacataaagccattccaaaatcgtcccctttgtttcaagaatttaggatttggcagaatttaaacaatgttgttgttaaaaacgaaactacaaaagaggtatttgaattgagtgaagagttgaagcaattaatcgccgaagaattgcagtttaaagaaagtatgaccgatgttcagatgttaactttttgcgaactaaagaaaggaactcataccgttaatttcaaaaaaattgaaggaaacagaaccaatacttctatttataaagcttttgaaaaaatattggaagtagaaggctatgaaatagatttttctaaaatgaaacctttagaaataaaagaaactgttgctccaatcttcgaaactttaaatatcaatactgttattttagattttgacccaacaattcaaggtaatgattttgacaaacaaccttattatcaattgtggcatttattatattcggcagaagatgatgataaattaaaagaaactttaaaaaccaaatttggtttcaaagaaaatcaccttccgtttattttgaatattaatcttcaagccgattacggaagtttgagtgctaaggctatcaaaaaaatattaccgcatttgatggatgggcatatttatgacaaagcttgtttaatggtaggttataatcattcctcatcattaactacagcacaaaataacgatagagttttaaaggataccttagaattactcaagaaaaatagtttgcgaaatcctgtggtggagaaaatccttaatcaaatgattaatgtgattaatgctattatgaaagatcccgcaatgggaaaaccagatgaaattcgagtagaattagctcgtgagttgaaagcaaataatgaacaacgaaaaaaagctacttcggatattaataccgcaactaccgaacacgaaagaattagaaaattattgcattccgaatttaatatacctagagtaactagaaacgatattattagatacaaactttggctagaaactggaggaatttctttatatacaggaaatccaattaaagcgtctgatttattttccaaaaattatgacatcgaacatattattccaaaatccagattatttgatgatagtttttcgaacaaaacgctatgcgaaagacagctaaatattgacaaaagtaacaaaacagcttattcctttttacaagaaaagctttcagaaaatgattttgctgcatatgaaaatagagtaaaagatttatttaaaacaggaaaaataaaaagctatacaaagtacaaaaaactcttaatggcagataacgaaattccagaaggattcattgaccgtcaattacgagaaacacaatacatagcaaaaaaagccaaagaaattttattggaagtttccagaaatgtaaccgcgactattggaagcgtaaccgataaattacgtcaagattgggaattggtcgatgtgatgaaagaactcaactgggagaaatacgacaaattaggtttgacccatattgaagaaggcaaaaacggagaacgattgtctaaaataaaagattggacaaaacgtaacgaccaccgccatcacgcaatggacgcgataacggttgcctttacaaaacctgcatacattcagtatttaaacaatttgaatgctaaaacacaaggtgaaaataaagctaattcaattattggtatagagaacaagcatttatatcgagataaaaacaacaaattacgtttcatttctcctatgaaaaactttagagaagaagccaaaaagcaactcgaaagtattttgatttcgtataaagccaaaaacaaagtagttaccaaaaataaaaacaccactaaaaaaagcggtggaaccaatcagaaaattcaactaacacctcgtggacgattacataaagaaacggtttatggaaaattgcagcaatatgctactaaagaggaaaaagtaaatgcgagttttactgaagactatattcaaaaagttgccaaaaaagaataccgtgaagctttgttaaaaagattggaagaaaatgacaacgaccctaaaaaagcatttacaggtaaaaatgctttaaacaaaactcccatttatattagtttaaaggacaatattatagttccagaaaaagtaaagacagtttggttagaaaccgattataccattagaaaagatattacacccgatttaaaaattgataaagtaatcgatgttggtataaaaagaatactccaaaatcgtttgaacgaatttaatggagatcctaaaaaagcatttgttaatctgggcgaaagcccaatttggctcaacaaagaaaaagggattgctataaaacgtgtgactataagtggtgttagcaatgcacaagctttacacaccaaaaaagaccatttgggaaatgaaattttagacaaaaacggaaacccaattccagtagatttcataagtaccggaaacaaccatcacgtagccatttacagagatgaaaaagggaatttacaagaagaagtggtttcattttatgacgctgtcattaggcgaaatcttggattatcagtaataaataaaaaccatgaaaaagggtgggaattcttattttctatgaaacaaaatgagttttttatatttccatcggatggttttaatcctcacgaaatagatttattaaatcctaataattatcatttgattagtcctaatatttttagggtacagaaaatttcaacaaaaaattatatgtttaatcatcatctagaaactaaagctgttgatggagaaatgttaaaatcaaaaaaagaattatctaaaacaagttatcatttcatccaaactccaacaaatttgaatggaattataaaagtccgcatcaatcatttaggtaaaattgttcatttaggagaatattaatttctagattataaattaaataggattgggctttagcctattcaacaaaaaaataggaataaacaaaaaggctttagccaaaatatttcggctaaagcctttcttaaatcaattattatccgcctccatttaaaaatggaggcaattgaaaaaggagtatagagttctaaaatcataatcgatacaattgataaaaaattaagataaattcaaattcatagaaatgggttttaaccaatttaacaatataaataatcgagatttactttagccaaaatatttcataaaccatttttaaatcgcaaaatatgataaaacgcacccttttttttggcaatcccgcttatttaagcaccaaaaacgagcaaattgtaatttcttatcccaacaaggagcaagaaaccaaaactgtggctattgaagatattggcgtaatcgttttagaaaaccaacaaataaccattaccaatggtttgttagaaaaactaaccaacaacaacgtggcgttaattaattgcgaccaacagcatttgcctattgggttgttaatgccgctcaacggacatacagaacaatcggaacggtttaaaaaccaaattaacgcttctgttccacttaaaaaaaacttatggcaacaaaccattagtgccaaaatcatgaaccaagcaggattgcttaaagaaaaaggaatcccgtgccgaaaaatggagctttgggcaaaagaggttacatcaggagatgcgcttaatcacgaatctagagcagctgtattttattggcaaagcctgattacggtaccaaattttaccagaggacaaaaaggaattccgcccaataatttattaaactatgggtatgcaatactgcgagccattactgcaagagccattgttagttcgggcatgttacccactttaggcatctttcatcgcaacaaatacaatgcctattgtttggctgatgatattatggaaccctatcgcccatatgtagatttgatcgtgtgtcatattatagatacagaggattcatacgatgagctgaccatcgaaatcaaaaaacatttactcagcattgccacaattgatgtatgtatagacggaaaaaatagccccttgatggttgccatgagcagaacaacacattccttacaggaatgctttgcgggagccgcaagaaaaattttataccctatttatgtatgacgaacattacacccgtttaaaccagtatagaagtttgtggatattagttttttttgacttacctaccgaaacgcggaaagagcgtaaaattgccagtgaatttcgcaagaaattattggacgatggtttttctatgtttcagttttcgatctatatacgattttgtgccagcagagaaaatgccgaagtacataccaaaagaataagaaatagtttgcccgaacacggcaaaattggagtaatgcaaataaccgataaacaatttggtatgatggagcttttttatggaaaaaaacctgtagaaacagacaaaccttcgcaacaattagaacttttttgaaaaataggatttagaaatattagacctaccagaatatcaacacacaaacagaactgttttttaatttcaaaataagcatataaccaccaacatatcaaacgattaactcgcggtatgttggtaattataagctaaaatacaattttgaaagcaattcacaacgctaaatatttcttttattttattttgcttgttggtaattataagctaaaatacaattttgaaagcaattcacaactattgaacagcaattttcatcagatgatgagttggtaattataagctaaaatacaattttgaaagcaattcacaactacggcattcaaaccccccatctattactgttggtaattataagctaaaatacaattttgaaagcaattcacaacaaagacttatttaagtctaaagaagtgcctgttggtaattataagctgaaatacaattttgaaagcaattcacaacgaatgcgtgcgctgtatgtatttcgttttgttggtaattataagctaaaatacaattttgaaagcaattcacaacaatgtgtctattgtgaatacattacctactgttggtaattataagctaaaatacaattttgaaagcaattcacaacacggaataaacggaaacgagcaacttattagttggtaattataagctaaaatacaattttgaaagcaattcacaacattacagttgctttaaataaaaagtaaaagttggtaattataagctaaaatacaattttgaaagcaattcacaacaaaacaatcatctatgttgctaaatcttttgttggtaattataagctaaaatacaattttgaaagcaattcacaacgaacacataacaggacacaaggcattggctgttggtaattataagctaaaatacaattttgaaagcaattcacaacactttgatatacgacatctcgcttactggagttggtaattataagctaaaatacaattttgaaagcaattcacaactaagttttcctacttaaccattttttaaaagttggtaattataagctaaaatacaattttgaaagcaattcacaacatagtactttgatttcacgtgcgaaaacggttggtaattataagctaaaatacaattttgaaagcaattcacaacggtggcaatgtgtattcaaacacggatatagttggtaattataagctaaaatacaattttgaaagcaattcacaacggagctggttcgggtacaattacattaaatgttggtaattataagctaaaatacaattttgaaagcaattcacaacattctctttcagtttttcgatattgtttttgttggtaattataagctaaaatacaattttgaaagcaattcacaacctgtcgtacgctctagtattagatatatctgttggtaattataagctaaaatacaattttgaaagcaattcacaactaatatttagcataaatttataatcgtcctgttggtaattataagctaaaatacaattttgaaagcaattcacaacagtgctaccttcgataattagcgcattaatgttggtaattataagctaaaatacaattttgaaagcaattcacaaccacaaatggggaatttgacgaaaacaaaagttggtaattataagctaaaataacccgttgggtgtaattaaattatttgatgacactatcccgcaaagtgtgtaagttaaaaagttaggcttggattttataatctgagccttttgtcaaatataagattaaattgatttaaaacaataccccaattttgtattggcattgaccatttttttgttgcttcttttaaagctaaataaactgattttagaaccgcatcatcagtagggaatgacattttatttttagtgtattttctaatttttccatttaaattttctattaaatttgtagtatagattatttttcgaatttctagcgggaagtcgaaaaacacggttaattcgtcccagttttctctccaggatttgatggcataaccatatttggattcccatttttgagcaaaatcttccaaagctaatgcggcagcttgttttgttggtgctgtataaacaagtttcatatcggttgtaaattgttttttgtctttccataccacatatctacaagcgtttctaatttgatgtaccacgcaaatttgtgtttgtgattcagggaaaacagcacggattgtttgggtaaatccgtttaagttatcagtagctgttatcaaaatatcctccactccacgagcctttaaatcagttaaaacattcatccaaaagctagaactttcattttttcctagccacataccaagaacttctttgcgtccttcacgattaagtccaacagccaaatagatggttttattgatgactttagagttctctcttactttgaaaacaataccatccatccaaacaattaaataaagatcatctaatggtctgttttgccaagttacaacttcgctcgatactgcattggtaattcttgatatcgtggatgtcgaaatatcaaaatcatacatttcttttatctgttcttctatatcactaacgctcattccttttattttagccccttaataaatcggagtgatattttaaatttcaaatagtacatttgagatatgaaatacaagaaatggagcttagaagaaaagctagaaatcctatcctcttcagaagaattaggagttgttgaaacctgccgcaaatacagcgttagcactggcactttgtatagctggaagaagaaacatgagaagcagggagaagctggtttaaaagtaacttatgatactagtagtaaagagctaaagcaagctgaggaagaaaacagaattctacgcaaattattagctaacaaggaaatcgaattagaaataagtcgtgaacttttaaaaaaaaagtttggaacatccgatccaagaaagatttagtagacaatatttatagtaaacataagattagtaaaaccaaaattatcactatgttaggcatggttccaagtagttattatcgaagaccaggctcaggtaagaaaggtaataaacctagtgaatttacttttaatgaatctaaaggatatgtaagtcaagatgttgttattgaatctgttaaatccattttaagtaatgaatttattgactgcggttaccgtttaatgagttgttatttaaaacgagaaggttacttaattaatcataaaaagctgtaccgaattatgaaagaggaaggtttattgaaactagaaaaccgaataaacaagagtggttctggtcgtaaatttgtaaaatatagaaaagtaaacaccactaaaccttttgaatgtttagaaatggatattaagatggtttggattccaaacgtaggtaaaaatgcttatttactatccataatagacgtacatactcgcagaatattaaaagattttttctctttcaatatcaaacaagacaaagtaattgcttttctttcggatttatttttagaataccaataccctgaaaatgttgtgataagaagtgataatggaagccagtttattgccaaaagtgttcgggaataccttggatttattggagttcagcaagaatttacccatgtagcaacaccagaagaaaatgcgcatattgaagcctatcatggaatactaaaaaaagaagtgttccaaagagttgattatagaacttttggagaaattgaactaatactaaaaagatatgtgattttttataataataccaggctacatggccttttaggacgcattaccccaatagagaaatggaaccaagataaacatctaattttaatgaaaaaattaaccgcataaataataatcgaaatttagaataatactcttgttttataggggtcaaaacaccatttacttttatgatgttttacgtcgacctcaattgcgatttcctgtgtttgtggttgaattattttaatttcaattccttttgatctaaatatttgtttaacatttgaatatattaataatccattataatcccaatcacaaaaataatatattggtagttttaatttgtcttgagaaatatcttctaatggtttggtattattacctccaacataccataactctatattatgatttttatattctagtggaacttttagacaatcaagattctcacaaagcacaatgacttttggattaaggcaatcaactacaaatctccattgattattttttgggtctttttctggaaattcagcaagttctaatatttttaaaattgcatttttaacacttaatttattagataagcatttagaattttgatttttataaattaaagcagataactttttctctgtagttacattcttttttaattcctctttgttataaaaaacaaacattaatgcttttatatcttcatcattaaaagattttttagcatcattttctattccagatttttcaaaaaaattattataatattcataggtttctaaaaattcctgctggtaatactcattaaatcttgatgatgcttcgataatagaatgatttccaaccttatattttattagtttcttttgtttaaaaatgacctgattaataaaatcattgttggttatttttaatcttgtttgctttgatttataaagttgatgcaatccttttatatgtttccattcaattttcttcatattttaattgtttgatgatccaaaaattggcactggagtgtagtttatattttcatcttctaaactattgtgcaacaaataaatattttgattttctgcatcaattttattgggatttatcgataaagataaaatttggtaatcatttgcttttgcaatattataaagcatatcaaaattacttccaagaccttctgcctcatcaatagccatataacgaattccttttcttattttcgatttcgaagttttatcgattaaagataattttgccatacataaaagtgctattgctgaatatgtttgacttgtactaccagcagttttgttcccttgtgctgatttaatagaaaatttcaacccataatatgattttggattcaataaatccctaacttctagtttgttcgctcttgttccaccagttcgataaaatgcttcttttaatttttcttccaaagttggaaaactttctaattctgttgaaaatgttttaagtgtttcaaataatgattcatccataccgtattgaatatctttatttatttcttcggtaaaattattcatccattcttttttgaaaacattatcatatataacatctaaatcaactttgtgacctccagttattttcttttcttctgaattcaaaaaattacttattattcttatatccattaattgactacttacttcatttgaaacatcgtcgataatctcacttaatttttgaagctttcggctatttagctttctatttttaatatttatatttcgtaaataattagaaatattttcaattatatctgcgtctaataaatctttttcatcaaatatttcttgaggtagaatttctctgcataaaggactaaaatcgccagtgtctttatattgattattcttctgtttaagaaaagtatagactacaaagttgtagtttgaaatataatcattattagcattattagactttttttctaattcattaatttcaatatcttcataaatatccattactatttcttctgtaaatagattagggttttgactataaatctcatttttcttatgtttaatatttgaaatttttaaatctatttcctttagagattctgtttgattattattacttatttgagtattgtaagcttttttcaattctatataataatcttcggcttcgtttaattctttatttaagctgtctaaatcaagatttttagttgatataaaattatatttatttttataatcatctatttcatcaataattattggtgttaaaaatgattctaattcacgttctagattgatatttagattgtctaattttcgcttttcgacttctaattttctgaaatttgttctcgcatttgtaaactgttcattaatttctttttctcttgaaaaagcatcaaaataatcatcaaagaagatatttgaaacttcatacatttcgtgattttcaagttgttcttctagtccaatatctgaattaaaagcaagtatataatcatcaggactttctaattgttctaaaacttctatgagcaattcaatgtttgctaattttctctccaaatttaaaatgtcttcttcaatcgtaaaagtttgtttttgaaaatattccttaatttcttctttatcctccttgtcaaaaattggtgattcaattaaagatatgtgttccattaagccatttagatcaatccaaaaacctttgtcatttttatttgatattttaagattttctattaattgatttggttccggaatatatcttaataaatcatctaatggagcatctacttttatattttcattgtggtatttatgaattatactttcctggaataaatctaattttttagtttgatttaaagcccaatgtgctaatgattttttatcttcaatattatttaaagcttttaatttatttttaatttctagctcttttttgtaaacttctgtttttgaattaatttgtacaagtacatttttaccctttaaattttcatttgtaaaaaaagtcaaaatgttttttgattttaacttttcagtcaattctcttaattgtgttatttgaagtttattttgatggtatttattatatttttcttttaaaatttctttttcagaacaattaaaatcctgtaaccaagagaaaaacttttttaatttcttttcactttcttcccatttatttttttctataaatgcagtttcccattttggatctattatttcaatttcttcttttgttgaaattattttttcttggacaattgtttttaattggatgagtattttggaactatcttcataaagattaattttctctcttatttcattttctgaattagtaatttcctttgaatagtggttaaaagaggctaataagtaaatctgttcgtttttatctttttcatttttcaatttcaacaattcacttaacgcattttgcttatcggtgagtaattctatttcatttaagtttttatcaaattctttggtgtcaccattcaattctttgacggtttgattaaatttttcaagtaattctttttctttttcttcaccaaataaaaaactttgtaatttttcactcttattcatatccaaagattctctagaaaatgcttgaataattttggcataattgtctaaagttttattactgatagacaaatcaataggcaatatctcatttttgaaaagaattttatgataatttgaagtcttatgccaagattcacaagttagttgcaaagtattactgatgtgttctttcaaattttgaattggtaatatttgattgtttttgagaaaatcggaataccctaaaacagtttcaaaaggaatcaattgagtatcgtcatcaaaattattaccctcttgaataataaacatatttgaagtaccagcactttctaaataaataccaataactataaatttatttttctctacctcaacatttataaaagcataacccatatcagttccattaccatcagttcttaaaaccatagttttaggttctctcgtacttgtaccttttgtaggagaatgaaaagccgaagtaccaacacaaattaattgtaaaatatcagaaatcatacttttaccagcgccaccttcgccaacaaaatcagttctgaacggattaaaatcataatcaaatccttgatggtgtactattcctaaagttgatagtcttttaattattggatagtctttcatttcaattcgtttagtgtttcctctatgtttatgatgtactcttcatatacttttagcaatctgtcgaatgcaggtaatgtatgaaactcatctttatctaatgttatccaaccaatttttttaaattcttcaagagccgattgaatcgttttatcaattatttcatcattgtaattaccaggagttgtattctttgatttagcaattaaagtataaataccttgcttgtagtcttcacattcaagacggattttttcttttaattttttaacagaatctaaatcaaattctcggtcaataaacataattttataaattagaaatccaataattacatactcacttttcagcatatacctgtgtttatcagagatatttccacgatcattatttataaaatctaaataataatagcttgcattgtcttcgcctcctttaactaaatcgactttaaaaaaggcattgtaatacattttaagactttcttcattttg

SEQ ID NO: 1541 - DNA, 24062 bp, synthetic construct
  misc_feature 1..24062: note = Synthetic
  source 1..24062: mol_type = other DNA
caatactctatggttcaatgtatgaagatcaatggtttgtacccaaaggaaacagttggtctgcccagttcatgaaagatgctaaagccaattatttgtgggcagaaacagaaggtagcggtagtcttgccttgtcatttgaggtggtgctagacaaagcacagacagctcaattttggatcacgagcagttcattcaagaatttgaaggacatgagcactgctaatccacattatgctcaatttgacgctttcaaacacaaaaacgtctatacttttgaggcgaaactcggtgctacaggtggtgctatttattatgaattagcaccaagtcgtcctgatttagttttaaaagattatatcaaaatagtgcatcccgacttacttaaagactatacttttacctttgcacaaaaacttcaataacattggaaagtaaacaacataccaccttattatttgctacaataggtattgcactcttaagcttatttttcatgaacctcagcttaggatcagtgcagattccgcttcgtgatatttttcaaagtttgaccggcgggcaagcaagcaaatcaacttgggagtacattatcattaattaccgcttacccaaagccataacggcaatattggtcggcatgggactttcaataagtggcttactgatgcaaacacttttccgaaatccactggcaggcccgtatgtattagggctaagctcaggagcgagtttgggtgttgcatttgtaattttgggagctggattattacctccttttttgtctagcattctgttgtcctcttacggaatggttttggcttcaactgcaggaagcaccttggtcttggtcgctgttttggtagtagcgcaacgcctgcgcgatacgatggccattttgattgtgggcttgatgtttgctagctttacctcagcaatagtaagcactcttacctactttagcactgcagaacaattacaaaaattcactttctggtccatgggaagccttggcaacttatcttggaatgctataattatcttaactatttcggtactgattggtttgcttcttagtttgtacagtatcaaacccctcaatgctttattattaggagaaaactatgccaaaagcatggggctgaattttgataaaacgcgttttgtaattattctgtctacaagcattttagccggaagtattactgcctatgctggaccaatagcctttgttggacttgctgttccgcacattgccaaacttctttttcagactagcgatcatactgtattattttggagtacgttacttttaggagctagcatcatgctgttgtgcgatagtttatcgcagcttcctggttttgaaattacgttacctatcaatgctgtaacgtcgttgtttggagcaccagtggttatttggttattggtacgaaagagtaactagatatttatttaaaaggtttttaaacacatagattcatagattttttttaaatgtaatagtaactatagagttcataatgtaaaaactaaagtttttcatagaggtggtaaatagaaaagttcttaggtactttatgttttgctgaaactgtcaaaatattctttttttaaacacatagattcatagatttatttttatgattttagtagagacgaaagagttcatagtacaaaaactaaagtttttcatagaaatggtaaatagaaaagttcttagataattttgaaactgtctctttttttaaacacatagattcatagattttttttttaaaatatagtagtgacgaaagagttcataagataaaaactaaagtttttcatagaggtagaattaagacacaataatggtatgataacacagaaatatttagatgaactgacctacgaagtaattggagcgtcgattgaggtacatagaataattggacgtggtttgcttgaaacggtgtatcatcaatgtttaaaggaagaattgtcaatccgaaatattaattttaaatctgaaattaaaattccgttaatttataaaggaaaagaattggtaactgactttaggtgtgatttcttcatcgaaaattgtttggttgtagaattaaaatcagttactcaaatgattccgatctatgaagctcaattgcaaacctatatgaatctcttaaaagcaccaaaaggaattctactaaattttaattgctttaatctcttcaaagaaggacaaaaaacatttgtaaatgaacattttaaaaagctacctttaaaataataagttgattttgaaaactttaagccaataaaaagctatatccactatgaaagtaaatcgcctaaaataaacacaaacaattctatgattctatgtgtttaaaaaatatgctttttaaaatttaacataacgctatgtaacctatgtaagtgaaacgcctaaaaataaacacaaacaattctatgattctatgtgtttaaaaaaactgactcaaataagcaaacacaacactatgtaacctatgagagtgaaacgcctaaatttaaacacaaacaattctatgattctatgtgtttaaaaaaaatgctttctgagattaaacaaaacgctatgtcacttatgagagtgaaacgcctaaatttaaacacaaacaattctatgattctatgtgttaaaaaaattaaaagtgatcaattgaaaaatcaattacagaatagcaaacacaacactatgtaacctataaaagtgaaacgcctaaaataaacacaaacaattctatgattctatgtgtttaaaaaattctaagattaaacaaaacgctatgtaacctatgcaagtgaaacgcctaaaaataaacacaaacaattctatgaatctatgtgtttaaaaataacgcctaaaaataaacacaaccaattccataaatctatgtgttaaaaaaaagataataatgacaaataaaaccatcctcaaagcagccaacctcggcattggatacatccacaaaaaggaaaccaaaaccattgccacaaacatcaacctagacttaaagcaaggttcactaatcgctttagtgggtggtaacggaatcggtaaatcgaccttattacgaacattaaccggaattcaaaaaccgattgatggtaaagtactgctaaacgatcaagcaattagtagctacagtccgctggaactagcgcaaaacctcagcgttgttttaaccgaaaaacttccgcctagcaacttatccgtttatgaattagtagcactcggtagacagccttacaccaactggatcggaaaacttacggcaaccgatgttcaaaaagtacaacacgccatggaactgactcaaatagaccatttggcaacaaaaaaacattttgaaataagtgatggacaattacaaaaagttttggtagcccgtgctctagcgcaagacacaccgctgattgtactagacgaaccaaccacacatctagatttgcttcacaaagtcgctttgttcaaacttttgaaaaatcttagcaaagaaacacaaaagtgtatactattttctacacacgatattgatatggccatccaattaagtgacgaaatgattattatgaccccagacaattgcgtgcaagatcaaccttgcaattttattgcaaacggaacctttgatactattttcaaagacgatcatattgctttcgattcagaaaaagggaaatttataattcgaaattgataatacctttcaaaatcacttccactataatcttcatgtaattcttattaagtttctatttcattttggatatgtataatgtttcactaattttacgccccaatcttaaacttaatatgaaaagaaactttaccttatttaccaaaacagttgtcctttttggtgtgctactaatacaatcttgtacagatgatgtcgtagtaccaaacaacattacctacctattaaaaggaaaaattacagaaaccaaaatgcgcatttatgcaggaccggaagtggctgtaggagatggtctagcgcgtacttgggttacccttgactccaaaggatatccaatggaaattgcaatcgaaattagtgaagatgcgataaaaaaccctggtgaagattctgaaatggacatggccgacggagctatggaaatggaacacggtcaaatgattatgttgcccttacattcacaagcacaaaaatcgactccttttaaccacgtaggtatcaactggaacccgcacggacatccgcctgcacaagtgtttgacagtcctcattttgacttccacttttacaccattccactagaggagcaattggccatccctggttggtctaccgctacagatgcactttttaacacctatccagacgctgcttttttacctgccaactacttcacgcctccaggtgccgataccgccgaagcgcaaatgggaaaacattggatcccaactaatattggcgattaccttcctttttcaaaaatactagtttacggtagctataacggaaaagtgaactttattgagccaatggtaacacaagcgtatctacttcaaaaaatcaatacgagcgaaagctattcacaacctttaaaagtacagacaaaaggaaactaccctacaaaatataacatctaccacgatacaaaaactggaaaaacccaaattactttgagtgattttgttacaagaaactagttagtattcgaaataaaaaaaagaggaagtcaccacttgtgctccctctttttttttgaatacgattttctactcaatataattcactctcaaaaactaggaagttttcattgcctcttcatctagcagctcgctaaagtattttagaccaaaacagtagctttcgaataaaacttctatttttaggagcattttccagctatccgctatattcccaattaacaaaaactacggcaaaaaagccttgtttttctaaatcgagagatgccgcttctatctgggctaggcactagcatacaatgaactatcgcactcctatttgacgttttgcctctcctatcacaaaagcaaccgagttagcgatattaaaacttctaatattctttgacatgggtatggttaaatgattctcaaattgtgctaagacatcagcactcaaacctttactttctttaccaaaaaccaaccaatcaccatcctggaattcgatatccaaatacgacttttcagcatgcgaactcattaaaaacactctcgaaagatccggaatttgtgctttccaatccgcaacagtattatattctgttacatcaaggtgtacccagtaatccaatcctgatcgtttcaaatttttgtcatttatcacaaatccaaaaggatgtaccaagtgcaagcggctttctgtacccacgcacaagcgaccaatattaccagtattgtttggaatttcaggttctactaagacgatatttaacattttaaaaaagtttagggtttagggtttaaagagacttttggtcgtccgcagaaaaattagctacttcgataacatcacctgcctttaacgattgcaaatgtacgtttcctattcgaactctaaccaatcgcaatgttggaaaaccaacagcagccgtcattttacgaacctgacgaaacttgccttcattaaccgtaattgctgcccaagttgttggtccatgacgctcatcgcgaatttttttccccctaggaccaaaatccggaatttcagtaatcaaacgtgcttcacattttttagtggtgtactttccgccatcaaagcctatttcgactccttccttaagtaaatcaatcgcttcttgcgttataatgccatccacttgcacataatattccttctccacttttttagacctaatctcttcgcttacctttccgtcagtagttagcaacaataagccttcagaatcttcatcgagcctgccaatcgccatagtcccaacaggaaaatcatgaagctcgcccaatagctttttctttcgtttcaattcgtatataaattgactcaaatatccgtagggtttgtggataataaaatgatgatgatcagacataaaaaaaatttgattgcaaagatagtgttgttttagaacttgcttcgcatacaactttcttttttcacaaaagctgttattaaacagtaaaaaccgcatatctactggtcattcgcaccaataaaattggcatccaaattgacgttttaataatacttgcttaactttgaacaatgtaaatttggatcctaaaacaaaattttttaccgcttatgaaacttcattacacatgcaaaactgcgtggacaatttttgcattttttgcaactattgtcgccaccgtgcaagcacaagctacaatgccaactgcacaaacaatcccttttagtcaaaattttgatggcttagcaactaacgctactgtctatccagcaggttttcaaggctggaataccgattcttcaccaggatctacctataacactagtgctatacctgctggtgacaaacctttagcccttggatcggcatcttcttcagcaggagcactttataattataatggaaaaattggttttctgaatactactcctcttgataatacaattgcctttgcgtttacaaccgctggcaaaagtgcaattcaagttcagtacgatgcaatgaccatacgcaacccgtacagcggatctaatactcgaatcaacgaaatggtcttgcaataccgagtaggcaattctaccgcttttatctcattgccagatactgcctatagtaacaacacaactttagaaaataccagtggaggcactaccccacaaaatcttcaaacgattaaggttacacttccttcggaatgtgacaataaaagtcttgtacaaatacgatggatttctaggcaagtatctggtgctggctcacgaccatcatttgcaatcgataatatatcggtaataaatgatataacaccacctgttacagctgctagtttcccaaaagcgtcatctattctatcagatggttttgactttagcaaccaaattaatgaaattggaaaaacctattatgtggttgtacctagtggcagtgcagagccaagcaaattacaattaatgaatggtcaagatgctaatggcaatgcagccttgagcgcaggagtactaacggttgccaacgcaaaccaaccctatactgctaccataacaggtttgacaattggcacggcttacattgtatattcggtatctgaagacgcctaccaaaacttacaattaactactaatagcctaaatgtaagtacgtcaagtaccttagttccttccattaaaatcacaacagctgcagtagcttttggatttcaagaacaaggatttgactctagtgctatgacctttaccttcaaaggatcgcatataacaagtaacgttattgtaactgcccctgcgaactttaacgtgtcaaaagacaatattacttttgactccactgttcttttttctgcagccgaatttttatcgaatgcaactcctactgtttacgttcgatttaaaccgacaaatacgttggcatacgctggccaaattttgatagaaagcgatggtgcaaccagcaaaaatattgctgtatcaggaaaaggaatcaacccttacttacaagactttaatgatcccgaagtattaaccaacagcggatggacgagctacaatgagcaaggaacaaacaattcttggtcaactacaacaactgcccgcaacctaaacagtgctcctggtgcggtagtgatgaacggttattctgataatggtgcaagcagtgactggtttatatcgccaaaattgcatttggacagcttcagtcagtttgcccttttgtctttctatagtcgaaaatattatagtggaccaagtttaaagctaaaggtttctacagattatgatggcgtaagcagtccatcaacagctacttggaccgagattcaaggtaacttcccaacaactactgatatttacacaaaatcagaattcattaatttgaatgcgttcaagacatcacacacctacgtagcgtgggtatatgagactactgctggaggtccaaacaatgcagccgagtggtctgttgatgatattgcaatcactaacaatgcagcctttttagcagccaatccagaactggattttgaagatgttacggtaaacacgatttctacttcaaaatcatttacagttgtagcaggtggatatggtccaattactgtagccgcaccagctgattatcaagtatccctagataattctacatttacaagttcagtacttatcagtgaatcagatgcattagccggaaaattggtttatgcacgctttactcctacatcaaaatctattgcgatcacaggacctattaccgttacaggaactggattaaaccaagcaaaagggttcttaaaaggttcttctttaccaaaatcagaaacttttgatattgtaacttacaacttagagttttttggtagtgaagtaattggttctactggaaccgaatttggccctgtagatgatccattgcaaattgacaatgtagccgcagtaatgaacaaacttgatgcagatatttattgcgtacaagaagtatcagatgatgcagctatggaaacgctacttacaaaaattagcatcaacggtaaaacgtttgccaagtcgatttcaacctcatggtcgtactctttcaatgcaccaactgccgactttccgccgcaaaaattggttgtactctacaacactcaaacggcttcggtaaaaagcaccaaagtactttttaaagatttttatgaccaagtacgtgccggtacagcaacattaccaaattatcctgatagcccttcaagcttcttttcgtctggaaggttaccttatatggttacaatcgaaaccaatcttggtggcgtgaaaaaagacattagcttaatcgatcttcatgctcgtgccaatagcggatctgacattaacaagtacaacatgcgtaaatacgatgccgaatacctaaaagatgctttggatgccgaatatcctaacgacaacttagtgctacttggtgattttaatgatgacgtaaaaacatctgtaattgcgggtaacgactcatcttacaaaaaatttgttgatgacaccacaaactacaatgcattgacattaggaattagccagcaaggtgccttcagttacttgagttcaaacggtttcttagatcatatcattatttcgaatgaattaacagcggactatattccgaattcgactgctgtttacgatccacgtaatgatatatccaattatgtaaacacaacctctgatcatggaccagtgattgctcgtttcaaccttcaaaatacactttcaacaaaagcatttggtacggaggtaaactatgcaaaactttacccgaacccaaccaaagatgttgtaaacttcactcttaccacacctacttctgcaactgtaacgttcaaattatatgatagtttaggtagagaaatcggaactgataaagctataaatgcaaacgctagcaaacaagcctctgtaagtttgagcactgtacctgctggaacttatttttatactttgacttcagccaacaaaatagttcaaaaaggaaagctgatcaaggagtaaaatctttttttatatttgcttaaaaagccagattcttcgtttagagaatctggcttttttgtttttaagcaaggcgaaatattaattagctgaaataaaaaaagcgacaccagttaagatgccgctttgaatgttttcacaacggaataatccttattgtgaattgcttcaaaattgtagtacaataatacaacaaaaattttaatattggtttgcggtttcccgtaaggatagtaattttcttttcattatttttagaaaattaaaataaaacagaaaaaccatcataattacaactataaaaaatgaaaaaaatattaggattggatttggggactacatcaattggatgggcttatattaacgaagcagaaaatgaaagtgaaatttcttcaattataaattctggagttagaatcgtaccattgactacagatgaagaagccgattttaaaaagggtaatactatatcgataaatgcagaccgaactttaaagcgtggcgctcgaagaggattacaacgttttaaacaaagaagaaatgctttattacaaactttcagaggaaacaattttataacttccaattatgtttatgccgaaacaggcaaacaaactactttttcatcttataaattacgagccaaatctgccacagagcaggtttcaaaagaagaattagttcaggttctactaatgctcaacaaaaaaagaggctataaaagtagtcgaaaagcaaaaactgctgaagaaggagatgcaattgacggaatgaaaattgccaaagaattaaatgataagaatcaaacacctggcgaatggatttataattcacttttgaatggaggtaaatttgttcccgaattttatcgctcggatttgcaaacagaattagaaagaattatccgttttcaaaatcaattttatccagaaattttcaattccaaactacttgaagaaatccaaggtaaaacaagaaccgcaacttcacagcattttaccaaaatcttaaaaattgaactttccgaaaataaaggtactagagaacaaactaaattacaacattacaaatggaggaatgacagcctatcttgtgcattagatctaaaagttatagcgtttattctaaccgaaatcaataatcaaattaaccaatctagtggctatttaggagcgataagcgaccgaagtaaagaattatattttaaccaagaaacggttggtcaattccaatttaagcaattggagcaaaattcacatgcaaaactaaaaaatcaagttttttacagacaagattatgtagatgaatttgagcaaatttgggaaacacaatcaaaattttatcctgaattagatgaaaaattgaaaattgaagttcgtgacataactattttctaccaacgaaaattaaaatcacaaaaacatttagttagtttttgcgaatttgagaaaggacataaagctattcctaaatcgtctcctttatttcaagattttaggatttggcaaaatttaaacaatattgttgtaaaaaacgaaaccacaaaggagcctttccttttaggtgaagagttaaaaaataatatcgctcaagaattactatttaaagaaagtatgaccgatattcaaatgttaactttttgtgagctaaaaaaaggaactcatactgttaattttaaaaaaattgaaggaaacaggacaaacaccgcactttttaaagcttttgaaaaaattttaacaatagaaggttatgatttagattttactaaaatgtcacattcagagataagaaacgcaatatctcctttgtttgaaacaataggaattgatactagtttattatattttgacaattcaattgagggtaatgactttgacaaacaaccttattatcaattatggcatttattatattcagctgaagaggatgaagttttaaaacaaactttaatgaaaaaatttggtttcaaagaaaaccacatcccttttcttttaaatataaatttacaagccgattatggtagtttgagcgcgcgagcaatcaaaaaagtacttcctcatttgatggatggtcatatttatgacaaagcttgtttactaactgggtacaatcactcttcttcactgactacagaacaaaatgagagtcgaattttaaaaaatcaattggaattattgaagaaaaacagtttacgtaatcctgtggtcgagaaaattctcaatcaaatgataaacgttatcaatgcgatcattgaagacccaaatatgggtaaacctgatgagattcgagtggaactggctagagaactcaaagccaataatgaacaacgtaatgagatgactaaagcaataaacaatgctacaaaaactcatgacgatattcgtaaattattagctgtagaatatgggattgctagagttacccgaaatgacatcattcgatacaaactttggaaagaaactggtggaatttctttatataccggtaaaccaatcgagccctcaagattgtttaccaaagattatgatatcgaacacattataccaaaatccagattatttgacgatagtttctccaataaaactttatgtgaaagaactttaaatatcgaaaagagcaataaaactgcttattcttttctacaagaaaaattgacagaagaagaatttgatcaatttgaaaaaagaataaaaggaatgttcggtaaaattagtagaacgaagcaaaataaattattgatagctgacaatcaaatccctgaaggtttcattgatcgccaactaagagaaacgcaatatatagccaagaaagcaaaagaaattttactagaagtctcacgaaatgtaaccgctactatcggaagtgtaaccgacaaactgcgtgaagattgggaattgattgatgttatgcaagaactcaattggaataaatatgacaccttaggtttgacctatgaggagaaaggaaaaaatggggaacgcttgtataaaattaaagattggacgaaacgcaacgaccatcgccatcacgctatggacgccattacagtagcttttaccaaaccagcttatattcaatatttaaataatttgaatgccagaacaaatacagataaaaaaggtaattcaataattggaattgaaaacaaatacttaaaaagagacaagaataacaagctacgttttatagaacctatgcctaactttagaagcgaagcaaaaaaacaacttgaaagtattttgatttcgtacaaagccaaaaataaagtagttaccaataataaaaatatcactaagaaaattggaggtaccaatcaaaaacttcaacttaccccccgtggtcaattacataaggaaactgtttatggtaaaatgcagcaatatgccacaaaagaagaaaaggtaaatgctaatttcactcaagattacatagccaaagtagctaaaaaagaatatcgcgaagccttattgaaacgtttatcagaaaatgacaacgacccgaaaaaagctttcactggtaaaaactcattagcaaaaacacccatttacattagtttggaagataacattgtagttcccgaaaaagtgaaaatagtttggctagaagacaattatactattcgtaaagatattactccagatttaaaattagagaaagtaattgacgttggtttaaggcaaattcttcaaaatcgcttgaatgagtttaagggagatgcaaaaaaagcttttgtaaaccttgacgaaaatcctatttggcaaaacaaagccaaagggattgctatgaaaagagtaaccattagcggggtaagtaatgcgctggctttgcacaccaaaaaagataattttggaaatgaaattttagataaagacgaaaaccctattcctgttgattttgtaagtactggaaacaatcatcatgttgccatttatagagatgaaaaaggaaatttgcaggacgaggttgtttctttttatgatgctgtggttcgtaaaaaccttggcttatctataataaataaaacgcataaatatgggtgggaatttctattcacaatgaaacaaaatgaatattttattttcccatcagattcttttgatccgcaagaagttgatttatttaatcctgcaaattatcatttgattagccctaacatgtttagggtgcagaagttttcaaaagttgaatatggaaatagttctgttagagattatgtgtttaggcaacatttagagaccactttaaatgataaaaaagaattaaaagacattgcatttaaatcaatcaaaagcttaccctatttttcaaatataattaaaatacgaattaatcatctaggacaaatcgtccaaataggagaatattagtttaaaaacgattaattgaataggattgggttttaacccattcaacaaaatacaaacacacagaacaggctttagccaaaacacttggctaaagccctttctaaaatcaaatctttaatccatccatttaaaaatagaagcaattcaagaaaaatttaaatcatttaaaatctcgatttatgccttatatcaaaacctatatccattttgtttggagtacaaaaaatagagttccctttttagacaacaaagaattaagacaaaaagtttggcgtcatatcaaagaaaatggtgataagaaaggaatttacattgattttgttaatgggtattctgatcactgtcactgtctggtttctttgggagcagatcaaacaatccaaaaaaccatgcaattaattaagggagaatcttctttttggattaatcaaagtaaactgtgtttgaataaatttgaatggcaagatgaatactttgcagtttcggtatcagaatcgatacttgacaaagttagaaactacattaaaaatcaagaggagcatcatagccaacatacttttgcagaggaatacaatgaattcataaccaaatataaatttcaaaaggaataaattttggctaaagccattgttgcactttcacatttcacctccagctaaaggtggaggcaattcaaaagctagagccacttcactttatccaaaatattttaaatgaattttaaatcttaaaaaatgataaaacgcaccctatttttcggtaatccagcttatttaagcaccaaaaatgagcaattagtcatttcttatcctgacaagagcctagaaaccaaaacggtagctatagaagatattggtgtaattgttcttgaaaaccaacaaatcaccattacaaatggtttattagaaaaactaaccaataataatgtagcactgatcaattgcgatcaatatcatttaccaattggtttgttaatgcctttgagtggtcatacagaacaaacagaaagatttaagaaccaaattaatgcttctgtaccgctaaaaaagaatttatggcagcaaaccattagttccaaaatttccaaccaagcaggtttgcttaaggaaaaaggtattccttgtcgcaaaatggaaatctgggccaaagaagtaagttctggagatgctctcaatcacgaatcaagagcagctgttttctattgggctaatctgtttacaatcgaaaatttcaccaggggccaaaaagaaatagcaccaaacaatttacttaactacggatatgctattctaagaggaattacagctcgggcattggtgagctcgggaatgttacccacactaggtatctttcaccgcaacaaatacaatgcttattgcttagccgatgacatcatggagccctaccgcccgtatgtagatttaattgtgagtaatattatcgaaaatgaagatactatagaagaacttaccatagatatgaaaaaacaattattgagtattgcctctatagacgtttgtatagatggtaaaaacagtccattgatggttgcaatgagtcgaacaacaaattctttaaatgaatgttttgaaggctcctcacgaaaacttttataccctgttttttaatttaatataaggaatgttaaataacgtattatgtatgatgaacattacacacgtttaaaccaatatagaagtttgtggatattagtattttttgacctgccaacagaaacccgcaaggaacgtaaaatagcttctggatttagaaagaaattattagacgatggattctctatgttccaattttctatatacatgcgcttttgcgctagtagagaaaatgccgaagtacatacaaaacgtataaagagcaacctcccagaacacggcaaaataggagtcatgcaaattactgataaacagtttggaatgatggaactattttacggcaaaaaaccggttgatccagaaaaaccatctcaacaattagaattattttgaaagtaggacttagaaaacagtaaccccctgataactaatactataattatcatctttttttgaattcaaaataaagccataactcacaacatatcaaacgattaaaccgcggtatgttgggaattataagctaaaatacaattttgaaagcaattcacaacgtattctgatatatgtataaatccatgattgttgggaattataagctaaaatacaattttgaaagcaattcacaacatatctttcaattgtctaaaagtaactaaggttgggaattataagctaaaatacaattttgaaagcaattcacaacatgttcgtccagataattggattagtattagttgggaattataagctaaaatacaattttgaaagcaattcacaacagtaaatgaatccttaacagtatcaattggttgggaattataagctaaaatacaattttgaaagcaattcacaacattagggggttattcttattggctattcgagttgggaattataagctaaaatacaattttgaaagcaattcacaacctaaagttaatcgtatattccgataattttgttgggaattataagctaaaatacaattttgaaagcaattcacaacactacacctacttctatccttgttatgtcagttgggaattataagctaaaatacaattttgaaagcaattcacaactgttcagcaaatatacaaataacaattggagttgggaattataagctaaaatacaattttgaaagcaattcacaactgttcagcaaatatacaaataacaattggagttgggaattataagctaaaatacaattttgaaagcaattcacaacactgcatgagtatcgcatccttgcggtaacgttgggaattataagctaaaatacaattttgaaagcaattcacaacttccctctatacctttcatcagcatattctgttgggaattataagctaaaatacaattttgaaagcaattcacaacattatacctacttctatccttgttatgtcagttgggaattataagctaaaatacaattttgaaagcaattcacaacttctataaagaagaagaaagtacaaaaacagttgggaattataagctaaaatacaattttgaaagcaattcacaacccatattgggatgcaaacggagaaggattagttgggaattataagctaaaatacaattttgaaagcaattcacaactcagcagttattttatttaatgcttcattgttgggaattataagctaaaatacaattttgaaagcaattcacaactaaaaacaatagaacccgtagttaagggcggttgggaattataagctaaaatacaattttgaaagcaattcacaactatcaattagctctggtgttaaaatatccgttgggaattataagctaaaatacaattttgaaagcaattcacaactttttcgtctccccttcttacccaatattgttgggaattataagctaaaatacaattttgaaagcaattcacaactgataatgaaatactattaatatctgttacgttgggaattataagctaaaatacaattttgaaagcaattcacaacctattttcacaaagaaaactttctattttagttgggaattataagctaaaatacaattttgaaagcaattcacaactatcaattagctctggtgttaaaatatccgttgggaattataagctaaaatacaattttgaaagcaattcacaactttttcgtctccccttcttacccaatattgttgggaattataagctaaaatacaattttgaaagcaattcacaactgataatgaaatactattaatatctgttacgttgggaattataagctaaaatacaattttgaaagcaattcacaacctacatttacaatctcataattttattttgttgggaattataagctaaaatacaattttgaaagcaattcacaacatagaaaagaattatgtcaagagaaataagttgggaattataagctaaaatacaattttgaaagcaattcacaacaatccattacaaacatggtctgaagtattcgttgggaattataagctaaaatacaattttgaaagcaattcacaactattttcgcctaccacaacacctgcaaccgttgggaattataagctaaaatacaattttgaaagcaattcacaacagaagctcctgaactaaaagcagaacctaagttgggaattataagctaaaatacaattttgaaagcaattcacaacagtacgcttaaagcaataataagtataaatgttgggaattataagctaaaatacaattttgaaggcaattcacaacttgttacgtctaaaatttatgctccggatagttgggaattataagctaaaatacaattttgaaagcaattcacaacatattgcactaaattcaatggctaaaattagttgggaattataagctaaaatacaattttgaaagcaattcacaacggaaaagtacgtcgcctttaaccagcctcaatacttttccgttgtgaattggatgtttaagaggccaaaatggctttaatcctacttcggtgggatttttttattctacacaattaccttttttaacaactgtacccctagccctgattaaaacggaattccttatgcaatagaattgtattttttcttgactataaagagcgactgaaagaagctcctttatggtcgtagaaaaaaacaaggctataaataagaatgaagtggaaagcaggaaatagctccttatcacttcaaaaaacaaacgcaaaccggtgaaatcaggctgtctgtttgtgaaattagttcgcaactaccgtcttcttggattttgaaggtcataatttgatccgaaatttgatggcaggcgattaggaatcgaccatcgggggtgatgttgaattcgcgtagttcttcgccatgggttttaaaatggtgtttgagttgtagtgaattagcttgtacttcaaaaactgtaataccatcatatccgcggttggcagcatacaaaaaacgttcgtttgggtgcaaacgtatcgcagaagcaattggagttcctgcataggaagcgggcaatgattcgtggagttctacaacttcccaatttaaattctgctgctccaaaaccgacacttgccctgttagttcgtgcgataggtaccctaaagttccagctttgttaaaaaccaaatggcgcactccgccacctgccacggttgtaatatcgagatctggttttggctgtagatagctactacctaactcgtacacttttacagtatcgattccgaggtcaggtacaaacaaggttttttggtcgggatgaagcacggcttgatgtgcatgcggtgcctcttgcctactcgcatttacacctttacctgtatgtatgtggtgactggcgtgaggcataattttcccgtcagcttgtgtttggtagtgtaaaacattgcctgaaccatagcaggccactacaatatgaccattgcaataaaccaaatggcaaggtaaactgcccggaattaattcttgatttaaaaacgaaagtgaaaagtcagcatgaatagtaaatgcttttacaactgcatcctgttctttttcggtgatggtatacaaaaaccgattgtcatcactaattgctaagtacgctggattttcagttggtaccgtatgaaccaactcaacggtgccctgctcatcgatatgaacaacataaattccgtcaccgcgaccaccaaaagtaggcgtaagcatatgtgtatatgatcctataaaaaaatgcatgtgcaaacggtacttggtgagacaatattttaaagctaaaatataacttctctctcaatttccaaaatttagttgtttacacaaaagcgaaacgaaatagcgggaatttagtagctccgtaacaacttttaacatttctttttatctatatcaagctataaaatcaactttcagcaggctgaaaagagtatagcgactacattttagtacgatagcgaccatttcttttactaataataataataataatgtcacttatactttaaataataatcccatcgtccaactcataatttaaaactcataactcataactcccaccctctctatcaatttaatttttacgtacttttacgattctaaaatctcatcatacatgtcggcacttgttatcaactctcttatttttttcattgctattttccttggatttattattggtaaattgctttcgtctgcaaactttcgatccgcaaaaagcagtttagacgagcgcatattaggattgcaggcacaagttcaacaaactaaagaacaattggcaagcgacagactctctttcgaaaaaaagcaagaaaaagtacagtacgaaaaagaacaattacgtcacgaaaaggaaagtttggtgattcagttatccaagaaagaagctgattttgacaatttatgggagcgcaacaaagagcaaaaacaagaagtagaacagttacaagaaaaattcactaaagaatttgaaaacctagccaataaaatcttagacgaaaagtcaaccaaatttaccgaacagaataaagaaaacatgaaaaacatcttgtcaccgttgcaagaaaagattcagttattcgaaaaaaaagtagatgatacccacaaagaaagcattgactatcatgccgctttgcgccaacaaattttgggacttagagaaatgaatttgcaaatgagcaaagaaaccttgaatttgaccaaagcattaaagggtgacagcaagatgcaaggcaactggggcgaattggttttggagcgtgtgcttgaaaaatcgggtttagaaaaagaccgtgaataccatgtgcagcaaagttttacaactgccgaaggcaaccgtgtattcccagatgtggtgattaatttacccgatggcaagaaaatgattgtagactctaaagtatcgcttactagctacgaacgttttgtgaatgaagaagatgatgcattaaaagctagctatttgcgtgagcatgtactatcgatcaggcgacatgtggagcaattgggcgagaaaaattatcatgatttataccaaattgaaagtcccgattttgttttgcttttcatcccgattgagcctgcatttgctttagcattgaacgaagacaattcgctgtacaataaagctttcgaaaaaaatattgtgattgtaactcctgctaccttgcttgctactttgcgtactattgatagcatgtggaccaaccaaaaacagcaagaaaacgcttttgaaattgctcgccaagcgggtgcgctatacgataaatttgaaggttttgtaacagacttaattaaaatcggaaagaaactcgaagaaaccaaaacagaatacagcggtgcgatgaataaattagtagagggaaaaggtaatttgattacaagtgtcgaaaaactgaaaaagatgggggcaaaagccaaaaagtcattgcccgaaaacatcatcaatcgcgcagtagcgagtaacgatatacagcccgaaattgaagcatcaaatagttcaaattcgaattgatttcactttcttttgacttaaaaaaagcgtaactttaaaggagcccccaaaaactcttttatcatgaaaacaaatctactcctactcacgctcctactctcccaaatctgtttttcgcaaaaaacattgaccgtatccaatgcaactgctcaatttgaagcttctgttcccatttttgaacctgttgcagccaaaaacgagcaggtcgccgttgcgctcaataccaaacgaggctacataagcttctctatcccgatgactaaatttagatttgcaagcagtctcatggagcagcattttaacgatcattatttagaaacagatcgttatccaaatgcaaattttaaaggtattatcgaaaacttcgatctgaatgccataactgattatccgactaactatttgataaaaggtaaactaaaaattcacggacaatccaaaaacattacggctacgattcgtttgcaacgtactatgataggttttgtactgacatcaaattttagtgttttgacagatgattatagagttgagattccgtttctaattcgaaataaaatttcaaaaacggtaaatataagcattgaagttccctttcaaaccgaggccacgaacttgggagccatcacggtacaaacaaaaccaacaaattaataattttgaagaaaagttaatgaatttgaaaagtcaactattaccaaatagaaatgagctgcttttgcacaaaaacacttttaagcaggttcaattaagctatattctatagtgaaattgcaattatttataatgttaaatccttgcatttaaggttgatttataaaattgttacattgaacttgtcgcaatgtatactaaaagaagtttagactcctgtcccgaagctttaattcgggacagactgcctctttatttgtacatgacttttaatttagattataatcgctaatttttagcgattataactaatttcatccaatgtataaagttcagcacttatacagtgctatttttattttttttcgaaagtgaaatagtaatttgaggattataagcaagaacgaattgctgaatcaagattgatatatttaaagcggaagcctaacttttcgactttgcttgctgatactctcctgccttctaaaacgatcactgcaattttccccaacagaagacgcaatacaaaagcgggcaccgcaggaaaccacattttgtatcctataatcgcagccaatgttttcgaaaatattttgtttgtggtactgtcttgtatagccgcattgtaagcaccttccatttctggtttttgaagggctagtaaatacatggcacacagatcgtcaatatgaatccacggcatatattgctttccggaacctaatggagatcctattccccatttaaaaggaggaagcatcttttttaagaaaccatcatttttgcctagaaccagtccagttcgtatttttacgattcggttggcattgagatgcatagcatctgcggcagcttcccatagttggcaagttgtacccaaaaaatcattttcgggatctgtgctttctttgcatattttagcatcagtaatagcaccgtaatagcccactcccgaagctgaaataaaggcttccaccatttttccattcgcagccaaaactgatttgatcaattctactggttctaccctactggcaataatcgttttttttctgctctcagtccaacgtccaccagctatattttcaccagctaaatggataatgtaatcagcttcgagcactgctttattgtctatatattgcgtttctaagtcccatttgtaatacgatactgctggtgtgttttttcttttcgaacgacttaatatacttatttcaaatccgttatctaccaacaactgcgttaagtgctgtcccacaaaacctgttcctcctgttattaaaactttctttttcataatcaaatgtatttagtgcattcccatttatcctaagattaactaaaagtagctgatcgattattattttttacttgacaattccggccttgtatgtagcaatagcacggtcacgtgcaaaggcatgctccaccattggccctacgtagccaagatcaaattctggaatccatttgcgaatatatacccctttttcatcaaactttttcatttgaatttcaggattaaaaaccctaaagtacggtgctgcatcacaaccagtccctgctgcccattgccagttacctacattggcagacaaatcataatccaacaatttttgagcaaaataagcttcgccccactgccatgaaatcatcaaatgtttacacaaaaaactcgctacgaccatacgtacacggttgtgcatataacccgtttcattaagctcgcgca

SEQ ID NO: 1542 - DNA, 24062 bp, synthetic construct
  misc_feature 1..24062: note = Synthetic
  source 1..24062: mol_type = other DNA
aattgatactggcatacactttaaagaaaatttattaatgctaatttctagcttcaataatgaaaaaaccaatataataattaaaaatcaagaagttatcaattggaatactcttgaaaaattaacaaaaataaccatctaccgcattgtacaagaattattggttaatatgaaaaagcacagccaatgcagtcttgccgtttttagttttgaatctaaaggaaaaaaatacgaaatcaagtattcagacaatggagttggtagcccaaaaacgttaaaattcaaaaatggtttgcaaaatgtgggaaaccgcataaaaactataaatggaacatttacttttgacaatgaaactcagaaagggttcaaagccaaaattatttttccacactagaaattttaaattatgttttcaaaagtactccttgcagaagatatcgacagcataaatatagctgtggtaaatacactagacgaattgaatattattgaaaaagacagtgtgaagtattgtgatgatgcgctattaaaaataaaaaaggccttacaagatgagaaaccttatcaattattgttaaccgatttatcctttaaggaagattttaggcaaaatacgctcaattcaggtgaagaattaatcattgcaatcaaacaattacaaccaaccataaaagtaattgtattatctgtagaagaaaaaacctatcgcataaaatcactttttgaacatttacatattgatgcttttgtattaaaaggccgaaacagtatgcccgaactcaaaaaagccattcaacatgtttttgatggaaacacgaattacattgctcctaatttatcttttatcttaaaagacaaaatgatacacgaaatagacaattacgacatccaacttatcgagcaactttcctatggaattgcccaagaaaaaatggatatcaagtttaaagaattaggtgtagaacctaatagtaaatccaccatcgaaaaacgaataggcaaactcaaagactatttcaaagccaacaataccgtacacctcatagcaattgctaaagatttaggactcatataaatctttttttatgttttattttggcatgacccttcaggttacttcgtcattcttcctcgcaccttcgggtcgggctttacgctcccgcttttctttatttggcaaaaaaaacgccatataaagaaagagcttcacttcaatccctcatgcaacaacaaaggaaaattacaacttaaaatcaagtgaatcatagaaattagtattcatttttgaattataaatcatttttacggtttcccgtaaggaacattatttaattgaaattacatttggaaaaactaaaaaacaatgaaccgctacactgtcaacgaccataacatcatttctataggatatgatgagatcaaaaatgttctcgaaattgaatttaaattgcaagcaatacatcagtattttaatgtttccttggatgaatttatagcattaatgaaagcaccaaaaaaagaaactcattatttcaatttcgtgtattgccagtatctatttgatgtagtttaattattacacctctttacggtttcccgtaaggaattgattttcacaatttttaggtttggagaattattaatttaaaaaaagaaattataaaaaaatggctctagtatttactttattcttattctttatgggaagtcctattgatgcctatagtggacattataaaaacggtaaaggaagttctcataagggaggaaagcacaaaaattcaagtactaataaccattataaaaaaataaagtcatgaaatattatgtaaacaaaaatgcacaaaccaatggagatcgtgaagtacatacagaattttgtgggtatataccaaaagttgaaaatcgaaaatatctaggagaattttcaaattgcaaagatgcagtttcagaagcaaagaaaacatatccacaatccaatggctgtaaaacttgctcaaattcatgtcatacaagctaactaatcatgagattcagatattcaaaaagaattaatttgggaggtggtttaggattaaatattagtgaaactggtatttctacaagcctaagaactaaggcagaatcaattagcaacaacggtttatcagttagaaacaggtgtttctggtgtgtcgtacagaaaaccatttaagtcatcaaaatcaagagggtgtctcttaacgctagctatttatttgagtttgggctttacaatttgacaatgtctttttcaacacttcaaaaatacaattgatacattcgggaattattgcttttcataaaagctttgaatccctagaagaagctagaaaaatatcagatcacattcctatttggtttaaattttctttaaaataactcattaaatcactctcaaaaaagagaaaaactacgttttcattttctttttcctggctgcagggaataaaacattgttcaatattaatcgataccccggagagtttggatgcaaatcaagaactgtagcggggtcccctactctatgttggtaatcttcaggatcatgtcctccaaaaaaagtaaacattccctttcctttttcaccgtgaatgtaccgggcttcaccgttaagttcacaggtccccataacaagtacattcgatttaataagggtttgatcataggatgtagtttgccccataaatccctttatcaattgggtgtgattttgacacaacatgctaggaataggatcccattttgccgaaaactccatcaaagtaaaataatctttctccattggaattcttcttttttcagtcatatcaatatctgaaaattcatagtgttctggtttccgatctaatataaaatctttaaatgcgaaagtattaccataatttattttggtttgataattagcatcactggcatcaccgtcaaacatgggttcacaaatatcgacaccatcagccgctaaagcaatatcaaaactatcggttgcagagcacatggcaaacataaacccaccaccaattacgaaatcccttatttttttagctacagccaatttttcttccgaaacttttttataacccaatttcgatgccaaattttcagcctcttttttctggtcaatgtaccaaagtgaatttttattggatccataaaatttcccgtattgccccgtaaaatcctcatgatgcaaatgcaaccaatcataaagtatcaattgatcacttaaaacttcttcgtcatatataggcgtaaaaggaatttcggcataggtcaaaacaagcgttacggcatcatcccaaggctgtttcccttttggtgtataaacagcaattttaggcgctttttctagaacaactgcttccatattttgggaaggactggctattaattctagaatctgattcgtttcagtatcacttaacacttcaaaactcacccctcgaatctgacattcttttctgatttctggtgcatctggaaataaaaaagaaccacctctataattgagtaaccagctggatttgtattttttttcgatgcaccaataggtaattccataggcttttaaatgattttgttgcgtagtttcatccattggcaacaagataaaagaagcctttgctgtaaaagaaaaaaggattaataggataaagaatatcttttttgaaatcattttaaaaattttatatctcaaagatacttgttttatttttttaaaaagacaaaaaaaaaattcgctcataaagcgaattttaatttattttctaaaatggcatatcatcatcttcttcttcctcattcaaattactaccaaaggcttcatttggagatggaaggtttttggattgaaaagggttatcatcatgattcatttttgatggtaagtcatcataacttccgctaaaatcttcaaggttatcaaatttacccagatttcctataaactttaagcgaacgttttcaagcgaaccatttctatgtttggcaatcataaattcagcttgaccagccgaaggtgattgttcatcatcatcccattcttcaattttataatattctggacggtaaataaacgatacaatatcggcatcttgctcaattgcacccgattcacgaaggtcagaaagtaatggtcttttacttgaacccctagtttccactgcacgagacaactgagataaggcaattactggaactgctagctccttggccaatgcttttaaatttcgagaaattgtcgaaatttcttgttccctattacctcctccttttccatttccaccggcagtcatcaactgcaaataatcgacaataatgattttaataccatgttgggataccaaacgtcttgcttttgctcttaaatcaaaaatagaaagcgatggagaatcatcaataaaaaggggtgctttttctaaatttttaacctttacacttaattgttcccattcgtgtttttctaattttcctgttctcaatttttcagatgacaaacctgtttcagaagaaattaacctggtaatcaactgaactgaggacatctctaatgaaaacaatgccactgcatgtccataatcgatggcaatattacgagccattgaaagtacaaatgcagttttacccatacctggacgagcagcaataataattaaatcactaggttgccaaccagaagtaatggcgtccagttttgtgaaaccagtttctaccccacttaatcctttttgattggctatttcttcaattcgttttttagcttgtaaaaccaaactctgcgctgtttcagaactccgttttatatttccttgggtaacttcatataatttagactctgctttatctaataaatcaaaaacatctgtagtttcatcataggattcttcgataatatccgaagaaatacgaattaagcttcgctgaataaatttttgaagaataattctagagtgaaattcaatatgtgcagatgaagatattttttgcgtaagctgaattaaataaaaatcgccaccagccaagtctaactttgcatttttacgcaactgagcagaaactgttaataagtcaataggctgcgtttctgtgaataactgtacaattgcttcaaaaatatgtttgtgtgcctctttataaaaagcatctggttgtaaaatatcaattacctcatcaacacctttcttatcaatcatcattgctccaagcacagcctcctctaaatctattacctgaggcgggagtttccctttttcaaggttgatgatagttgttctatcagctttagcagggttataatttttgacattttccatgaagcgaaattaagtaaaaattaaaaaatattactatagagttattagaaagatttgttcataaacaatcattttttgttaataaccataaaaaaatccgaaactgtaaggcttcggattttatataaaattacaaggtattactctttaaattcacccatattacagtatttatccattctttgagctattaattcgtctgttgataagtctttcaattcattgaatcctttcaaaatatattgcttaactgttttaaaagcagtttctctatcatagtgagctccaccaagtggttcaggaataatatcatcaactaatttttgatttttcatatcagttgaagtcaatttcaacgcttctgcagcttgctctttgtaatcccagcttttccacaaaatagaggaacatgattctggagaaataactgaataccacgtgttttccatcatataaacacgatctccaactcctatacccaatgcgccaccagaggcaccttctccaacaataaccacaattataggcactgttaatcgcaccatttcgatgatatttctagcaatggcttctccttgtccgcgttcttccgcttcaattccaggaaaagctccaggagtatcaataaaagaaactacaggaataccaaatttctctgccattttcattaatcgcaaagctttacgatagccttctggatttgccattccaaaattacgatattgacgagttttggtattaaatcctttttgttgaccaataatcataaaggattgtcctccaatttttcctaaaccacctatcattgctttgtcatctttaaaacctctatcaccgtgaagttctagaaaagtttcgccacaaagcgctcttacgtgatctaaagtgtagggtctactggggtgtcttgataattgaacacgttgccaagcagtaagatttttataaatattttttttagtttcttcgagtttcttgttgatttttttacaagtagttgtcacatcaacctccgattcctctccaatagtaagacacttttctaactggtcttctaattcttttattggaagttcaaaatctaaatattccatattatgtatattttttgttttaattcgaactgcaaatataaaatttaaaattatcaaaacattacttttcttattcaaatgcaaataaattgatagaaaaacactcttaaatttattattatttaggtttaaaatagtgttttatgataccatttaagataactgtagctacaattattatagctccaatatagaactcaaaactcattttctctttctcgcctatgatgaaatatgccaaaataattccataaacaggttctaaactagtggtaagcatcactgtataaggagagagttgttgcattatttttactgatgcagtaaaagcgtaagccgtacagatggaagcgagaattagaattaaaatccaatcatttgatgtcaaaacaaaaaaatcaggagtaaatttattatcgaataaaaaatagatggatataaagaaaacgcccgaaataaattcataaaaagtgataactgccgaatcattttttacaattaactttccattcatcagtgtaaataaaacaccaataatcactgaaattaaagcataaatcattccttcaaaataattaatttcaacctttaatattaaagataaagaagcaataatgacaagcccaaaaaacacttcataccaaagtacttttcttccgtaaaaaagaggttccaataatgaggcgaaaaatgctcccaatgaaaaaattgctaacgtgatagacacattagataaatgaatggctttgaaaaaaaatatccaatgaaccgcaattaatagtcccacaaaaattaatttcagaaactcttttgtcggaattataaaggatttctttttgaaaaggatataaagaaataaaaaaccactagcaaaaagcatgcgataccaaactaaagaatcggcattaattgaaattaaggcacccaatattgctgtgaatccccaaataaatacaattaaatgaagatttaaataactacttaatttaccgtttagcatttcgtaataaaaatattgctaaaattccaaatatgaaattaggaaaccaaactgctataatagggggaaaagtagatttctcagctaaagttccaaatattttatcaaaaaacacaaacgaaaaagcaattgcaattcctattgctaaattcatccccattcctcctctacgtttcatagaagaaacagcaacagcaataattgtcagaataaatgcggagactggaatactgtattttttatacaataccactagatatatgttaatattagaagaacctctacctcgctccttctctataaaccggtttaattttcctaaatctaaggtttcggcaatatatataacaggggttaaatcttctaagtcaaaactaaacttggcatttctttgatccgctttttctattttatctccaaactcccctactgttcttttaacaaaatcatacaaggtatagttcttagttttagggttccattggattcttctagccgaaattttatattgtaatttgtttttattaaatctctcgtaactaaaattataagccgttttagtttctgcattgaaactatttacataaataaactcatttttggcaatttgacgaaaaacatccgtagcatcacctcgcatcacctgtttaccatcacctctaagatatgtatatctaaaattattaaatccttcactggcttttggcacaataaaaaaacccattaataatataaaaacagatacgatggaagcaccaataataaaaggccttaagaatcttgtgaaagaaatccctgaactcaaaatagctataatctctgtgtcgtttgctagttttgatgtaaaccaaatcacagataaaaatagaaatataggaaatagaagattggtaaagtaaattgtgaaattgaaataatagaccaaaatttccataattggaactttgttttctatcattttattgatcttttcagatacgtctattacaatgccaataggcgcaaacaaaagtaacataaccgagaaagtcgataaatatttctttaatatgtatttgtctaatattgttaacatattttatttatgagttatgaattatgaattataaactacaagctaactcataattcataattcataactcataattattttaaagtctttggctcatattgcgaaccatcatgtctttccaagttctaaaatctcctgctaagatatgttttcttgcttcacgaaccaaccacatataaaacccaagattatgtatcgtagcgatttgttttccaaggtattcattggcggcaaacaagtgacgcaaataggcttttgtatattctgtatctacaaaagtgtgtcccatttcatcaactggagaaaaatcatcttcccactttttgtttttaatattaatcgttccatgcgctgtaaacaacattccgtttctcgcatttcgcgttggcatcacacagtcgaacatgtcaattcctaaagcaatattctctagaatattaattggagttccaacacccatcaagtagcgaggtttgtcttcaggaaggatttcacaaaccacctcagtcatcgcgtacatttcctcagcgggttcccctaccgaaagtccgccaatagcgtttccttgttgatttgaattggcaatatattccgctgattgttgacgtaaatctttatacgtacttccttgaataattggaaagaaagtttgatcgtacccatattttgttggcactttttctaaatgattgatgcatcgatccaaccaacggtgggtcatgtgcattgaccgttgagcgtatctataatcacaaggatatggtgtacactcgtcgaatgccataataatatcggccccaattgtccgttgaatttccatcacattttcgggtgtgaaaaaatgatacgaaccatcaatgtgtgatttgaattttacgccttcttctttgatttttctattggccgaaagcgaatacacttgatagccaccagaatcggtcaagatattacgatcccagttcatgaatttatgcaacccacctgctttttccaatatttcagtttgcggacgtaagtacaaatgataggtattcccaaggataatatcggggtttatatcgtctttcaattcccgctgatgcaccccttttactgaagctactgtaccaacaggcataaaaattggggtttcaatcacaccatgatcagtggtaatacttccagctctagctttagtatgtggatctttttgtaataaatcaaattgcataaggacttttttcagtgcgcaaagataatttatttaagatttaagaattaggaattgaggttttatttagaatacatttcaaaataaaaaaagcgacccttttgaggccgctttgaatgttttcacaacggaataatccttattgtgaattgctcaaaattgtagtacaatgatacaataaaagttttaatgttcgaatgtggtttttcataaaaaaggtaatttttttattgttaaatttagagattaatttacagtccgtgaaaaattatcataaaatacagttataaaatgaagaaaatattaggattggatttggggacaacatcaataggttggtcatttataaacgaatcagaaagcgaaaatgaaacttcatccattataaatacaggggttcgtattgttccgcttagtacagatgaagaagctgatttcaaaaaaggcaatacaatctcaataaatgctgatagaacattaaaacgaggagcaagaagaggtttacagcgttttaaacaaagaagaaatgctttattagaaacttttagcaaaataaaattcattcctcgtgattttatttatgccgaaactggaaaagaaactactttttcttcatatcaattaagagccaaagcagctgttgaagccgttacaaaagaagaattggttcaggttttattgatgttgaacaaaaaacgaggttataaaagcagtcgaaaagccaaaactgccgaagaaggagaagcaattgacggaatgaaaattgccaaagaaatttttgaaaataatttaacacctggtcaatgggtttttaattctttatcaaatggaggcaaatatatccccgacttttatcgttctgatttacagaaagaaatggaaaaaattgtttattatcaaaatccatttcactcagaacaaatgaacaataaattacttgaagatattcaaggaaaatcgagaacacaaacttctcaacattttactaaaactctaaaaatagaacttgcagaaaacaaaggaactagggaagaaaccaaactgcaacattacaagtggagagatgaagctttgacaaacgaactagatttgaaagttttggcccttattcttactgaaatcaacaatcaaattaatcaatccagcggttaccttggagctattagcgaccgaagtaaggaattgtacttcaatcaagaaacggttggtcaatttcagtacaaacaacttcaaaaaaatgtacattcaaaactaaaaaatcaagttttttatcgtcgagattatttagatgagtttgaaaacatttgggaaacacagacacgatttcatcctgaattaaatgacaaactcaaatcagaagttcgagatattacgattttctaccaacgaaaacttaaatctcaaaagcatttagtaagtttttgtgaatttgaaaaaggacataaagccattccaaaatcgtctcctttatttcaagaatttagaatttggcagaatttgaacaatgttgttgttaaaaatgaaattacaaaagaaccgttccttttagacgaagatttaaaaaaacttattactcaagaattattgtttaaagatagtatgactgactcacaattactcaatttttgtggacttaaaaaagcagaatactcggttaatttcaaaaaaattgaaggcaatagaaccaataccgaaatttacaaagcatttgagaaaattttagttttagaaggtaatgatgaattagatatttcaaaattagatgcaattgatattaaaacaacaataaaatcagtcttttcggatttagaaattaataccaaattattgaattttgatacaacaattcaaggcaatgatttcgacaaacagccctattatcaattatggcatttgctatattcgtcggaggaagacgaacccttgaaaaaaactttaatgacaaaatttggttttaaagacaatcatattccatttcttttgaatgtaaaactgcaagcagattacggaagtttgagtgctaaagccataaaaaaaatattgccacatttgatggacggacatatttatgacaaagcctgtttattagtcggctacaaccattcatcatcattaacgacagaacaaaataatgaaagaattctaaaaaacactcttgaattactcaagaaaaacagtttgagaaatcctgtggtagagaaaatcctaaatcagatgattaatgtgattaatgctattattgctgactcaacaatggggaaacctgatgaaattcgtgtagaattggctcgtgagttgaaaaacaacaacgaacagcgcagcgaaatgacaaaagaaatcaacaaaagtaccgctgaacacgaacaaattagaaaattattacacaccgaatttggaatccatcgggtaactcgaaacgatattattcgttataaactttggaaagagtcagatggaatttcgctttatacagggaaaccaatcgaaccatcaaagctgttttctaaagagtatgatattgaacatattattccaaaatcacgtttgtttgacgatagtttttctaataaaacaatttgtgaacgccaattaaatattgataaaagtaacaaaactgcctattcatttttaaaagaaaaattaactcccgaagaatttgaccaattcgaaaaaagggttcgagggctttttggaaaagtcagtagaaccaagcaaaataagcttttgatggctgacagcgatattccagaagattttattgcccgtcaattacgagaaacacaatacattgcaaaaaaagcgaaagaaattttgttggaggtctccagaaatgtaactacaacaattggaagtgtaaccgacaaacttcgtgaagattgggaattagttgatgtgatgaaagaacttaattgggacaaataccataaattagggttaaccaaagaggaagaaggcaaaaatggagaacgtttatataaaattctggattggacaaaacgaaatgaccatcgccaccacgctatggacgcaataacagttgcattcactaaacctgcttatattcagtatttgaataatttgaatgcaaaaacgcaaggagagaaaaaagccggagcgatttacggaatagaaaccaaatatttagagcgagataaaaataacaaactacgttttaaatctccaatgaaaaactttagagaagaagccaaaaagcaacttgaaaacattttgatttcttataaagccaaaaacaaagtcgttaccaaaaacaagaatattactaaaaaaagtggtggtacaaatcaaaaaattcaacttacacctcgtgggcaattacataaagaaaccgtttacggaaaactgcaacgttatgagactaaagaagaaagcgtaaacgctaaatttactaaagaatacatcgctaaagttgccaaaaaagaatatcgagaagcacttttgaaacgattgcaacaaaataacaatgattctaaaaaagcatttacaggtaaaaatgctttaaacaaaataccaatttacattagtttgaaagataatattgtagtacctgaaaaggtaaaaatagtatggttagaggacaattatacaatacgaaaagacattacacctgataatttcaaagacataaaaagcacagctaaagtaatggattcgggtttgaaaactattttagaaaaccgtttagcagaatttggtggcgatgctaaaaaagctttcgtgaatttagacgaaaatccaatttggcaaaacaaagaaaaaggaattgcgataaaacgagtaactataagtggtgtgagcaatgcgcaagccttgcataccaagaaagatcatttaggcaacgaaattttagatgaaaacgagaacccaattccagtagattttgtgagtacaggaaataatcatcacgtggctatttacaaagacgaaaaaggcaatctacaagaagaagtagtttcattttatgatgctgttgttcgtataaatttagggttatccgttatcaacaaaaatcacaaaaaaggttgggagttcctattctctatgaagcaaaatgagttttttatatttccgtcagagagtttcaatccacacgaaatggatttattaaactctagtaattatcatttgataagtcctaatatttttagagtgcagaagtttgggtcccttctttcaggtttttggtttagacatcatttagaaactcaaattgaaacaccaaaagaattaaaaggtattacttttaaagtaattcaaagcgctaataatttaaaagatataataaaagtccgtatcaatcatttaggtcaaattgttcaacttggagaatattaattatgataaaacgcacccttttcttcgacaatcccgcttatttgagcaccaaaaaagagcaaattataatctattatccagctaaattcaataggattgggctttagcccattcgacaaaaatagaaatatataaaatggctatagccaaaatatttcggctaaagccaatattcaaaatcaattattatatccctccagctaaagctggaggcaattcaaaaactaaagctggaggcaattcaaaaatgagaacaatataataatcaaattatgtcatacatcaaaacctatattcattttgtttggagtacaaaaaacagaattccttttttggacagcaaagaattaagacaaaaagtgtggcgtcatatcaaagaaaatgcccaagagaaagtgatttttgtagatcatgttaatggatataccgatcattgccattgtttggtttctatagaagcagatcaaaccattcaaaaagtaacgcaactcatcaaaggggaatcttcgttttggattaacaaaaataaattgtgtttagagaaatttgaatggcaagatgaatattttgctgtttcggtttcggaatctatgcttgataaagttcgaaattacattaaaaatcaagaagaacatcatagcaaacaaacatatcaggaagaatatgatgaatttattgctaaatataaatttcaaaaagaatagttttttggctaaagccatttatattattatcattttttccctccagctaaagctagaggcaattcataaaatgaggtaattaatatacagatgcatttcaaaagttggagactattaaaatgaataggattgggctttagcccaatcataaatatataatatatcaaaaggctttagccaaaattttaattgagcatttttaaatccaaaaacgatgataaaacgtactcttttcttcggtaacccagcgtatttaagcacgaaaaatgaacaaatagtaatctcatatcctgacaaagaactagaaataaaaacagtcgctattgaagatattggagttgtcgtgctggaaaatcaacaaatcacaattaccaatggtttactcgaaaaactaactaataacaatgtggcattaattaattgtgaccaatttcatttacctattggtttgttaatgcctttgaatggtcatacagaacaatcggagcggtttaagaaccaaattaatgcttccgtccctctcaaaaagaatttgtggcaacaaactattagctccaaaattatgaaccaagcaggattgctcaaagaaaaaggaattccgtgtcgaaaaatggaactttgggcaaaagaagtgacttcaggagatgctttaaatcacgaatcgagagccgctgttttttattggcaaaacctcatcacagtagaaaattttactagaggacaaaaaggaatcccaccaaacaatttattgaactatggatatgccattttacgagccattacagctagagcaattgttagttctgggatgttgccaactttgggcatttttcatcgcaacaaatacaatgcctattgccttgcggatgatattatggaaccctatcgtccctatgtagatttgatagtatgccatattatggaaactgaagatacttttgaagaattgacgattgatatcaaaaaacaattattgaacattgccagtattgatgttttcattgatggaaaaaacagtccgttgatggttgcaatgagtagaacaacgcattccttacaggaatgctttgaaggaacagcaaggaaaattttataccctgcatatgtatgacgataattacactcgtttaaaccaatatagaagtttgtggatattagtattttttgaccttccaaccgaaacacgcaaagagcgtaaaattgctagttcgtttcgcaagaaattattagacgatggtttttctatgtttcaattttcgatctatatgcgattttgtgccagccgagaaaatgccgaagtgcacggaaaaagaataaaaaacaatcttcccgaacatggaaaaattggtgtgatgcaaataaccgacaaacaatttgggatgatggaacttttttacggtaaaaagcaagtagaaacagacaaaccttcacaacaattagagttattttaatggtacaggataagaaaacagactaactcgctgtattacaccaaacaagcaccacttcttttcattttcaaaataagctcataactgccaacatatcaaacgattgaatcgcggtatgttgggaattataagctaaaatacaattttgaaagcaattcacaactctataataaacgggtattccttttggtgtgttgggaattataagctaaaatacaattttgaaagcaattcacaacaattcttgtaacatagtcgtttgaaagaggttgggaattataagctaaaatacaattttgaaagcaattcacaacgatactatggaaattctatttttattcgttgttgggaattataagctaaaatacaattttgaaagcaattcacaacacaagtgtatcagcaatatcattaaatgaagttgggaattataagctaaaatacaattttgaaagcaattcacaactatatcaaacagttgtgataatcataataagttgggaattataagctaaaatacaattttgaaagcaattcacaactaggttctccttgattttcaaattctactggttgggaattataagctaaaatacaattttgaaagcaattcacaacatagctgtagacttatctataacaatagatgttgggaattataagctaaaatacaattttgaaagcaattcacaacaacggtgttgtttcccaaacagaagcatctgttgggaattataagctaaaatacaattttgaaagcaattcacaacttatgtaataggttaatatttatattatttgttgggaattataagctaaaatacaattttgaaagcaattcacaacatttgtaattgattttcttggtttattttagttgggaattataagctaaaatacaattttgaaagcaattcacaacttcgctttcgcatcagcgttatcgattttgttgggaattataagctaaaatacaattttgaaagcaattcacaacatataaccgccatacaattcattaacagtagttgggaattataagctaaaatacaattttgaaagcaattcacaacagatatgaatatgtacttgtgcagcatcagttgggaattataagctaaaatacaattttgaaagcaattcacaacttctgaggagttgaggctacgcaagcgtttgttgggaattataagctaaaatacaattttgaaagcaattcacaactagatttgtgtatatttgttgggcttaggtgttgggaattataagctaaaatacaattttgaaagcaattcacaacacaataagtctaattattttatcaacttttgttgggaattataagctaaaatacaattttgaaagcaattcacaacactaaacccacagtaagtacaaacgtgtgtgttgggaattataagctaaaatacaattttgaaagcaattcacaactcatgcaggtattgccccatattttggtcagttgggaattataagctaaaatacaattttgaaagcaattcacaactatggataagtaatgttttatatttttcgtgttgggaattataagctaaaatacaattttgaaagcaattcacaactgtcgttacattataataatcatttgtcttgttgggaattataagctaaaatacaattttgaaagcaattcacaactcttctgttaaagtaaagtataagttttgagttgggaattataagctaaaatacaattttgaaagcaattcacaactaagcaacctattgacattgtgtgatggtggttgggaattataagctaaaatacaattttgaaagcaattcacaacttgtactgctttgtttgtttgtctaatgcgttgggaattataagctaaaatacaattttgaaagcaattcacaactgtcacaattagagttagatggtctttattgttgggaattataagctaaaatacaattttgaaagcaattcacaacgcaattagaatctacgtcaatgaatctgcagttgggaattataagctaaaatacaattttgaaagcaattcacaactaggtgtttcgacacctttagtatattttcgttgggaattataagctaaaatacaattttgaaagcaattcacaacaaattctatcagcaaattcagaatcttgttgttgggaattataagctaaaatacaattttgaaagcaattcacaacacgggagtcccagttgcaccaacagctaccgttgggaattataagctaaaatacaattttgaaagcaattcacaacaaagaatcctattcagttaaaatgggagggttgggaattataagctaaaatacaattttgaaagcaattcacaactagtaaaagactttattacgctatcgtattgttgggaattataagctaaaatacaattttgaaagcaattcacaacaatcgctgcattgttttacgttttctaatggttgggaattataagctaaaatacaattttgaaagcaattcacaacggaggtttagtggttaatgccaattcctttgttgggaattataagctaaaatacaattttgaaagcaattcacaactaagaatatataataaatcattgtctttgcgttgggaattataagctaaaatacaattttgaaagcaattcacaactaatgagtaaaataaaacgtcattacaaaagttgggaattataagctaaaatacaattttgaaagcaattcacaacaaggagtcgtagatcctttgttaaatgaagttgggaattataagctaaaatacaattttgaaagcaattcacaacgggaccacaattgtttctccaaaacaagttgttgggaattataagctaaaatacaattttgaaagcaattcacaacacaaaactaaacctatcttcaatgaaaatagttgggaattataagctaaaatacaattttgaaagcaattcacaacacctacaatctgagcatttaatgcgaatgggttgggaattataagctaaaatacaattttgaaagcaattcacaacaaggtgagaacgagagagagaggggagagagttgggaattataagctaaaatacaattttgaaagcaattcacaacagtttcggaacaacagcaggcgacggcacagttgggaattataagctaaaatacaattttgaaagcaattcacaacctgtctaaagatgcttgagaatattctcctgttgggaattataagctaaaatacaattttgaaagcaattcacaacaaatggagactcctacactaaaattattatgttgggaattataagctaaaatacaattttgaaagcaattcacaacggaaaatcgttgcaacaaaatcggaaggtcgattttccgttgttaattggatgattaagactgtgaaaaatagaaaaatattttgttgtaaatgttacaacaaaacttctgggtggaacgattaatcaaaaatagaggatttcaacatattccaaatatttgtcaacgttaaaaacaacagtaatacatgggtttaccataaattttagtttttaataaaaatatttctatactttatcaaaatcttatcacaataaggctatatgccgtagatgaaaatctttagtcctgcttcggtgggactttttgttttcataaacagtttactaattgtcacctttaatattggtaataaaataacacctaacaggttttaaaaacgggttaggatttagcattaaaatttaaaaataaataaaacgtgtagtttaccttttcaaaacctccccgattttcaaggcacatttttccccatcgattgctgctgagataatccctcctgcataacctgcaccttctccgcaaggatacaagccttttatttgaagatgttctaaagtgtcggaatctctaggaattcgaactggcgatgatgttcttgattcgggtgcgtgaagaatggcttcattagtcaaatagccgcgcattgattttccgaattcagtgaaaccttctcttaatatttgggtaagaaatccaggaaaaacggatcccatttccaccgaagtggttccgggaacatacgatgtttttggaatagttgcagaaactttattttgagtaaaatcgaccatgcgttgcgctggaactttttgagtttgcttcgcctgttcgctaaagctcgagccccctgccaaatgccaagctttttgttcgatacttttttggaattccattccagctaaggcaccaaatttggcaaaaggcttaaaatcttcgagttttaattcgatcacaattccagaattagcagttgcctgatctctttttgatggtgaccaaccattagttaccacttcgcctggacttgtagcacagggcgcaatcacaccaccgggacacatacaaaaggaatatattcctcttccgcctacttgtttcacaatcgaataaggtgctggaggcaaatgttcaccacgataatcacaactgtattgaatactatctatcaatgattgtggatgttccgctcgaacgccaagagcaaatgctttggcttcgatgaaaatttgctttctatctaataattcataaatatctcgagcagaatgtccagtggctaaaattaatttattggcattaatagtgtggccattattagtcacgacgccttgaacttcattatttttgataataatatcagtcagtcgagtttcgaataggacttgacctcccatttcgataattttctcccgaatatcctggataatttgtggtaatttattggttccaatatgcggatgtgcatcaactaaaatatctggtgaagcgccataagcaacaaatagctctaaaatccgggttacatcgccccgctttttggaacgggtgtataattttccgtcggaataagttcctgcaccaccttcaccaaaacagtaattactatcttcatcaacgacatgttctaaattgattgctttcagatcacgacggcgaccacgaacctctttccctcgttctatgactattggcttcaaccccatttctattaattgcagagcagcaaacaatcctgctggacctgcacctacaactattacttcttgcgaattggaaacatttttatattcaggaagttctattttagtttcaactaaaggctctcctactttaaaaatagccacttttaaattgaactttaccgctttttggcgtgcatcaattgaccgttttaaaatcgaaatatgttggatttctttggcgtcaagccgaattaatttcgcgacatgctctttgagcaccatttcgtttgaggctatctctggcgtaacttgaaaaagaagttcttgtggcattttacaattaattgggttatttgaaaaccataatgaaatgcaaaaatagcactttgatatgaatatgtttattgaaactagaatccattttcaaataagtctttgtaactttacgttctaaaaacttattaaatgtctcgactaattaaactaatatgggattttcgtggtccatcttcggcaaaaacagcggaacatcatgaaattcatttgaaggaatacatcattacagaaaaattatctccgaatattactggatttaaaattgtaaatgaaatgtatgcaattgcatttatggtggtaaatgaagagaatatgattcaagttcgggattctttgaaaccacatcgaggagaggtttttgagtgatcagtgttcagtggcagtgttcagtgtgtgagtttaaaaattctatttaaacaaaatttaattatctataaaatttcgatttttagcaaatagttctaaaaaaacaagattgctgaacactgaacactttttaatttgctacttcgcttataaatttaattctcattaagcgcaattcttcaatatcataatcaccctcgaattccttgagagctttctcgatattatcggaatgtgtttccataaaataatcaaaaatttcttcttgttggtcttcgtcgagcatatcatctacccaatatttgatattcaactttgtcccagaattaacaatttgttccatttcggaaattagggcttcgagggttaaacctttggcggaagcaatatcattaagcggtaattttctatcaatgttttgaataatatatagtttattaatagaatttgcaccagtggattttactactaaatcgtctggacgaatgatatcattgtcttcaacatattgcattattagttcaataaattccttaccatatttttttgctttaccttctccaacaccgtgtatgtttaataattccaccatagaaataggatatttcaaggccatatcttcaagtgaaggatcttgaaaaaccacaaaaggaggaactcctaatcttttggctgtttttttacgcaaatcacgtaacatagtcattaaaacctcatcggcaattccggtagattttgaagcagtaactagtgcttcatctactgattcattatattcatgatcctcagacatcataaatgattttggatcactgataaaatctaatcctttcttagtgattttaacaataccataggtctcaatgtctttagataataatccatctacaagcacttgcctcaataaagccatccaatatttctcatcgtgatcggctcctgatccaaaaaaagactgcacatctgttctatgggcttttatcactgcgttaactcgtcctataagcgtaaaaacaacttctttggatttgtataaatgtttggtatcacgaacaattttaagcaattttacgacttgttctttggcttctttttttacttttggattgcgaacattgtcatccatatcgccaccatcaccagtttcattgtcgaattcttcaccaaaataatgcaaaagaaatttacgtcgagacatcgaagtttcggcataagccaccacttcttgcaataatgcaaaaccaatctcttgttcggctacaggttttccggataagaatttttcgagtttctctacatctttataagaataataagcaagacaatgcccttctcctccatcgcgacctgcacgacccgtttcttggtaataactttctaatgattttggaatatcatgatgaatcacaaaacgcacatctggtttgtcaatacccattccgaaggcgattgttgccaccaccacatctacatcttccattagaaacatatcttgatgtttggctcgggttttagcatctaacccagcatgatacggaacagcgctaatcccattaacctgcaaaacatgggcaactgcttctacttttttacgacttaaacaatatattattcctgattttcctttatgaagctttatgaaacgaataatatccgattctatatttttggttttggtacgtacttcataatataagttgggtctattaaaggatgctttataggttgttgcatcagacatatccaaatttttcagaatatcttcttgtacttttggagtggcagttgctgtaagaccaataattggcacatcacccaattgttttattatatgctttaaatttctgtattctggcctaaaatcatgcccccattctgaaatacaatgcgcttcatctattgctacaaaagagattgtcaccgtttgaagaaaattcaagtattcttctttggttaaggattcaggagcaacatataaaagtttggtcaaaccagaacttatatcttttttaacttgggttatttcagtttttgttaatgaggaattgagaacatgtgcgataccattttcagaagacaaactcctaatagcatctacttgatttttca

SEQ ID NO: 1543 - DNA, 24059 bp, synthetic construct
  source 1..24059: mol_type = other DNA
  misc_feature 1..24059: note = Synthetic
atctgaatagcctgcgacttttattttatgaacgcatccatcactaccatttgtctctgcatctaaaactttaaaatgataggatgcgaattgtttaaattcttcgagggttttaatttcacttgttggcatggctctgattttttaattcaacattttctaaacgctctaattcggtttcaattagtatggttgctttttcttgaaaaatatgacatcgtctttctaaaatttcagtatttaaaaaacttgatgttttaagctctacccacctaagagaactgagatttacctttagcaattcaaaaagctttttatcctcttctgtttttcgtggaaaagtatcagtggtcagcgagcagaaaatttcacaaatgtcaaagagataaaccaatgaaaaatgattaggtctatatcctaaaaagacgtctattagagctaaacaagtttgctctacaacaatatgaagcatacattcttggataagttcagtatcaaaaccatcaatttgattttccgcatccaaaaaggtctcagcaattttatttctgttgcgccaatgggaacgaataagctttagttttctacttggaatttcatcaatagcaatgttgggtggaactatttcattttcatatagtgtataaccttttttaaaaacttcgtaaaagaaatacaacctatgggaagttaaaggtcgaatggatacagcattatgaatcaacaaagttgtcgaatatttccctttagtctttgttctaactaaatcggctaaatcaccagccaaatttgtccttgaatcaggtgctattatcaataaataaaagtgagtgtgtttgaataactcagcttctgttagattaaaaatattttgatcaatatttcttttcttcttttcaccaaagcaataaataccattagctttcatgctttctaaaataatcttcgttacgatttccattcctgctttgtcaattgcattcataatttttgtttttaaatgatacatccttgaaaaattgtatttttgttaaaacacattgcaagtaactaatgaattgtactgtaccgaactaaatgattttgtatcttaccaaaatcaacttgttttttaccaaatattattttctaaaagaattttaaatatctttgagttatgaacacagcaacgaaaccgaaacatattggcagaaatatcagccgtatcagagaacttagaggtatgaagcaagaagcattggcaactgcaattggagtgagtcaacaatctgtttcaaatattgaaggaagcgaaattgttgatgatgacaaattaaaagctattgcagaggttttaggtgttactacagaaggaataaaaagtttttcagaagaagcaattttgaatataataggtaatacttatcatgtagacaattcttccgcagttaattacggttgtacttttaatcctctggataaacttgttgaagcttacgaagaaaacaagaaactttatgagcgtttagttcaatctgaaaaagaaaaaaatgaatacttagaaaagcttttaaaagaaaaatagaaacaagctttataaaagatatattaattcaaaggagacctttattggtgtcctttttttatctcctagaaatttatcaaattaaaaaaacacttcaatggataaaacaatacagcttcgagttaaaaaagatattgacaatcaaaaggagctaaaggtacgaaaatttaaaggcactttaattacgaaagactttactgaaatcgttcatatttcagatgaaaatgaagaattttatctgaattttttttctgttttacctgagcataaaaaacaaattgaaaattatgtactggattatatttccacaaataatctaaatgaaactatttcaataattagtaattcataactgatgattgataaaattattagatagaaatccccaaaaaccttcctccaaaaagtcagaattttgtggattgcaaaatctcattctcttgaaaaagtacacttcttattttattgttttttcatcggttttttagaagtgtaccctttcaaagaaatttaaatagtattccaaaaaagataaaaagcaagccaagatattggacatctgcaaaagaagtgcgcataatgacaagtctcgttcctcgacctgccacccttcgggatttatagcacttccattgccgatatccatttttaaaatgctttctttttttcttttcttttagaaaaatatttatggctgtagtctatactcaggggcattttttatctcatgtaattctgagatccttctcaaaaattactcaggattgtttaagtcagatatttgtaattaatttcgtttgagcttatttaaattttacagcttgccacgttcctttaatcagcaagaagctgttgtttaacaacagcttcttgctgagctatactcagcactcgtgaagcagtgaaaatgaaatatttaaaggctgggatttttcaaaataaaatttgaagaaatctttaatataaagtaatcaaaagagttatatttttactacttattttataaattagacatataatattttatgatctcttcaatcaatcataattcctgggatactaatgttaaacattatattagaaatggactatatgataatctccctgacgaattaaaatcaataatctcaaaaacaaacaaacatcgttggcaaaatgaatttgaaaataatatttagggtgtgaaattaatgcattcataaaagaagaattagaactaataaagcgcattggaacttcaaatcaataataaatcatattagcaaacataaagagaaaatcgtaaacgttatcgaattggttaaagaaacaattccaatagaagatgccttaaaggtttttaatatatctcgaggaacttatcaaaattgtaaaacattggtaattaacaaatgttatgcttcttattttttacgttgcgtaaagcaatacccgtatcaattgttaaagaaagaaatctcccaaatgaaaaaatatttataagatcaaaaatacagatattggtctaaatcttctgtttatttccttggagtaagaaataaagatattgctacaagcttaactactttttataaatattcaggattattaggttatcaaaaatcaagaaatattcatccaaaaataaaacataatgcttttataagctacaaaccaaacgaaatttggtgcgctgacgtcactattctgaaaaccttggatggcaagaaacattttattcattttttaatggatcatttttctaaaaacattttgggttaatatgttgaaaatagctctagcgctgttgcaattaaatatttattacaaaaagcttatttagaacacaagagcaatgatactataaaatttgttactgacggcggtgtagaaaatgtaaattcaaccgttaaagattttttgcttactacagagaatgacgtaaaacatttgattattcaaaaagatattccattttcgaattcaaaaatagaagcattcaataaaataatcaagcatcaatttttactgtctagaaatctggaaaatagaaaacagcttaaaggtgctttatcagaatatgttcatatttacaacagcatcagacctcaactttcgttacaaggcaatactccagaagaaacttatggcggaaaacagataacttttaacaactataagactcattttgcacagtaaaaaatggaaagaatgatgttaaaccaacaaaataaatgtaaagcttatcgccattaaatcaaaaagcctttaatctggataatctcctagagataggcttttttttattttaggttgttcgtttaaaccctcatatttattgagaattccttatatggaactgtcttttataaaactttcttgtaaaaagcagggcattatctttttctaattcctaattaaaatggtaatcagtctctgttataaaaagataatcatggtctaagactaactctataacaacatctttcttatgcgaactctacacatgggttatttccataatgtaaaaatataaacaaataatttacaaatttgtaaattatttaatacttcttttatcttattaaattctataatattaaactttttcatgcccaactgaactactacaaactgtgaaataaggattaatcatttctattttacgtagtctctggccatttatgcctcaccagttcctaagccttttgcaaagatggttatttcatattttaaaacatatgtgaaatgtggaaacccgtaacactataaaagattaattatttatattagccgactacaaatttttcaaaactaaattttccatgaaaaaactttatttagtaattgttcttttatttattacaatgagttgttcaaaagatgacgctaatattgaagatgacgctaatattgaagaagacgtacaaaacttagcccctaaagattttgacgtaaaaattaaagaggtttcagataacagtgcaactataacttgggatcaggttattgatccagaaaacgatccaattacctacagtatattgttaaatcaatctccaattattggagggctttcagaactaacgtacaagctaactaatcttacagaatcaactaattacacagtgcaaataattgcgcaagattcatttggaaataaaacatctaaatctttgtcttttaaaaccgaaaaatattatttaaaatatttaaaatcatatgattatggcccgggaagaattaacggatatgcgtcaggaacgcccttcaatataataaaaactaaggataaaagttatataattgctgggaaatcggcaagaacaaatggtgatgctagtcaattctttgtattaaaaatagattatcaaggaaatcaaatttggaagaaattctataactatagaataggtgatgcgactaattgcaaaataattgaatctgcaaacggtttcttattggctgctgacaaatatgtcttgaatctagataatgacggaaatctagtttggtacaaaaaaatagatagttatgaattgtctcgacaacctaatgaaataaagtcagtcgctcaagataaatataaaaatatttatcttgttggaagtagaacagatcctaaagaagaaatagaacaagaagcagtactaaccaaattagattatttaggaaatactgtatgggaaaaaacatacagatctaccgcaagaaatttttttaatgatatacaaattaattcctctaatgaattaataatttttggaacaaaagaaacttctggatttacatatgatgaaatgaaagatggcactaaacgtggccaaaccgatttttgggtattaaaaacagataatgaaggaaaaatcatatgggataaatcttttggagatggacgttttgatttttcaagtaagataattattaatcgtaatggcaattatgtatttgcaggatttagtttgggtgcatatgatatgagtaaaggacgaatttttgaaatagattcaaatggaaatgaaatttggaatattactactgaagaaagcgataatatatactcagttgccgaaaccttagatggaggatatgtgacagctggttatattggtactcagctttctaatgccttgtcagtatgtaaatttgataataatggaaaaaaagactggagacaaaattattatatcgagtatacctatttatacggtcagtcaatattagctgcggatgatggcgggtatgtcgtagtaggaaataatggaaaaaattattatcatggagaggaaaaaccaaaattagcaatttacaaaaccgatccttttgggaattttttgaattagaagtttacgtaatatatactcaggtgcatttttcatctcatgtaattctttgatccctatcaaaaattgctcaggattgtttaagccagatattacaattaatttcgtttgagcttatttaaaatctcccagattgccacgttcctgcaatcagcaagatgaacggttgttaaacaaccgactatcttgccaccttttacctcggaactcggtggtggagacactaaaagaaaaagagtttgaaaacaatgaaaatgaaagatgatggaaagaaaaaaatcaaacagaacaagaattgttggactacgctttacacccgaagaatatgcaacaattgaaagcaaattcagaggaagcacttgccgaaaattaagtgatcatattcgaaaacatttgttcgataagccaattgtaaccacatataggaatcagtctttagatgatcttatggaagaaacagtagaacttcggactgaactaagcgccattggaaacaacatcaatcaaattgcaaagaagctaaatacggtcagacaaatagctgaatttagagaatcaatacttcgctttgaattagagaaaacaattctttttaataaaattgatgagattaaaacacatactcaaaaaatatcggaacaatggttgcaattataaaaacaagccattctatccagcatattttaaattacaatgaaaacaaagtcaaagcaggtgtcgctgaatgtataagtgcggaaaaatatccaattgatttagaaaaattgaattttactttaaaacttaatcgctctttaaaattagctcaacttaacgaaaatgcgaagcgtaatacggttcatatttctttaaattttgatacctcggaaaatcattcaaaagaaaaactaatcgaaatttcaaatgtttatatgcaaaaaattggctttggcaaacaaccatatttagtttatgagcatcaagatgctgggcatccgcatgttcatattgtaaccaataatattcaacgagatggaaagcgaattgatctgcatcttttaggcattcgtaaatcagaaccagcacgaaaagaaattgaagaattatttggacttgtaaaagctcaagacagaaaagtaaaagaaccgcttttgttgacgccaatttcgacacctagaataaattacggaaaagtagaatctaaaaaagcaatcagtactattttaaattttgtagtaaacgaatataaatatacaagtcttccagaactcaatgccgttttgaagcaatacaatgttttagccgatagaggaaaagaagattctagagtatttaaaaacaatggaatattatacaaaatattagataaaaatggaaaaactgtcggagtaccaataaaagcaagtgatttttacactaaaccaacattgaaaaatctagaaggaaatttcaaattaaataaagtaaaaagaacaaaacatcaagcttacactaaaaatgaaatcgataagatattacagagcaataaacaatattcgttggatagttttgtcagtcaattacaatcaaaaggtattcacgcagaattaagaaaaagttcggaaggacagctttacggaattacgtacatagaccacagaactaaatgtgtttttaatggaagtgctttaggaaaacaatatagtgcgaaggctattgtagaacgatgtttatccgagaataagaatgaaaaattacaattaacagatttaaaacttgatacaagttatcaaattttaaatggaacatcaaacttggaaaaaggcttagaaatcctttttaaaccagaacaaaatttggaaggtttgtcagaacaacaaagaaataagaagaagaaaaaaagtaaaagaaaaggatttatacttagttaataataataaatggttgttaatatatacaatatatatatatgtacataataatgaactttttaccgatgagcaaaaaacaactgctgtttccaaagcatctcttaatattacaacaattgggagagaatatcaagttagcaagaaaaagaagaaagttaactacaatacaggttgctgaaagagcgggtattgtgaggactacgttatatcaaatagaaaaagggaattcaagtgtttctattggtgcttattttaacgttttgagagttttaggacttcaaaatgattttttaaaattagcttcagatgatgaacttggaagaaaacttcaagacattgaattattgaaataatagttttgaggaaaaaaactaattaagaaaaaatagaatatgtctttaaataaaactgatatatatgtttacgcccattggcaaacaatgaacgaacccaaaatagtagggattttatcagcgcaacaagctaaagggaaaaaagcatttagtttcgaatatgataaaacatggctaaaaacggagcaaaaatttctattagatcccgatattcaattgtatggaggcaagcaatttcctaatcaaaaagaaaatttcggaatatttttagatagtatgcccgacaaatggggacgtacattgatgaaacgccgagaagcacaactagcaaggaataataatgaaaagccaagaacattatacgatattgattttcttttgggtgtttttgacgagagtcgtatgggagtattacgatttaaaacagatttaactggcgattttttagacaacaataaaacaacttcaactccaccttggtcttcaattagagaacttcaaaaagcagcttctatttttgaaaatgataaagataatgaagaagttaataaatggctgactgtgctaatggctcctggttcttcgttaggaggagcaagaccaaaagctaatattttggataatgacaatagtctttggattgcaaaatttccatctaaaaccgatacatttgacaaagcatcttgggagtttttagcgtatcaattagcaatcaattcaggaattgatatggctccttgtcgaatagaaaaaataatggggcaacacaataccttttttaccaaacgatttgatagagaaaagggcgaacggattcactttgcatcggctatgactatgacaggaaataatgaagatacaattcgagataatcaagcaagttatttagatattgccgaattcataagtaatcatggttcagatgtagaagcaaatctacaccagttatggcgtagaattgtttttaatattgcaatttcgaataccgacgatcatttgagaaatcatggttttattttaaccaaagaaggatggatattatctcctgcttacgacctcaacccatcaatagacaaagacggcttagctttaaatatggacatggataataattttctagattttgaattagcaaaaagtgttggtgaatatttccgattagataataatcaaatggaagatgttataaatcaagttgaaagttcagtaaggcattggaaagttatcgctaaggaaataggaatatctagaggcgagatcgaattaattgaaaaggcttttatgaaataatagaattcattactaaaataatgttagactattgtattactttattctttacgaacttcaactaaataccaatccgctaaaaattactgtataaatatataattgctttattaacgtaaataaagcaattatatatactaaaacttaaaataatttagtcttttggtttatgaacatgaggtttcaaatcaggatgttttggcttcgtttcggggtttaccctccttcttctatcatcatttccaccttctgtttttggttttggacctggtttgatcgctttaattgtctccataataaatgttttttttttaaattaataataacaaacatcattaataaaaaatttacattattacggaaaaccatatttccataaaaaaagcgacccttttgaggccgctttgaatgttttcacaacggaataatccttattgtgaattgcttcaaaattgtattgcaatgatacaacaaaatttcaatcaccaattacggttttccataaatcaattcattttcttttccttaaatttcgagaccaattaagataacgagaaaattcattgtaaaagagaattagaaatgaagaaaatattaggtttagatttgggaacgacatctatcggatgggcatttattaatgaaggagaaaatgacaatgaaacctcatctattataaatgcaggtgttcgcattgtacctttaacaactgatgaggaggccgatttcaaaaaaggcaatactatttctatcaatgcagaccgaacattaaaacgtggcgcaagaagaggtttgcaacgttttaaacaaagacgtgatgctttattacaaagttttagaggaatcaattttatttcttctaattatgtctatgcggaaacaggtaagcaaactactttttcatcttataaattaagagctaaatctgcaacagaactggtaaccaaggaagaattggttcaagttttattgatgctcaataaaaaaagaggctataaaagcagtcgaaaagcaaaaactgctgaagaaggtgatgctattgatggaatgaaaattgccaaagaaattttcgaaaataatttaacacctgggcaatgggtttataattcattatcaataggcggaaaatttatacctgacttttatcgttcggatttacagaaagaagtagagaaaatcgtgcgttttcaaaatcaatttcatccagagcaaatgaatgaaaaattattggaaaacattcaaggtaaagctagaacggtaacttctcaatatttctcaagaatattaaatattcctcttgccgaaaataaaggaactcgggaagaaaccaaattgcaacattataaatggagaaatgaggctttaacagaggaactcgatttaaaagttttagcctttataattaccgaaataaacaatcaaatcaatcaatctaatggctaccttggtgctattagtgatcgaagcaaggagttgtattttaatcaagaaactgttggtcaatttcaatacaaccaattaaaagaaaatgcacacactaaactaaaaaatcaggttttttaccgtcaagattatttagatgagtttgaaaaaatttgggaaacacaatcaaaattttatccagaattaaatgatgaactaaaatcagaagttcgtgatattacaattttttaccaacgaaaattaaagtctcaaaagcatttggtaagtttttgcgaatttgaaaaaggacataaagccattccaaaatcatcaccattgtttcaagaatttaggatttggcagaacatcaataatattgttgttaaaaatgaaacgacaaaagaaccttttcttttaggtgaagatttgaaaaaagtcattgctcaagaattgtcttttaaagaaagtatgaccgattcgcaattgttaactttttgcgacttaaagaaaggaactcatactgttaatttcaaaaaaatagaaggcaacagaacaaatacttcactttttaaagcttttgaaaaaattttagttttagaaggttatgacgagttagacctttccaaattggacgcttctgatataaaaagcatcatcaaatcagccttttctgatttagaaatcagtaccgctattcttgattttgacccaaccattcaaggcaatgattatgacaaacaatcttattatcaattgtggcatttactttattcttcggaagaagatgattttttaaagaaaagtctaatggacaaatttggatttaaagaaagccaccttccttttcttttgaatatcaatcttcaagccgattacggaagtttgagtgctaaagctataaaaaaagtattacctcatttaatggatggacatatttatgataaagcctgtacattagttggttataatcattcctcctcattaacaacagatcaaaataatgaaagagttttaaaagatacgcttgaattattaaagaaaaatagtttgagaaaccctgtagttgagaaaattctcaatcaaatgattaatgtgattaatgccattataaaagacccagcgatgggaaaaccagatgaaattcgtgtggaattggctcgtgagttgaaaaataacaacgaacagcgaagcgaaatgacaaaagccattaataaaagtacaacggaacatgaacaaattagaaaattattgcatactgaatttggaattcatcgtgtcactcgaaatgatattatccgttataagctttggaaagaatgtgatggaatttcgctttatacgggcaaaccaatagaaccatctaaacttttcacaaaagactatgacattgaacacattattccaaaatcacgtttgtttgatgacagtttttctaataaaaccatttgtgaacgccaattaaatattgataaaagtaataaaacggcttattcattttttcaagagaaattatcagcggaagaatttgaccaatttgaaaaaagagtaaaaagtttgtttggaaaaatcagtagaacaaagcaaaacaaacttttgatggctaacaatgaaattccagaaggatttattgacaggcaactaagagaaacacaatatattgctaaaaaagccaaagaaattttattggaagtttctagaaatgtaaccgcaactattggaagtgttactgataaattgcgggatgactgggaattagtcgatgtgatgaaagaactcaattgggaaaaatacgataaattaggtttgacctatattgaagaaggcaaaaacggagagcgtttatataaaattaaagattggaccaaaagaaacgaccatcgccaccacgctatggacgcgataacggttgcatttaccaaacctgcatatattcaatacttaaataatttgaatgctcgaacgaataccgataaaaaaggaaattcgattattggaattgaaaacaaatacttaaaaagagataaaaacaataaacttcgatttattgagccaatcccaaactttagggaagtagccaaaaagcaactcgaaagtattttgatttcctataaagcaaaaaataaagtagttacaaaaaataaaaacgtaactaaaaaaagcaatggaacgaatcaaaaaattcaattgacgccaagaggacaattacataaagaaacagtttatggaaaactacaacaatatgttaccaaagaagaaaaaataaatgccaatttcactccagaatatgttactaaagttgctaagaaagaataccgtgaagctttattaaaaagattaattgaaaacgaaaatgaccctaaaaaagcatttacaggaaaaaacgctttaagtaagaatccgatatatattagtttagaaaataatattctagttcctgaaaaagtaaaaatagtttggttaaaatctgattacaccattcgaaaagacattacacccgatttaaaaattgacaaagtaattgatattggcttaaaaacaatacttcaaaatcgcttgaatgaatttaacggagatacaaaaaaagcttttgtaaatctagacgaaaatcctatttggcagaacaaagaaaaaggaattgctataaaacgagtgaccattagcggagtgagcaatgctcaagcactacatactaaaaaagaccatttgggaaacgaaattttagacgaaaatggacagccacttcctgtagattttgtaagtacaggaaacaaccatcacgttgcgatttatagagatgaaaaagggaatttacaagaagaagttgtttcattttttgaagctgtaactcgtaataatttgggtttatccattatcaataaaaatcatgaaaaaggttgggaatttttgttttcgatgaaacaaaatgagttttttatatttccaactgatggatttaatccacatgaaatagatttattgaatactgaaaattatcacttgattagtcgtaatatgtttagggttcagaaaattgctactaaaaactatatgtttaatcatcatcttgaaacgaaatcagtagatggagaaatgttaaaaactaaaaagcaattatctaaaataagttatcactttattcaaacaccatcatatttgaattatataatcaaaatcagaatcaatcatcttggacaaattgttcaattaggcgaatattaattgcaaatcaaaaaatcaataggaatgggctttagccaaaatttataaagcatttaaaacctacaaaaaatgataaaacgaacccttttctttggtaatccagcttatttgagtaccaaaaatgagcaaatcgtcatatcttatccagacaaggaacaggaaagcaaaactgtagctattgaagatattggcgttattgttttagaaaaccaacaaattaccattaccaatggtttactagaaaaactaaccaacaacaatgtggcattaatcaattgcgaccaacagcatttgcctattggattgttaatgccactaaacggacatacagaacaatcagaacggttcaaaaaccaaattaatgcttcagttccacttaaaaagaatttatggcaacaaaccattagtgcaaaaattacaaaccaggccggattactaaaagaaaagggaattccttgccgtaaaatggaactttgggcaaaggaagtaacatcaggcgatgtattaaatcacgaatcaagagcagctgctttttattggcaaagcctttcacacattctcacaagagatgatagtgtttttaacagagggcaaaaaggaattccgcccaataacctactgaattatggctacgccattttaagagccataaccgcacgagctttggttagttctggaatgttgccaacattaggtattttccaccgcaataaatacaatgcctattgtttggcggatgatattatggaaccttatcgaagttttgtagatttagttgtatgccatattatggaaacagaggatcattataaagaattgacaattgagataaaaaaacaattattgagtatcgctacaatcgacgttaacattgatgggaaaaatagtccgttgatggtagcgatgagtcgaacaacaaattccttgaacgagtgttttgagggaagttctcgaagaattttatacccaatttatgtatgatgtacattacacacgtttaaatcaatataggagtttgtggatattagtattttttgatctaccaaccgagacgcgtaaagagcgtaaaattgctagtacttttcgtaagagattattagacgatggcttttctatgttccaattttcgatatatatgcgcttctgcgccagcagagaaaatgcagaagtacataccaaaaggattaaaaatagtttacccgaacatggaaaaattggtgtgatgcaaatcacagataaacaatttggaatgatggaactcttttatggaaaaaaacctgtagaaaccgaaaagccatcgcaacaattagagcttttttaaaaaacaggataaaaaaaacacctactaacctgtgcatcagtaccccaattcatttatttttcactttcaaaacaaacctataactaccaacatatcaaacaattaactagcggtatgttgggagttataagtaaaaatacaattttgaaagcaattcacaacgggaaaattaaagtgattggagatactacgttgggagttataagtaaaaatacaattttgaaagcaattcacaaccctgatgcatcaatagtaataccgtaaggagttgggagttataagtaaaaatacaattttgaaagcaattcacaacttagtatcataaattaaatctgcaataccagttgggagttataagtaaaaatacaattttgaaagcaattcacaacctgtttggttaggttttcctattacagaaagttgggagttataagtaaaaatacaattttgaaagcaattcacaacctcaattaccttttcgtttttaggtattttgttgggagttataagtaaaaatacaattttgaaagcaattcacaactaaaaccactgttagccgcaaacaataaaggttgggagttataagtaaaaatacaattttgaaagcaattcacaaccagtacctgttgaagtgttatttgaatatgttgggagttataagtaaaaatacaattttgaaagcaattcacaacttattacgcaatagtaatttattccaaaggttgggagttataagtaaaaatacaattttgaaagcaattcacaacagcgtcaagtaatacgggtagtcgtgttttgttgggagttataagtaaaaatacaattttgaaagcaattcacaacctatttcgtctgtaaatcctattgttggttgttgggagttataagtaaaaatacaattttgaaagcaattcacaacgagcagttaaaatcatttagaaaatcattagttgggagttataagtaaaaatacaattttgaaagcaattcacaactggaagtcggtgaggttaaaattttaatagttgggagttataagtaaaaatacaattttgaaagcaattcacaacttatctaacatagctaagaactctttttcagttgggagttataagtaaaaatacaattttgaaagcaattcacaacctagggctggaaaaaaagataacgcaatagttgggagttataagtaaaaatacaattttgaaagcaattcacaaccacaccaatactgtcccttttgcggaggggttgggagttataagtaaaaatacaattttgaaagcaattcacaaccctaagaatccaaggccgaaactgaactttgttgggagttataagtaaaaatacaattttgaaagcaattcacaactataattccgtgttttttaaattgacttttgttgggagttataagtaaaaatacaattttgaaagcaattcacaactccagagccatcgagtctgcaaacattttagttgggagttataagtaaaaatacaattttgaaagcaattcacaacacacccaaagtcgaagcgccttttaccggttgggagttataagtaaaaatacaattttgaaagcaattcacaacttatccgtacaatgcaacacgatacgtatgttgggagttataagtaaaaatacaattttgaaagcaattcacaactgcttttaactggtttagaaatggacttggttgggagttataagtaaaaatacaattttgaaagcaattcacaactttcgataaacaatggcggtgcaaagttaggttgggagttataagtaaaaatacaattttgaaagcaattcacaactgttctgctaaaatcagttcacacttaaggttgggagttataagtaaaaatacaattttgaaagcaattcacaacaaattttataatttactgcgcgcatcatggttgggagttataagtaaaaatacaattttgaaagcaattcacaactccagctttcttatttcgctacgactaaaagttgggagttataagtaaaaatacaattttgaaagcaattcacaacttgcgataaacaatggcggtgcaaagttaggttgggagttataagtaaaaatacaattttgaaagcaattcacaacattgaacgcccttactttcattggcgctttgttgggagttataagtaaaaatacaattttgaaagcaattcacaaccaggtcctgattcaccatctaagctttgggttgggagttataagtaaaaatacaattttgaaagcaattcacaacgagtagctgaagcctgcattcgctccattagttgggagttataagtaaaaatacaattttgaaagcaattcacaacatgttttgattgatgttcttatttaagtggttgggagttataagtaaaaatacaattttgaaagcaattcacaactactttggcaaacgtctattttctgtatcgttgggagttataagtaaaaatacaattttgaaagcaattcacaactcgctgcactctacatctacaaactttgtcgttgggagttataagtaaaaatacaattttgaaagcaattcacaaccgtcgaacatgctgacatgaattgccaaggttgggagttataagtaaaaatacaattttgaaagcaattcacaacgcgtgggcgaaagctattatagatgctaatgttgggagttataagtaaaaatacaattttgaaagcaattcacaacatataatctaagcgtatttattgaaagtgagttgggagttataagtaaaaatacaattttgaaagcaattcacaactacattataaattatggatgcacctagcaggttgggagttataagtaaaaatacaattttgaaagcaattcacaaccagacagtaattcatacaatgattatgtgagttgggagttataagtaaaaatacaattttgaaagcaattcacaacgaatcaaccaaagcctttgctctagcttcgttgggagttataagtaaaaatacaattttgaaagcaattcacaacacaggtctaggtttcattgtaagaaatgtagttgggagttataagtaaaaatacaattttgaaagcaattcacaacattaggagacttgcaatatagagggtttttgttgggagttataagtaaaaatacaattttgaaagcaattcacaactcattagcatcgtaatacacaacgcatgagttgcgaattataagtaaaaaaaatataaccttgcaagaaattcacaattagttaattgtttacgtattttttaatgatataatcgctaacaggtttcaaagcacgcccattctcaggatgcctaccatgggtattaaaaaattcaatcccgtgtgctgttttagcataccaaactatagcttctccatccttaaaaaaaacggttttatttgtaactttaatttttttgagaattaaaacactcttatctgaaggctcaattttattaaaagctccgatactttccacttttaaatcacagctaacttcttcataatgatcattagaccattgcatacattcttttttttgtgaaaaatagtagcatagacctgatagcaaaataataattccaattacaaaccatgtatttggttttattatcttaggttctttatttattaagtcttcttttgacgtaagacctacacttcgtgactcccgaacttctttaggggtttcttccagttttaaactttcttcactttttacaaaaacattctcactctggaaatttttatcagttactaaatctgatactattaaatcatctgtgttttcagttgcattttcttcttcagtaaaatattttctaaacttactataaggtcttagttcaaaatcaaccaaaattgaagcaagctcaaccgtgtgaaaattagctggctcttttttaccttttaagaaagaaccaatgggcttaaatttatcaatatactgattaaaagcaacctcttgggttgggttaaattctgatttaaaaaaaagagagaagatttttaaatcatcttttttatcattcgttataaatattttccagcatagatctctaagctttgcttgtgatggaacctctaaataataactattgtcaccgtttttttctttttcatatttttctctaatcgcttttttgtaatggtcagtagtaatgtttcgcataggctttcaggaatttataggattctttaagatttattaggattaaacaaaatagttcaggaattccgggaattccttatcaacaaaggcttttaatcgtatttactttgccacagtaattagtcatcgttttgatctgcagattaaaacaaatgtacaaaactggttcaaaaaaaagtgcggaaaaccgtaggagggattttattcgggaagtataaacaaagtcatacagttctacgcattttacttcccaaaatcaatggtattgtatttaacaagatctggaaaagtttcggacagcaatacccatgtctaatttttaacaatagtaagatgaaaagattatttatattgggagcgatagcattattaagttcaaccgtattttcatgtaccgcggatgacctagtaccaagtgatacaaaaacagaccaaaaagagaatgtaagtccagctaatgtcgctgctgaccaaggtcctggagatgaaccgataattgttcctccaccaaaataaaattgttataaactccttaattaacaattaagtactattttcggggaaagtatcctttatgttacgatccccgatttttagtttgattttgtgttctattttattttcttgtcaggaaaataaaattattgctccaaaaaaaaatactgatgggctgaaaaatggccgtctcctacaacaaaaagctataagtcaattagaaaaaaataattttaatagcgctttttactactttaataaatcgaaaataaccgctgaatcaatgaatgacagcgctaagattatttatagtcttattcaaatggcctccattcagcaaataaatggcgattattatgggagtaaagaaaccttaacagaagctcttccttatgtcaaaagaaaagatatttattcggcatcgattaataactattttggaatagcagataaggaattatctatttatgaggatgctattttttattataaagaagcgataaaagattgcaaagatgaaacgtgtaaaaatccgcctctaaataatattgcagtggtttatattaagcaaaaaaaatacgacaaagccattagtattttagagagtttgagaaataaacaaaatattgatattccttcttctgctaaacgcaaaggcagaatattggataatttaggttatgcttattttaaaaaaggtgactctgaaaaaggtattatattgatcaataaaggtttacaaataagaagtcaaattgatgatttttacggaagtattgaaagtaatttacatttggctgaatattaccaaaaacttgacattaaaaaatctaatgagtatgcaaaagatgcttatgaaatcgcaacacaatttaatagcattgatgaaagactgaatgctttagcatttttaatatcaaatgatcagcaagtgaataatgagcaatatgctcaaaaattcatttatttgaatgacagtataattaaaatacgtaataattttaaaaataaatttgccaaaattaaatatgattcaaaaaaagaaaaagacgagaatcataaacttcgattagataaggctgaaagtcttttaattcttcagaaaataaaataccaacgttttttattcctcattggaattgtatttcttatcgttttaatagcacttctaattcggtatttcaaaataaaaactaaaaccgaaagaataaaagcttcttacgaaacagagaccagaattgcgaaaaaaatacatgatgagctggctaatgatgtttttcatgccattacttttacacaaacgcaatctttaactgaagttaacacaaaagaaaatttaattcaaaaattagacgatatttatcagcgtgtgcgagggatttcaagagaaaataacgaaatactaaacagtttggaattttcaaaaaatttaaaagacttacttgctacctataatgatcattcaagaaatataatcattaataatattgaaaaggtagattgggagcttattgatgaaaccaaaaaagtcactctttatagggttttacaagaattaatggtaaacatgaagaaacatagtttggcttccttaattgtagtaaaatttgacaactcagactccaaaaaattaattgttgattatgtagacaatggaaaaggctgcaacaaagcagaaattattaaaaatggtattcaaaatatggaaaaccgtattctatccataaatggaactattatttttgacacagaacctgaaaaaggatttaaagctaaaataataatcccaaataattagaattataatgtttaaaaaagtaattgtcgcagaagattttgatagtataaacttagggatagaacaagccttacgagatttagatattaccaattatcaacatacaaaatattgcgatgatgcttacctaaaaattagaaaagcaattattgacaacgagccatatgatttacttataagtgacttatcttttaaagcagattatagagaagtgaaaattgaaaatggagataagttgatcgaaaaagtacgagctgaacaacccgatttaaaaattatagcttattctgttgaagataaaagtcatcgaattagatccctttttaccaattcagacatcaatggttttgttatgaaaggaagaaatagtattgacgaattaaaaaaagcaatacgacttttatcaacatcagaacttaaatacatatcaccagaaatatcttctgttctacaggaaaataataattatgaaatagatgattttgatgtcttaattatgaagcatctttcactaggaactgcgcaagatgacattagagatacttttatatccttaaatataaaaccaaatagcaagagtgctattgagaaaagaatttctaaattgaaagatttttttaaggcaaacaacacagtccatttggtctctattgccaaagatatgggcattatctaaacttttttatcagattacggttttccataaaatattgatttttattggttttacatttgaatggttaattaaatcatataaattaaaatcaaaaatcatgaaaaagtactatgtaaacaaaaatgcacaatcaaacggagaccatgaagtccatactgctgattgttattacctaccaaatgttgaaaacagaaaatatcttggcgaattcacatcttgttcaagtgctgttctagagtcaaaaaaaacctaccgtcaatctaacggttgtaaaacttgctccttaggctgtcatacctcataatacaactatgagttttagatttcaaaaaagagtaaacttcgggggagattttggcctcaatgttagcaaatccgggatttcacctagtttgagaacgaagagaggtactataagtactaaagggttttcagtgaataccggaatcaaaggagttgggtataaaaaaacaataaattcgaacgtatgtatattatttcttctaatgtatttatttctcactgttaccctatattaaatcattaattagtacagtaaaaaaaaatattattattattatttgtaacattttcgacaataatcgttgtgctaaagaaatagggttttgtaaagtttgaaagcccaccggaaaaaaaaacaccaataaaaagaagaaaaaaattaccaactaaattttaaataagatggattcaaaagcaacaatgactattgagctaaaaagtcattttttaagactttatcaaatggctttatctgatgataattttaatgtcctagaactgcaaatgctctattttttagcagaagaaagagggatctttaaagaagaattagataaactatttctcaatcctgttaatgaccaaacaggaattcccgttgaactaaatacaagaatcgagtatttatatgatttaacgtgtataatgtgggcagatggaataattacagatgacgaattaaatactttaaaaaaatattgtaaaaaatttgaatttatagaagagaatatagatgaattagcaaattatcttgttgactgcgtcaaagaaggaatgaataaaaatgaaattattagtcaactaaattcttaatttatgaaaccattacagcagttgttccgtttaaaaaaagtagaagaagctttaggcgaacacatacaaaataaagaagaagacagagaacaaatcagaattacttattatcaaagtggatttacagcttctttaagagcttctggaagaccaattgtacttagagcatgcttgcaaaatttatttaccaacttcaaagaccaatgtagccgccaaatttcagaacaacaaaggctgaagcaaccttttaaagaagagcaagaaaaaagtaggacagaacttaaaaaatgtgaaacagcaattggaatatatgaacaaaaagagcatgaaatagataaaaaaattgaaaatgctgcctacgaaactgtcgatgtaaaagtaaatcctcaaaaatatat

SEQ ID NO: 1544 - DNA, 24056 bp, synthetic construct
  misc_feature 1..24056: note = Synthetic
  source 1..24056: mol_type = other DNA
aatagcttctaaaatgacccaggcatctttaccacaagatgtccagttgagactttatgccttttataaacaggctactttgggaactttagatctaaaacaaacctcaaattaccatttaagggatgctttcaaaacaaatgcttggatgcaaattagtcatcttactgcagatgaagcaaaagaacagtatatcgaaatcatcaattctattttgaaaaaataatgttagtcatgaaaaagtttaatttttgtatcccttgtttagtattagtaaccctcttactctcatgcaataacaaaaaactcaccgaagttgtagaggttccgctaccaacggctcaagaaaaaatatccttaggagttccagatgatgtaaaagcaaatgaaggagcttttcaactggaaaaattactttatccatatgatgcattagcaccaaatatttcggctgctacgctagaaatgcattattctaaacattacctgacctatactaataatttaaacaaggcgctagcaggaacagtattggaaaacctaacgattgaggaagtattgtcaaaattagatttgaatgatgctaacattagaaacaatgcaggcggttattacaatcacactttatactggcaatgtatggctcctaaagctggtggactgcctcaagatattttagccgaaactattacaacagattttggttcatttgaaaactttgcgacattattcaaaaatgaagctacaaaacaatttggttccggctgggtatggcttgtggtagataaaaccggaaaacttcaagtgaccagtactcaaaatcaggataatcccttgatgcaaaatgcacttattcccggaactccaatattagctttagatgtttgggaacacgcttattatttggattaccaatacagaagaaaaagttatatagacgccttttttaacgtaatcaattggaaaaaagtaggtgaaaattacgatgcagcgataaaaaaataattttatcgcttttaattcaaaaacaaaaaaatgctgatataagttcgtatcagcatttttttgtttttgaatagtatccatttacaagattaccataaaactaaatgagcttatgtaaactaaaatggctgcttcattttctataattgataaataaacgattctgaaggcgcaatactaatttgggcttttccttcaccattcaaaacctttaaatgaatggaacttttagtatacaattgatcttttatagtataattaccgtctttcaaattccattttttaataatatccgaaggaatttttaactcgaaattactccttgtaagccaagaaaaattagtgactattattaatttttgagtatcggaccaacgggtgaatgcataaattcccgaatcatactttttagttccctgacgattaatggtttgaatttcttggaattttcccattaaagcagaactattgagagagaaattcagtaatctcttataaaaatcgcgtaagtctttttcgctttgagttagttgaccaccgtcaaattttcctccgttcatccatcgctgatgatttggaactccaacataatcaaaaattgaagttctggaatgggtcccaaaacctccattttcatttcctgcctcacccacttcctgaccaaaataaatcattgtaggcgaagtgctaatagtggttgaaactaccattaatggtttccctttttgagcagttcctgcaaattcaggacttgccaaacgttgttcatcatgattgtccagaaaatgcaacatatgatgctcaatatctgtcattccgttttttatgtttgataatccgtcaggcaacgattttccacgaatgatatctttcaatttatcatacgtttctaccttatcatataaataatccattttaccaagatgaatataatttctatattcttttggattatacacttcggctaataaaaaagcattcggattatttatttttattgccgaattcatatagctccaaaattcatacggcaccatttcggccatatcatatcgaaatccatcaacccctttggcagtccaatacaaggctatatctttgaattttttccaagaatccggaacatcttttcctttccaaaaatcgaaatgttcttgatatgattttgtatcaaaaccaacgggaagttctggaaaatccttggaaccatcaggacgaattccgtaatttacttttaccgtttcataccaatcattacggtcgggctttgccatacgagaaccgttaccagtccattttgctggactttcttcgaattttccatcaactaatggattcttttctccatttaatggtttatccgtatctggtacttcaaagtgagtatttggaatataatagaagttattatctcttttatattcaacagaaacatcatcatcagctccaaaatctttaactccttccggattattttttccttcgtatttacgtgcaatatgattgggaacaatatctataatgacctttaatcctgctttatgcgttcgagcaattaaagcatcaaattcttgcagacgattggctggatttacagctaaatcagggtttacattgtaataatcttttactgcataaggagaaccagctcttcctttgactacatcaggatcatcattagaaattccaattgcggtgtaatcccgtatcagagcatgatgcggaactccagtgtaccaaatataagtaactcctaaatcctttatctcctgtaatgccgtatccgtaaaatcgttaaacttccctactccattttcctcaatggttccccaaggtctattattggtatttttatttccgaataatcgggtaaaaacctgatatacaacttcttttttatttgagactgactctttctgttctgtgttcatttttaaatctttcgttttacaagccgttgccaaaagcactaagctaatccctgcaacaatagttgttgtttttatcatataaaatattctgctgattttaatacttttttcgacatcctaaatcaatttttaaatttaatatattttagattaaagaagccaatatcagttaaaattaaaatggatgcgttttttaaaacgcatactacaacgaaagagtaacgctatttgttgataactttaaaaacaatacaaaatggatttctatgttattttatggaattataaataaatcctaatatagattatggttgtttcctttttcataaatttgacaaaaattaaatccattgaagaaaccgctatttttcattcgttgttgcttgctattgctttgtactaatttgattttggcgcaagcaccaaaaaaaattgttgtagaacattctgattattttgatgttaatcaagttgaaataccagatgctgttttgcttaccggaaacgtacgtgtgaatcatgacggagtagttttaacatgtaataaagcctattactttcaaaaggaaaattacattaaggcttttggaaatgtacaattagttcaaggagatactttatttttaaacagtaaatatgccgaatacaatggaaatgtaaaaaaagcatttgctaccggaaatgcagttatgaattctccggatgctactttggctacagacaccatcaactttgacagaaacaaccaggaagtgttttacaattcgccgggaacaatcgtaaataaggataatactttaaaaagcaaatcaggaaaatactatgttgccgaaaaaaaattccaatttcttacggcagttactatcactaatccaacgtacgtaataaaaacaaatcatttggattattttagtaattcggggcattcctatctttttggaccttccacaattaccagtaaagctaattatatttatactgaaaaaggtttttatgataccaaaaaaaatcttgcccattttctcaataaatcctatataagatatgatgatcgggttataaagggcgatagtttgtattatgaccgaaacagggaatttgcatcggcaacacgaaatgtcaaaataacggattctatcaatcgcggaattgttaaaggaaattatgccgaaatatataaaaaacaagattctatgtttgtaaccaaaagagctgttgctgtaaactttgtcgaaaatgactcggtttatattcatggcaaaaaattaatggttaccggtaaagaagggaatcgtattattcgggcgttcaacaatgttcgattttataaaacagacatgagtggcaaatgtgattcgattcattcgagttcaaaaacagccttaacaaaactgataggaaatccgatactttggaatggcgaaaaccaaattacaggcgacgttatgcaccttataggaaataacaacacccaagaactcgattcgctcaaagtcctcaataatactttcctggtctcgaaagatacgctgggaacgggctataatcaagtgaaaggacaaaacctctatggtaagtttatagaaggaaaattgcacgaggtagatattgtaaaaaatgcggaggtcatctattacatgcgaaacgatgctaaagaactcattggaatcaacaaaaatgtgagcagtaaaatcaatatcatttttgataaaaatgcgatagaaaccatcaccttttttaagcaagtggatggtgatatttatcctgaaaaagatttacctgaaaatgcacgaaaacttcgaggtttagtctggcgtggcgatgaaagaataaaatccaaagacgatatttttcctccggaggagaatgaaggcaacgaagaaatagccaaagaaaccaaagctgaagatgataagaaaggtgttccgatgaaaatccgaaaggaaacattgaattatgataagaaaaaaagcaaaaaatagtgttcagatcgcaaattttagcttgcagtgtcttattatcatgaagattaattaaaaataggacacggattatttcggttggtgcagtacacttcgtcgccattagctattccttgcttttttggtacatcaaaaaaaaaattaaccaataattctataaaaagccaagcgaacaatcctcaaacactagttttatcggctaatttagcttctcatcgatttcttttttttctggttatttaatgttctatcttggttagtgaaaccattaaatactttctattatgaaaaaatttacctcctttttcacttactttatacgtgatttcaaacatgaattccccattttattacaaagattgactaatttttaatctatccttagaaaaaaattagtattttaaaacgtagctttttggggtaaaatgattataccccccatccaattaatactaaaccaatcaagtagctttgaaggaaataattacaaattcaaacgtatcaactaaatcaactaactaaaccactatggactaaaagtccatagatttggttggcagactgaaagtctgcaagaatgaaaaatgtaatacttaaacacgaatttcactaattttcacaaattaattcgtggtaatttgtgaaattcgtgtttgattttttttagaagctaaaagcgaaatacactaaagtgcatagttttaaactatgcttgtgaccaataaaagttaatttattctaaattttacaaaccaccccattttagaatcaaaatggggtggttttattgtttaaaagaaatatttttgtagctcaaaattaaactcacaaaaccgtgaataccgatttcctaaaataccaagcacaaacatctccttatccattaggtatggaagtatcgcatgctgtaggttcttatatttacgattccaacaataaaaaatacttggattttgtagccggagtttccgcttgcgcattgggacatcaacatccgagagttaatcaggccatcaaagatcagttagacaaatattcgcacgtaatggtatatggcgaatattcacaaagtcccgccgttcagtattgcaagctattggcctcactcctgcccgcacctttagacaaaacctatttggtgaattcaggaacagaagccattgaaggtgctttaaaactcgccagacgaactaccggaagaagccaactgatttcgtgtcacaatgcctatcacgggaacaccatgggttctatgagcgtcatgggatttgaagaacgcaaacaaatttttcgtccgttgattcccgatgttgatttcattacgttcaacaacgaagaagatttacaaaaaataacgaccaaaactgcaggaattattctggaaaccattcaaggtggtgctgggtttatacaaccgcataacgatttcctccaaaaagtacgtcaacgatgtaccgaagtgggtgctataatgatcttggatgaaattcagcctggcttcgggagaacgggaaaacttttcggattccaaaattatgatgtcgttcctgatattgtggttatgggaaaaggaatgggcggtggcatgcctgtaggtgcttttacggcttcatcagccatgatggatttgttgagtcatgacccaaaactgggacacatcacgacttttgggggtcaccctgtcattgcgtcagcctgtttggcgactttgcaggaaataactgagaccaacctcatggccgaagcaatggagaaagaaaagctattcagaacacttttggtacatcctttgatagaagaaataagaggaaaaggattaatgctggctgcaatgacagaaagtgccgatataacaaacgaagtgattctcaaatgtcaagacaaaggactcattttattctggctgctatttgaaggatgcgcaattagaattacaccgccactaaccatttccaatgaggaaatacgtgaaggctgttccataatgcttgaagtaatgaatgaaattttgaacaagaatatttaaaaatatcgcaattgggagctatttacttcgtcagttcgcttcgctcgtgtcctgctatccgttgcaaatgaaattcactgaactccaataaaaacaagagtattgtgaagtaatctttcctgccctgaacgagtttcaggaacctgaaaacaagttcaggtcaggaaaggatttccactcttatcagggctatggcatcagtattaaaccaaagctatttttgttaattaaattgttcacaacaattctaactttccctcacattacaagcacgattacctaaatttatttaggccaaattaaaaacacacagtatgcaattaagcaacgaagaagaagactataacttatcattgtctaaatttgagtccatgttgaaaaccaacaaagtgctcttttttgactccgaagaatttgaagaaattattcttcattatctcgatatgggtaaggccgctttggcaaaaaaagcgctcaaactggcattggaacaacatccaaaatctaccggactaaaactggtccaagtggaaatgcttgtctatgatgacaaactcgaattagccgaaaagctattgaatgagttgtacgccattgaaccaaccaatgaagaaatttacattcaaaaagctaatatttgttctaaaagagaccaacacgaaaaggcggttgaattactaaacatagcgttacaatataccgatgattatgctgatgtctataatttaatgggcatggaatatctttttatggataatcttgaaatggccaaagaaagctttatcaagtgtttagaagaagatttggaagaccaatcagcgttatataacgtagtgtattgttttgaatttttagatcaaaatcaagaggctataacctatttgaataaatatattgacaaaaacccatacagcgaaatcgcctggcatcaactgggtcgtttgcattatggagttaaagaatatgaaaatgcaattcgcgcctttgattatgctactttaatcgacgatgaattccttggtgctttcatggaaaaagcaaaagcttacgaacgtttaaaaaaatacgccgaagccatagaaagttatagcagaaccatagaattagatgatgcgacttcgtatgctttacttcgaatggggaaatgctatgaaaaattaggaaacaaagttttagcattaaaatatttcaacaaaactgttcatgaagacccccttttagacaaaggatggattgccattactgatttttatgtacgccaaaaaaactatcagaaagcattattttatgtcaacaaagcattagcaattgacaatcaaaatcggttgtattggaaacgctttgcaaccattaataaacaaatgaacttctttgaagaagccgaatttggatatagaaaagcagtcgaatttggtgattatcaattagacacttggttattttgggttgatattcttcagtttttgggggaattcgaaagcgctattcaaactttattacaagcatctgaatattttccggaagaaaatgaagtcgaataccgtttggctggattgtatttcatgatatcacaaaacaccaaagcaaaattccatttgagcaatgccatgcgattgaattttgacaattatattcttattgaagacttatttccagtggtttgggcaaaaaaaatggtgcagaattatattgcaaaacataaaaaattataatggttgatacagttaaaaaacgctttggattattaggacgcaacattaattattctttttcgaaaggatattttaccgataaattcaataatgaaaacttcacaggttgtacctatgaaaatttcgatattcaagaaataactgcttttccagagataattaaaaatacatcggatttaaaaggattgaatgttaccattccgtacaaggaaacggtaattccatttctggataaattatcaaaaaaagcggagcaaataggggctgtaaataccattaaaattaccaaaaaaggaaaattaaaagggtacaatacagactattatggtttcaagaaatcattagaacctttattgcagccacaccataaaaaagccttgattttaggcacaggaggcgcttctaaaggggttgcttttgctctggatgaactggacattccgtacacttttgtttccagagaagccaaagaaaatgctatcgattatgaccgaatcaacgcgacaacattcgataattaccaaatcataataaattccactccggtaggaacaagtcctaatgtggatgcatttccattaatcccgtatgagtttttcacggataaacacattgcttatgatttgatttataatccagccgaaacgcaatttcttaaaagagccgcagcgcaaggagcccaaatcaaaaatggtttggatatgcttatttttcaagcagagaaagcctggaagatttggaataaatagttaagaagtttatttcttgtcatatcgagcgcagtctcattacgattaaacagtcttgaccgtcacatcgagtaattttaaacattaatgcgagagctttaatgtttaaaattgtatcgagaggccttaattgtcaaaagattctcgatacttcgtagaaattttctatcgcaaatttctactcaactcgaactgacgaatccctaacttaatgacaataaaatcgagcgcaatcgagatttttgttttataagtataatttgtcgcaatcagttttaactggtacttaaaaaccttatcgctaattaattttctaaattagcattgaaatttttagaaatcgtcttgttttaaaattagcataatgctgttttaaaacaagacgattttttatataaaaaaagcgacaaccgtaaggatgccgctttgaatgttttcacaacggaataatccttattgtgaattgcttcaaaattgtactgcaagtatacaacaaaagttttactattcgattgaggtttcccgtaaaaatagtaatttttttattgttaaatttagagcttaattttagataacgagaaaaatcattataaaaatgaaaaaaatattaggactggatttagggactacatctattggatggtcatttataaacgaagcagataatgataatgaagagtcatcaataataaacacaggtgttcgcatagtcccacttacgactgatgaagaagcagatttcaagaaaggaaataccatttctatcaatgctgacagaactttaaaacgtggagcaagaagaggtttgcaacgtttcaaacaaagaagagatgctttattggaatcttttaataaaataaaattcattccttccacttttatttatgcagaaacaggtaaaaaaactactttttcatcttataaattaagagctaaatcagcaactgaagctattactaaagaagaattggtaaaagtactgttgatgctgaataaaaagcgtggatataaaagcagcagaaaagcaaaaaccgttgaagaaggagaagcaattgatggaatggcaattgctacaatacttttcgaaaaaaatataacaccgggacaatgggtatttaattcgctatcaaatggtggaaaatacgttcctgatttttatcgctcggatttgcaaaaagaattgaaaaaaattgttcatttccaaaatcaatttcattcagaacaaataaatgataaattgcttgaagacattcaaggaaaatcaagaacacaaacttctcaacatttcacaaaagaattaaaaatagaactagccgaaaacaaaggaactagagaagaaaccaaattgcaacactacaaatggagaaatgccgctttaataaatgaactcgatttgaaagttattgctttcatcattaccgaaattaataatcaaatcaatcagtcaagcggatatcttggagccatcagtgatcgaagtaaagaattgtatttcaatagggaaactgtcggacaatttcaatacaaacagcttaaaaacaacacacattctaaactaaaaaaccaagttttttaccgtcaagattacttagatgaatttgaaagaatctgggaaacccaagccaaatatcatcctgaattaaatgacaaactgaaatctgaagttcgcgacattacgattttttatcaaagaaaattaaaatcacaaaaacatttaattagtcattgtgaattcgaaaaaggacataaagccattccaaaatcatctcctttatttcaagaattcagaatttggcaaaacttgaataatattgttgttaaaaacgaaactacgaaagaaccctatttattaagtgaagaattaaaacaacaaattgccgatgaacttcagtttaaagacagtttaacggatatacaattaatggctttttgtgagctaaaaaaaggaagtcattcagttaattttaaaaaaattgaaggaaatagaaccaatactgcacttttcaaagcatttgaaaaaatacttgaagttgaaggctatgaaatggatttctccaaaatgaacccatttgaaattaaagaagctatcgtaaaaatatttgaaactttaaatatcaataccaatatactcgattttgatccaaccattcagggaaatgaatttgataaacagccctattaccaattgtggcatatactttactcttcggaagaagacgaacccttgaaaaaaacgttaattaataaatttaattttaaagagaatcacattccgtttcttttaaatataaatcttcaagctgattatggaagtttaagcgccaaagcaatcaagaaagtgttaccacatttaatggacggacaaatttatgacgttgcttgcagtttgtctggatacaatcattcctcctcattaactaaagaagcaaataacagtagaattcttaaagatacattagatttaatcaagaaaaacagtttaagaaatcctgtggtagagaaaatccttaatcaaatgattaatgtgattaatgccattatagcagacccaacaatgggaaaaccagatgaaattcgtgtagaattggctcgtgagttaaaaaataacaacgaacaacgtagcgaaatgacaaaggctattaataaaagtacagccgaacacgagcaaatcagaaaattattgcacactgaatttggaatccatcgcgtaacccgaaacgacattattcgttataaactttggaaagagtcggatgggatttcgctttataccggaaaacctatcgaaccatcaaaactattttcaaaagaatacgacattgaacatattattccaaaatcacgtttgtttgatgatagtttttctaacaaaaccatttgcgaacgccaattgaatattgataaaagtaacaaaactgcttattcgtttttacaggagaaattatctcctgaggaatttgatcaattcgagaaaagaataaaaagtttatttggtaaaattagcagaaccaaacagaataaacttttgatggccgacagcgatattccagaaggttttatcgacaggcaattaagagaaacacaatacattgccaaaaaagccaaagaaatccttttggaagtttccagaaatgtaaccgcaacaattggaagtgtcaccgacaaattacgtgaagactgggaacttgttgaagtgatgaaagaactgaattgggacaaatatcataaactgggattaacaaaagaggaagaaggtaaaaacggagaacgtttatacaaaatacaagattggaccaaacgaaatgaccatcgccatcatgccatggatgccataacagttgcatttaccaaacctgcctacattcagtatctaaataacctgaatgcaagggatataaatactaaaaaaggaaactctattttagggatagaatccaaatatttaaaaagggacaaaaataataaattgcgttttatagctccaatgaaaaactttagggaagaagccaaaaagcaactcgaaagtattttaatttcctataaagcaaaaaataaagtagttacaaataaccaaaataaaaccaaaataaaaggcggcagtaatgaaaaaacacaactcacaccccgtggacaattacatgaagctaccatttatggaaaactgcaacagtatgcaaccaaagaagaaaaagttagtgctagtttcacacaagaatacatcaataaagtagctaaaaaacaataccgagaagccttattgaatcgtttagctgaaaatagcaacgatccaaaaaaagcctttaccggtaaaaatgccttggcgaaaaaccctatttatttggatgctgaaaaaacagaaacagtccctgaaaaagtcaaaatagtttggttcgaaaacaattatacgataagaaaagatattacccccgatttaaaaattgataaagtaattgatattggtttgaaaactattctccaaaatcgtttgaatgaatttaatggagatactaaaaaagcttttgtcaatttgaacgaaaatcctatttggcaaaacaaagaaaaaggaattgcaataaagagagtttcgattagcggtgtgagtaatgcacaagcgttacatatcaaaaaaaaccatttaggaaacgacattttagatgaaaacggaaatgcaattccagttgattttgtaagtcctggaaacaatcatcatgttgctatttatcgtgatgaaaaaggaaacttacaagaagaaatagttactttttatgatgctgtaattagaaaaaatttaggtttatctattattaataaaaatcatgaaaagggctgggaattcttattttctatgaaaaagaatgaattttttataatttcaaatgaaacactcaatacagatgatattgacttatttaaccctaataattataatttaataagtccatatttgtttagagctcaaagtatatcttcaaaatattatatttttaatcatcatctagaaacaagaaatgcagatggtaatttatttaagaattataaaaatctttctggtattacttataacttttttcaaactactaataaattgaaaaatctaactaaggtccgaatcaatcatttaggtcaaattgttcaaataggtgaatactaattatgataaaacgaacccttttctttggcaatccagcttatttgagcaccaaaaacgagcaaatagtcatctcttatcccgactctaaattcaataggattgggctttagcccattcgacaaaataggaataaataaaaaaggctttagccaaaaacatttcggctaaagcctaattagagataaattttatatcccctccatttgaaaatggaggcaattcataaaatggaggcaattgataaaacagataaaattcaaaaattataagcaatttaaacaataaattatgccttatatcaaaacctatatacattttgtttggagtacaaaaaatagaattccatttttgaacagtagagaattaagacaaaaagtttggcaacatatcaaagaaaatgccaaagacaaaggaatttttgttgattttgttaatggatattcagatcattgtcattgtttggtttctttaggagctgatcaaagtattcaaaaaataatgcaactcataaaaggggaatcttcgttttggattaacaaaaacaaattgtgtctagaaaaatttgaatggcaaaatgaatattttgctgtttctgtttcggaatctatgcttgataaagttagaaattacattagaaaccaagaagaacatcatagtaaacaaacatttcaagaagaatacaacgaatttattgctaaatataaatttcaaaaagaatagaatttggctaaagccatttacattattatcatttttcccctccagctaaagctggaggcaattcaaaagctggaggcaattcaaaagctggaggcaattcaaaagctggaggattcaatagaatcgggctttagtacattcaataatagaataattccaaaatcaataggattgggctttagcccattcaacaaaaaaattgagtttaaaaggctttagccaaaaaaatttgttaagcattttttaaagaaattgatcataaatttgtaaatccaaaaaaaatgataaaacgcacccttttcttcggtaatcccgcttatttgagtaccaaaaacgagcaaattgtaatctcttatcccagcccctcgccaaccctccccgaaggagagggagcaaaaaaacaagagaccaaaaccgtggctattgaagatattggtgttatcgttctggaaaaccaacaaatcacaattactaatggtttgctagaaaaactaattcataacaatgtagcattaatcaattgcgaccaataccatttacctattggtttgttgatgcctttgaacggtcatacagaacaatctgaacggttcaaaaaccaaattaatgcatctgccccactcaaaaagaatttgtggcaacaaaccattagttccaaaattatgaatcaagcgggaatattgaaagaaaaaggaatcccaatgcgtaaaatggagctttgggcaaaggaagtaacctcgggcgatgcactcaatcacgaatcaagagcggcagtatattattggcagaacctcattcaaatagaaaattttacccgaggacaaaaaggaattccacccaataatttgttgaattatggctatgccattttgagagctattacggcacgagcgattgtcagctctggaatgctacccactttaggtatatttcatcgtaataaatataatgcgtattgccttgccgatgatattatggaaccgtatcgcccgtatgtcgatttgattgtatgccacatcatggaaactgaagacacttttgaagaattgaccattgacataaaaaaacaattattgagtattgccagtatcgatgtttttattgacggaaaaaatagtccgttgatggttgctatgagtagaacaacacattccctacacgaatgttttgagggaacgacaaggaaaattttataccctgtttatgtatgatgaacattacacccgtttaaaccaatatagaagtttgtggatattagtattttttgatctgcccaccgaaacacgcaaagagcgcaaaatagccagtacatttcgtaagaaattattagacgatggcttttccatgtttcaattttcgatctatatgcgattttgtgcaagtagagaaaatgctgaagtacacaccaaaagaataaaaaataacttacccgaacacggcaaaattggcgttatgcagataaccgataaacaatttgggatgatggaacttttttatggaaaaaaattggtagaaacagacaaaccttcacaacaattagaattattttagtcttacaggattagaaaaaagactaacttcctctattacaacatataaacacctccttttttcgatttcaaaataagctcataactaccaacatatcaaacgattgaatcgcggtatattgggaattataagctaaaatacaattttgaaagcaattcacaacattgtagcacttatccttgcaatcgggtttattgggaattataagctaaaatacaattttgaaagcaattcacaacgcagttaacgagagtgctgaagatgcaacaattgggaattataagctaaaatacaattttgaaagcaattcacaacaccaccgtttcgcatttgttttgcaaaataattgggaattataagctaaaatacaattttgaaagcaattcacaactgaaatatattgctatttcacaagcaatgcattgggaattataagctaaaatacaattttgaaagcaattcacaacgaaaaagtaggcaaacattcaagtgtaactattgggaattataagctaaaatacaattttgaaagcaattcacaacacaaaaaagaagtcgaaaaactgaactccgattgggaattataagctaaaatacaattttgaaagcaattcacaacatcaagtcacgggttcgaatcccgttgtcgattgggaattataagctaaaatacaattttgaaagcaattcacaacggtaacttctaaacacatggcaaacatacaattgggaattataagctaaaatacaattttgaaagcaattcacaacgttgtagcacttatccttgcaatcgggtttattgggaattataagctaaaatacaattttgaaagcaattcacaacaccaggaacataagttgttttggcaaattgattgggaattataagctaaaatacaattttgaaagcaattcacaacgagtttcaacatgattatcatcatcaattaattgggaattataagctaaaatacaattttgaaagcaattcacaacaatcgccttgtcaggaaatgtttcttcagattgggaattataagctaaaatacaattttgaaagcaattcacaacccacttgtttattgatcgcttcttctatatattgggaattataagctaaaatacaattttgaaagcaattcacaacaggaatgtctttccaaatttctaagttttcattgggaattataagctaaaatacaattttgaaagcaattcacaacagtatctctattcaatcacaaggtggcaacattgggaattataagctaaaatacaattttgaaagcaattcacaaccagcatcattcgcctcaacagttacagcttattgggaattataagctaaaatacaattttgaaagcaattcacaacgaactaacaattataaatgagaaagatcacattgggaattataagctaaaatacaattttgaaagcaattcacaacggggttttacacttgaatccaggatctgaattgggaattataagctaaaatacaattttgaaagcaattcacaacattgcctcacggattcgataggattccgggttgggaattataagctaaaatacaattttgaaagcaattcacaaccccaacgagattttccggttcctttgcctggttgggaattataagctaaaatacaattttgaaagcaattcacaacaatagtatggcaaatctaatagaaagatttgttgggaattataagctaaaatacaattttgaaagcaattcacaaccacacgataccggaatgttacaaaattctggttgggaattataagctaaaatacaattttgaaagcaattcacaactggcgcatataatttcattagaacgacaatgttgggaattataagctaaaatacaattttgaaagcaattcacaacataaatctgtctccagatgatttccaataagttgggaattataagctaaaatacaattttgaaagcaattcacaacaacgctggcgaagtaccgcaagtctcaacgttgggaattataagctaaaatacaattttgaaagcaattcacaactgagatgcttttgatacaattcttttttatgttgggaattataagctaaaatacaattttgaaagcaattcacaacatggttcgattattttataattagtttcttgttgggaattataagctaaaatacaattttgaaagcaattcacaacataatgcttgtgacataatccaagtttttgttgggaattataagctaaaatacaattttgaaagcaattcacaacctgtaactgcttaaccctttattttattgggttgggaattataagctaaaatacaattttgaaagcaattcacaacctcgcacacggcatcttctattattttgggttgggaattataagctaaaatacaattttgaaagcaattcacaacggtggaaatatttatttgcatgattacgttgttgggaattataagctaaaatacaattttgaaagcaattcacaacagtcatcacctcttcaagtccatacggtgtgttgggaattataagctaaaatacaattttgaaagcaattcacaacaggtataaacatattatattgccaatcttgttgggaattataagctaaaatacaattttgaaagcaattcacaacacatatttatgtcggtttaattctcctttcgttgggaattataagctaaaatacaattttgaaagcaattcacaacacacggtttgtgatttaaaaaggcaatggcgttgggaattataagctaaaatacaattttgaaagcaattcacaacactccacaactacatctgttggaacttctagttgggaattataagctaaaatacaattttgaaagcaattcacaactgttgtggcaaacagttcattaaaactaagttgggaattataagctaaaatacaattttgaaagcaattcacaactattgcttaaaaatgttactactataaatggttgggaattataagctaaaatacaattttgaaagcaattcacaaccaaatattgtccattagtgaacgcaccacagttgggaattataagctaaaatacaattttgaaagcaattcacaactataaagagataagtgttttaactaaagaagttgggaattataagctaaaatacaattttgaaagcaattcacaacacttccaaacaatcaaataatatgttggggttgggaattataagctaaaatacaattttgaaagcaattcacaacataatccatttcagaagtaacatctctagtgttgggaattataagctaaaatacaattttgaaagcaattcacaacaatagcggtggatttgtcaagatgaatacagttgggaattataagctaaaatacaattttgaaagcaattcacaacattagaagtaagtactattcgcacaggacgttgggaattataagctaaaatacaattttgaaagcaattcacaactcgattaagattgtttccaatattctaaaagttgggaattataagctaaaatacaattttgaaagcaattcacaacgctcaatcaattaatgaaacgaatagaattgttgggaattataagctaaaatacaattttgaaagcaattcacaactaaaatatttaccatttgaattacaatcttgttgggaattataagctaaaatacaattttgaaagcaattcacaaccaattagtgatgtttgattctcaggaagagttgggaattataagctaaaatacaattttgaaagcaattcacaacattcttgaatcaatacctgttactctttcagttgggaattataagctaaaatacaattttgaaagcaattcacaactagatccgcttcggacgtttaaattcaatcgttgggaattataagctaaaatacaattttgaaagcaattcacaactacgactttccgtttattaaccactttgaggttgggaattataagctaaaatacaattttgaaagcaattcacaacattatgtgaaattgactttattaattttgggttgggaattataagctaaaatacaattttgaaagcaattcacaactggggacaacaagctatcacttcataccctgttgggaattataagctaaaatacaattttgaaagcaattcacaactgacagaaataaacaaaaatataccgatacgttgggaattataagctaaaatacaattttgaaagcaattcacaactcctgtacgtcaataattccatcttgaatcgttgggaattataagctaaaatacaattttgaaagcaattcacaacattcaacaggcgacaccgtattacttcgcagttgggaattataagctaaaatacaattttgaaagcaattcacaacctattgcgctatgttctttattaaatttatgttgggaattataagctaaaatacaattttgaaagcaattcacaacggattttcaaaacaccattcaaaccaaattgttgggaattataagctaaaatacaattttgaaagcaattcacaacacatcataagacaccgagtaagtatttggtgttgggaattataagctaaaatacaattttgaaagcaattcacaacaggtagccttaaacacttatgaaacactttgttgggaattataagctaaaatacaattttgaaagcaattcacaacaactacaaggtatgagagtgattaacaggagttgggaattataagctaaaatacaattttgaaagcaattcacaaccggctggatcggtaatttgaattgcttcatgttgggaattataagctaaaatacaattttgaaagcaattcacaactcgttagtggttgtttctttcatttttgatgttgggaattataagctaaaatacaattttgaaagcaattcacaactataacacgtttcttttgtttgagaatttcgttgggaattataagctaaaatacaattcgtattataaacaacaaacgtctaatttaaatcccaaaaccctagccctgattacttcactaaacatttgttttcatagaagttcagtgaatttcatttgcagtggcatccttttttattcgccttttcggcgaacaaaaaagatacagcgaatagcaggaaattgcttcaaaaaaaacttttttttaacataaaacgactataaataaaggatttattttgtaatttcatgctcctttactatctttcgtgttcgataaaaaaatagaaaccttacacattgaaaaaatgttagaagaaaagaatgataacctgctggaagcagatggaaatttagaaaacaattccgttgaatcaagtcaatccaacactgaagttttggaaaaaacagcattgtctgagcctattgatgtgcctgcagaagaaaatgttgttatcccttctaatgaagaattgccagaaactgcacctattgcagaaactgaaaatcaaactgcactcgatgcaattgccgaaacaaatgccgccgaaagtgaagatgaaacgctaaaagagcgtcacgacattccgatgcaggattatgacacactgtctcttgaaacactggtagaggaactgaagagtttagtttccagtgaaaaagtgatgtctgtaaaagatcatattgaagaaattaaaaaagcattcttagccaaatacaatcatcttattgaagagaaaaaagaagaatttcttgcagaaaatcaagatccaaatgaagaatttcaatatcactctccattaaaaacacaatttgacaaatattactctctttttagagatactaaaaatacacatttcaaaagcttacaaacgaatctaaaaaccaatttagaaaatcgattggtgattgttgaggaactaaaagagttaatcaatccgcaggaaaacatcaaggacaccttaaaacattttaatgatttacgagagcgatggaaaaatgcaggaccaattcctaaagacaaatacaatcacgtttggaataatttccattttcatgtagaaaatttctatgactatttgcatcttgacagagaagcaagagacttggatttcaaacataatttagagcaaaaacaaaaaattgtcgcacgtgttgaagaattggtaaaagaagccgatgtcaacaaagcgttcagagaattacaagatttacatagaatctggaaagaagacattgggcctgtttctagagaacatcgtgatgccatttggaacaagtttagtgatttgaccaaacaaatgcatgataaacgcgaagttttattcgaaaatcaaagaggaacggaacttgaaaatttagaaaagaaaaaagaaatcatttctaaaattgaagttttagcaactgagaaagtgaatgctcattcgcaatggctgactcaaatagaaaaagtagaagcgttacgtactgctttcttctctgccggaaaagtaccatcggatgtaaatgaggaaacttgggctagtttcaaaactgctgtcagaaattttaattctttcaaaaattcgttttacaaagacattaagaaagatcaaaacgacaacttatgcaaaaaaacgacccttgttgcaaaagccaaagaattacaggaaagtactgattttgctgcgactactcccatcatgaaacaaattcaggatgagtggaaacaaataggacatgtgcctagaaaatactcagataaaatctggaaagagtttaaagatgcctgtaatcattattttgacaaattaaaagagcaaaaaaatgaagaaaacagtgaagaagtagaagcttttgacaataaaaaaacctacttagaaacgttgagagagtaccaattgactggtgatcacaagacagatctcgatgctataaaattacacatcgaaacctggaaaaactttggaaaagttcctttcccaagaagacatattgaaggaaaattcaataaaattctggatgctctttttgaaaaattgagtttgagtaaaaaagacactgatatgatacgttttgccaatagaatggacaatttatcagaaagtaatgatactcgcaaactggataacgagaagatattcttaatgcgtaaaattgatgaagtgcagaatgaaattttccaattagaaaataacattcagttttttaccaacaccagaaatgcaaaaaaagaaaattccattgtattagaagttcgtaaaaacatcgctatccataaagaaagccttgatgtttggaaagaaaaactaaaacaattgagaaatttgaaaatagaataattttcaacaatagttaaaaattagaaacctcgttcttaaatagttcgaggtttttttatgaaaataaagtaacgatatgataattatcattttaaatatttagccgtaatgttacttttggttattgctaaatgactttaccatgaaaaattccttaattcaaaagtacaatgttccagggcccagatacaccagttatccaacagttccatattgggatgaaactgatttttcggataaaatttggaccgaaacgctgaaaaaatcatttgcagcaagtaatagttcagaggggatcagtctttatattcatttgcctttttgcgaaagcttatgcactttttgtggctgtaacaagcgtatcacaaaaaatcatgccgttgaaaatccttatattgatgcagttttgaaagaatggactttctattgt

SEQ ID NO: 1545 - DNA, 24050 bp, synthetic construct
  misc_feature 1..24050: note = Synthetic
  source 1..24050: mol_type = other DNA
ggaaaattttatgactctttattggatttatcaatattatataaagacaaaattttagtgaaggaagaatttgcttatgtggattcactttccacgtatcagtctgtttttcttgataagattgatgataaatatattatagataatttcaaatttgtagatttttcttttattagaattaaagaagaagcgaaagagattaaagcagctgaagagaaagctgctagaggaagtttcaattggatgcttttgtttatttctccatatttatttgcattggcaatatcaatcaggattacaaaagtgacagcagaattgaaagagatcagttgatatatctctgtaagttagagttcatagatatggtattttgcctattttaattttcattttttttaacgcctttattaatttataaattctgttatataaatcaagctgaaattagcttgaagtttttaattactaataatattttgcagcttaacatatggattggaacacatttttatctacattatcacagtcagcagctggattaattgccattgttgcggcatttgtaatttcaaagcttttaggcgaaaatgaaaagcaggaaacatatgatagtcaggtatcaaagctgatcattgattataatgatttaattcagagaatatccattagaaaatttacatggtatgatcgtagaaatattgaatatagcacggatgttattgaggcagtaaaaaataatgaattttcaaatttagctgacaatgaaaaactgaatttactttttttgcttgagccgcatttgtataaaactgatgtatgtttggatcagctaaatctactaataaagaaatatgcgccgcagacaaatagtttaggaatgactttttcttcttcaatgccgcttcttgctcctaatggcttatgggacaaaataggaaaagaaagagaattgattaatcagcttcaaatagacagttttacgctgattaataatttcaaagacgtaaaatccgattttataaatacgatgaatggtcttgactcatttaaatatacattgtatatattggcatttggtttttttctcacagtagtatatcctctgcattttatgcctatgaaattagacatctctcctgagatagattttagtttaaaagccttttatagtacagcatttagtataaaaggcctttttttattctttttatcattagttgtagtattgattttcggatattttattttagttataaaaagaataaagaggaagtatttaattcttgaaaaggaactaagtgctatctactttgatataaaaagttactgcaggtatttttaatcagggcttttgttaatatttcctcagtaaaaacagaagttttatatacagctaaatttttgtttggcattaaactaaggtcatttataaaaagaaacagtaaaatttcaaaagacattaattgattaatactacagataaatgaaatatatcttttttttagtttttttattgtttgcattaaacttgtattctcaagtgaatgtaaaaggatattacagaagtaatggaacttatgttcagcctcatcagagaacgtccccaaattctacaattacagataattatagttatccaggtaattataatcctaatgtttcatatgataattcagcatctcaaactaattataatggcgcaagtcaaagttcctctaatgaaggtaatgaatgggtagaaggctatttccgtagcgacggaacttatattaaaggttattatataaaaaagataagggagcctaagaattacaatggctcttcagacaaaaaatatataaatacatcacaagttaatgtgagaacaactcctgaagttgcagggaacatcattaatagattaaattacggagacgaaattacatcattgtacataagcggtgagtgggaaaaagttagagttaaaaaatataacattaaaacttataattatgaaaattatgagggctacataaatcgcaggtatctaagtattagtgtctcaaataaaacagttgcatatccttcaaacagttcaatttattcaactggaggaaattcagattatgatcttccttataaagttacatctcaaagagcatatttctattcaacacctagtgtaaacagccaaaacaaaacatatttagtttatggtgaactgattacagcaatcggcgattcaaagtattttatttatgttgaatttgtcaattcaaatggaattaagacaataggatggattttaaaaagtgatataacgagatattaaatttccagtttgatgcggtttggaaagaacaataaagattaacgcttttcatgtaaatattttttatgtataaagaatatatttcatataaatagctatttttgagagaaattgtctgctaaaatttttgatagacaaagtttgcttattggtaagaatctattaagactacagtataaaatggcaaaaattcattcaatttcaatttcaaattttagaggaataaataagtttgaacaaacatttggtcagaaaaatttcatctgcttgattgggcgcggggattcaggaaaaacaacaattttagaagcaattaatttggtgctgtcttcaaattggaatgtaacatttacggataacgattttcacaatcaaaatattcaagaacctattgaaattattgccactctttatgatttgccggaagctataattaaagaaacaaaatttggtttatatctgcgcggaatagatactgcaactggccttatcaatgatgaaattcaacaaaatgatgtagccgcaattacaataaaattatcagttgatgattctctggaacccctttggtatgtaattaattcccgattacagtctgatattgaaattaaatcgtctgatagaaataaatttaatgcttttttagtatcagattacatagataaacatttctcctggagtaaaggatctccattatattctctattgaaaacggatgattcagccataaatgcgacagctttgattcttgaaacgataagagaggcaaaaaacaaaattgattccagtgcttttcctgatttgcagggaattgttgagaatattaaaactaatgctcaaaaatttggagtagatttatctaaggtaaatacaactattgattttaaagatattattatcaaagagggtaaaattaacctgcatgataaaaatacacctgtcagactaaagggcaagggctcaaaacgactgctttctatagcaatacaattagaactgtttagtttaaatcatggaggaattttacttattgacgaaattgaacaaggattagaatccgatagagttcaaaatttagcaagaatacttaaaagtaatgataacgctcagatttttattactactcattctcgtgatgtaattgtggaattaaatgctgaagatttgtttaaggtaagcaagaactcagacaagctttacagctttgcaggatcagaacaaggcactttacgaagtagtccggaagctttttttgcaaaaaaaataattttatgcgagggagctacggaagtaggcatagtaaggggaataaataattttaattattcagctggagattttagattctcccataatggcgttagatatttggattgtaacggagattctaaaattcaaagatttatcgaagtttttaaggacaaagaatatgaaatattagtattttgtgattctgataatgatggaaatccagcaattcaaactctgaagaaaattataaaggacaataacattgattctgttcaatgtgagtcgggaaaagctattgaacatcaaattttttcagatttaaattttgattcagtgaaaaaaatatttgatttggatttactggaagataaaacctctttagctgatactatcaaagcgaggtttacgggaacttggctagatgactatttattaaatgataatccgcagataagaactgctattggaatagcttcaaataaaaaaggctggtttaaaaggattgatttaggcactctggttggagaaatatgtatgacttcgctggtcgaattcgaaggtaaatatttacatacaatgttaactgatctaaataattgggcagcaaaatgatagatattgatgaatttataaagtatcccaaatgtcttttaatagctcctgctggatttggaaaaacacataccattaccgattgtttaaaaaaacttccaattgatttaaagaagcagcttatcttaactcatacacatgcaggagtaagctccattaaggaaaagcttaaaaagcagggtgtacacaataattacgtggtagaaactattagcagttttgttcagcgttttgtcttagcttataatcataatactactatacccaatattgaagattcaaaaaaacactattcttttttgaataaaatggcacttaccttatttaaatctagaattatttctgaagtgattttttccacttattcagggctgtttgtagatgaatatcaggattgtactaaaactcagcatgcgttaattaaaatattggcagaaatactgccaacaagattattaggtgattttcttcagggtatttttgaatttaacgaaccgatagttgatttaacttgcgttgcagaaatggatggatttattgagaattccttcaaattatcacagcctcaaagatggctgaatggaaataatataggtttaggaaatgatttaaaacttattcgcaataaattaattaataaagaaaatgttgatttaaagttatttaaatcaatagaagtttacaattataattcactggacttacatacaccaagaaccgattataatagattgatttggagcttgattaaaagctccgaaagttttttgattattcacagcaatacaactagtattgaaccgagaaaaaaaatctcacagaaatttaataactctttggtgctaattgaatccattgatgataaacttttttataaattatctaaattattagaccagattgatttgaccaatgctgctgttaaattgcgagagttctcacttgatttgtttaataaatcggaagttaataattggtttaacgaaaaaggatttaaaagaaaaactaaacaagaagaaaaagatgcaattaacgaattgaataatttgactgctgattttaaaagtaatttaagtcaaatcattttaaaaatttcttcgttgccaaattttaaatgttaccggccagaagttctatccagtttactaaaagctgttgaattagcgcataatgataaatgtagttattacgaggcaatggttattcatcgtaatttagtaagacgtcttggaagaaaagttgagggtaaatgtattggaactaccttattgactaaaggattggaatttgatacagtacttattctggatgcgcataaatttacttgtccaaaacatttttatgttgcaataacaagagcttgtaaaaaactaataattgttaccgaagataatactttaaattttacatattagtttctctggaaatatagtaaaatttaacttagttagaaaaggatgttggctgtaaactgaaatgtcgactaatttttactgctgctgccactactactactactactactactactactattcaattattgtatctaatgtttattttttagaaaattaaactacttcctgttatcaaaatgatttatagcagtaagattctgtatgattaaaaaaagaaggatgatgtagagcgttttcactcgaaacggataaaaaggcagccaagatagtgtctgccggatcctgcaggcgcataacggctttgccgcccttcgggacttatagccctccgcatcctttgcctgacacttgagttttgctttctttttttccgttttttcttttgaaaacaatttttgtggagcaggcggaaagaagcagtaataatcttaaatttttaaatcatggaaattacaggacgcttaaccagagatgctgttgttgttaaaacagcaaaagacagacaggttgttaacttctgcattgcagttaatgacacgtacaaacccaaagacagtaatgaggtgaaaaaaatagtcacttttattgactgctcttactggctcagtacaggtatagcccagtggcttaaaaaaggcacaatggtggaactattcggaagaatcggtgtgaacgcttatctcagcagtgagggtaaagccatagggaatctcacttttcacaccactaatattaaaatactgattttcacctcagacactcaggctgtacagtcgggtaatttttctcccaaaaaggataaaaaagaagaacccgacgacctgcctttttaatgttcggatgatagatgtataagcctaaagaaatgagttatgaaaaccttagaaaaatcaatatacgccgattatgatgtgcgccttgcgttcaataaaattatcctttccaatttggaatcctatgacggaaataaaaaagtaaagcttagatatttcctcgaagacctgcagagaatcgggtgcatcagcggtatgatctccgaatttatttatcatgcagattgtaaaaaattctacattcagcatcttgaagatttggaaaacatcagggaagaaatcgaagattcacttggagaagctgtaaagaacagacaccgcctgcctcactacacttttatgtgctggctgtgtttcgaagaatactgttttgatatctacagaagcagttttgaataaaacttactgttcaatcttaaatcaacttttatgaaagcttcagacaaatttaaaaccgttatagaaaattatctgagtgaaactgcgcagtctacaccgtctttgcgcagaacttcagtaaagcatccaaaaacttggagagctgtttcaactatattttgggagaggtgaaaaagactggattttgcgcctttgacaattctgaaatatttgacatggctgttaaatattatacagatgacagtatcgtacagcctcagcctgtacaatgcagggtggatgtaaatccccctgcaaaagctgatttgtttagctccgcatccgaagttccccacaacagcgtcgttgcaaagaatacagttcctgctttaaaacctgcacctaaaaccttaacactctttgacctatgatacctaaaaccatcatcgaaaagcagattacagcgttgagcgcttcacttaaacctgttacgcagacaatgcagggcagggtagaaagagacattttcctgaaatgggctgtgctctcaagggggaaattccactgtttggaatgtacccgcacttggaagcctgatgcgggcaaagcatcctgcaaaaattatataaactgcacggcatacaggggaaaactcaaaatacagcagtacaatcaggtgcatttcaaagaaatagaatattgggctgttctacatgtttgtgcagggtttcaagtggtgcgtattatctgctcgcacaaaaacatgaaaaagaactgcgtgccgacttactatcacaaagaagtcatgcagcactggataaattcaaaaggggaggtgcgcaccctctcgctcggcaccaatgttttttcaaacacgtatgatgcctggaaatattactcgccccttgaaatccgtccccgaaattttgagggttctccaaaatacctcattaacccttatagggtttatgcaggaacgcaggtgtttgatgtccttaaaagaaacgattttaaaggcagtttttacaccatagccccgcaggtgctttttacggctcttttcaaagattcttacgctgaaacaatgctcaaaacggggcatatagattttttgaagcattatctgctgtctcgctctcagcagataaaaaagaactggcaggcagttaaaacgtgttttaaaagtagttacaaggtgtcagattttacgctttgggaagattatatctcactgctgagatggtttaaaaaagatttaagcatacccgagaatgtctgtcctgaaaacttagctgaacagcatgacaggcttgtggaaagaaaacgtaaaattcagaaacgacttaaaataaaggaaatacgtacagaaatacagcaggcgcagatggtctatgaagagcagaaaaaaacagtttttcggactggagttcactagggaaaatctcagcataaatgttatagagagcgtgcaggattttctcgaagagggagacatgctccgccactgcgtatttaccaacgaatactataaaaagaaaaactcccttatcctttcagctaaatttgaaaacaagcctgtagagactatcgaagtggcgcttccatcacttgaaattgtgcagtgcaggggaactaaaaataaggagtccccgcatcacagacagattctaaaacttttgaatcagaacctgtatcagattaaaaagcggataaaaaacaaaaaagcagtcctagccgaaaattagttttcggctttttttctgtgaaattccgcggcgcagacacttaaaggcggggatattgtctcaggggttcaggcttaattctaaaacaaagttcgggaaggaaaggcggttcgccgaaaaaaattcccccataaatgcaggtgaaaaacctgctttattgcgttgcttttttcgctcgctttctcattcccggctaaggttccataattaatcttaaaactttagaaatcatggaaactttaaaaacacttcagaactggaatcaggtagcagaaattgaattggtctacaaaacaaaagtaaaagcatcggaaagaccttttataaattcttcaaaaacggcttaccagctggcactacagtcctggaatcctgatacaatagaatttttcgagcagtttaaaatcctgcttttaaatcaatccaataaagtacttggtatttacgaagtatcttccggaggtatttcaggcactgtggtagatctcagactaatttttgcagcagcacttaaagcaaatgccgtatcgctgattatgattcataaccatccctcaggacagattaaaccttccgaagctgataaacacataaccacaaaagtcaaggaagcgggcagagtactcgatattgcagtgttggatcatattatcattactctcgaaacctactattcttttgcagatgacggagctttttagctcctacatttttttaataagtgaaacgtaggtatttcataaattggcctactaatatttgtataaagaagctttatctcaaattatctaaagatttattgatttgctattaaaaggaaacagatctggacatcttaattagttacataaaattacggcaacggtaatctttcggataaatcaacaggtagtattagtcacagttaattatgaataaacagtctaaatcgtgcagacaatatatttttactctgttatagatgataattttcaatttcagatgtgacaatataaataacgagcattattttgcttatcgtaattgtcaaatcgataagctgatcaatagctcgtgaatcaatacacagcttttaagtttttgaattatataataaacatctgctatatttctgctgaatctgtcctaggttgtaaatagtataacatctgccccttgttctaaacttcttaagatttgtgaataatttttgccatgccggcctattgaaagtttttagtagaatattcaaaataatttgtagacaaatattataatgcctaaaaataataagtataaaaaaagcgacccttgtgaggccgctttgaatgttttcacaacggaataatccttattgtgaattgcttcaaaattgtattgcaataatacaacaaaattcctacttctcaattatggttttccgtaaatcaattaattattttatacttaattttagaaattaattttttagagatgaaaaaaatattaggattagatttagggacaacttctattggttgggcatatatacacgaagcagaaaataatgatgagacgtcatcaataataaattcaggtgttcgtattgtgccccttactactgatgaagaatccgacttcaaaaaagggaatactatttccataaatgctgacagaacattaaagcgtggagcaagacgaggcctgcagcgttttaagcaaagaagagatgcaatattagagaccttcaataaaataaaatttatttctactggttttgtttatgctgaaacaggaaagtcaaccactttctcttcataccaattaagagcaaaagcagcagttgaaccagtctctaaagaagagctagttcaagttctattgatgcttaataaaaaaagaggttacaaaagcagccgaaaagcaaagactgcggaagaaggagatgcgattgatggaatgaaaattgccaaagaaatttttgaaaataatttaacacctggtcaatgggtttataattcattatcaaagggaagtagatttattcctgatttctatcgttcagatttacagaaggaattagaaaaaattgtgcgttttcaaaatcaattctatccagaacaaataaataacaaacttctagaagatattaaaggaaaatcaagaacacagacttctcaatatttttcaaaaacattaaagattgaacttgcagaaaacaaaggaaccagagaagaaaccaaattccaacattacaaatggagaactgaggctttaacaaaagaactcaacttgaaaattttggcatttattcttactgaaataaataatcaaattaatcaatctagtggttatctcggtgctattagtgatagaagcaaggaattatatttcaatcaggaaactattggtcaatttcaatacaagcaacttaagaaagacccgcacgccaaactgaaaaatcaagtattctatcgtcaagattatttagatgagtttgaaaaaatttgggaaacacaaaggcaatttcatagcgaattaaacgacctactaaaaacagaggttcgtgatgtcacaattttttatcaacgaaaattaaagtcccagaagcatcttgtaagtttttgcgaatttgaaaaaggacataaaacaattccgaaatcatctcctttatttcaggaatttagagtttggcagaacttaaataacgttgttgtcaaaaatgaggctacaaaggaatcttttattttggatgaagacctaaaaaaaaatatttcacaacaattattgtttaaggaaagtatgactgactctcaaatattatctttttgtgagttaaaaaaaggaacatatagtgttaatttcaaaaaaattgaaggaaacagaactaatactgagatttataaagcttttgaaaaaattctggttttagaaggctatgacgaattagatctttctaaattacatgcttttgaaataaatgaagtcattaaatctgcattttctgatttagaaataaacactgatattcttgattttgacacaaatattcaagggaataattttgacaaacaatcctattatcagttttggcacttattatattctgcagaagatgatgattttttgagaaaaagtttaatgagtaaatttggcttcaaagaaaatcatattccatttcttctgaatataaatctacaagccgattatggtagtttaagcgctaaagcaattaaaaaagtcttacctcatttgattgacggacatatttatgataaagcatgcacattagtaggatataatcattcatcatctttaacaacagaacagaataatggtagaattttaaaagataccttagaattgcttaaaaaaaatagcttaagaaaccctgttgtagaaaagatacttaatcaaatgattaacgttatcaatgctgttttagaagatccaacattggggaaacctgatgaaattcgtgtagaattagcgcgtgagttgaaaaacaataatgaacagcgcagtgaaatgacaaaagctatcaataagagtactgcagaacacgaacaaatcaggaaattattgcacaaagaatttggaattcatcgggttaccagaaatgatataatacgctataggctttggaaagaatgtgatggaatttcattgtatacaggaaaacctataccaccatcaatgctgtttacaaaagattacgatattgaacatatcattcctaaatcacgtttatttgacgatagcttttctaataaaactatatgcgaacgtcaactaaacatagataaaagtaataaaacagcttattcctttttacaggaaaaattatcaatggaagagtttgatcaattcgaaaaaagagtaaaaagtttgtatggaaaaattagcaggacaaaacagaacaaactcttaatggcggataatgaaattccggaaggttttattgaacgacaattaagagagacacaatatattgcaaaaaaagctaaagaaattttactggaagtttccagaaatgtaacctcaactattggaagaataactgataaacttcgtgaggattgggaattggttgatgtgatgaaagaacttaattggaataagtacgataagcttggactgacctatattgaagaaggaaaaaatggagaacgtttgtataaaattaaagattggacaaaaagaaacgaccatcgtcatcatgctatggatgctattacagttgcttttactaaacctgcttacatccaatatctgaataacctaaatggaaaaacacagggtgataaaaaagcagattctatttatggaattgaagccaaatatttaagaagagataagaataacaaacttcgatttatcgagccagcacctaactttagggaagatgtcaaaaagcagctcgaaaacatattgatttcctataaagcaaaaaataaagtagttaccaaaaataaaaatattactaaaatgcagggaggaactaatgaaagaatacaactcactccacgtggacaattgcataaagaaactgtttatggtaagttacaacaatatgttaccaaagaagaaaaagtcggaggtgctttcactgcagaatacatcaagaaagtagcaaaaaagaagtatagagaggctttattgaaacgattacttgaaaatgaaaatgatcctaaaaaagcatttacaggcaaaaatgcattacataaaacacctgttttcatttgtgaaaaggaaaatagtatagttcctgaaaaagtaaaaacagtttggctggaagcagattataccattagaaaagacattactcccgatttaaaagttgaaaaagtgattgatattggcttgaaaaccattcttgaggaacgcttagcagaatttggaaatgacccgaaaaaagcattcattaatttagatgaaaatcctatttggcagaacaaagaaaaaggaattgccataaaacgagtaaccattagtggagtaagtaatgctcaggctttacatactaaaaaagaccattttggtaatgaaattttagataaaaatggcaagccaattccagttgactttataagtacaggaaacaaccaccacgttgctatttataaagatgaaaaaggaaatttacatgaagaagtagtttctttttacgatgctgtggtacgcaaaaatttaggattatctgttattaataagaatcacgaaaaaggatgggaatttctgttttctatgaaacaaaatgagtttttcatatttccttcagaaaattttaatccacatgaaatagatttattgaatcctagtaattatcatttgattagccctaacatttttagggtgcagaaattcggtgagcttgggtcatctggtttctggtttagaaatcatttggaaactactttagataattcaaaaccactaaaatcgactacatataaagatatttatagccacaaagcattagaaaacattataaaagtccgtatcaatcatttaggcaaaattgttcaactaggagaatattagttatgataaaacgaacacttttttttggtaacccagcttatttaagtactaaaaatgagcaaattgtaatctcttatcctgataaagatcaagaggctaaaaccgtttctattgaggatgttggagtaattgttttggaaaatcaacaaattaccataactaatggattattagaaaaactaactcataataatgttgctttaattaattgcgaccaacaacatttaccaataggtttgttaatgccacttagtgggcacacggaacaaacagaacgctttaaaaatcaaattaatgcttctgttccactcaaaaagaatctgtggcaacagactataagttctaaaattacgaatcaggctggcctattaaaagaaaagggaattccaatgcgtaaaatggaattatgggcaaaggaagtaacttctggtgactctttaaatcacgaagcacgggctgcagtatattattggcaaagccttataaaagtagagaattttacaagaggtcaaaaagggattcctccaaataatctactcaattatggttattccattttgagggctatcaccgcaagagcattagtaagttcgggaatgctccctacattaggaatctttcatcgcaataaatataatgcctattgccttgctgacgacattatggaaccttatcgaccatatgtggatttgattgtatgtcatattatggaaacagttgattcttatgaagagttaactgttgaaataaaaaaacaattattgaatattgcaacaatcgatgtaaatattgatggtaaaaatagtcctttgatggtcgctatgagtagaacaaccaattctttacatgagtgttttgatggaagttccagaagaattttatacccaatttatgtatgacgagcattatacacgtttaaatcaatataggagtttgtggatattagtattttttgatctacccaccgagacgcgtaaagagcgtaaaattgctagtacttttcgtaagagattattagacgatggcttttctatgttccaattttcgatatatatgcgtttttgtgctagtagggaaaatgcagaggtacacgctaagagaataaaaaatagcttgcctgagcatggaaaaattggcgtgatgcaaatcacagataaacaatttggaatgatggaactattttttggaaaaaaacctgtagaaacagaaaaaccttctcaacagttagaacttttctaataactaggattgaaaaaaaaactaagtagctatgaatcagatcttaaattgaactgttttttaattccaaaacaaacatataactaccaacatatcaagcgattaacccgaggtatgttgggaattataagtaaaaatacaattttgaaagcaattcacaacccaatactcaacttttccctgttccattgagttgggaattataagtaaaaatacaattttgaaagcaattcacaacaaaaactatacgtaagaaacaaaatgacgagttgggaattataagtaaaaatacaattttgaaagcaattcacaactattccgataacataatgtttaaactactggttgggaattataagtaaaaatacaattttgaaagcaattcacaaccaagaagcactcgcaaagcaaaaagacattgttgggaattataagtaaaaatacaattttgaaagcaattcacaaccgcggttccatttccaatttcatttaaaagttgggaattataagtaaaaatacaattttgaaagcaattcacaacgtgaagaaacatcttactaagaatttttggttgggaattataagtaaaaatacaattttgaaagcaattcacaaccgtcaacgtaaatcacgcgccaaggtatatgttgggaattataagtaaaaatacaattttgaaagcaattcacaactaaacatcaggatcatatctcaactctgtagttgggaattataagtaaaaatacaattttgaaagcaattcacaacaattagaggcttcttttgcgttatcataaagttgggaattataagtaaaaatacaattttgaaagcaattcacaaccaaaaagatattaattttatctcaaataaagttgggaattataagtaaaaatacaattttgaaagcaattcacaacacttctcaattatcgctttctcttcgtttgttgggaattataagtaaaaatacaattttgaaagcaattcacaacacacgatcagaatctttgtcccggtcttttgttgggaattataagtaaaaatacaattttgaaagcaattcacaacaacaaggttattcaaacgctgcgttatcgagttgggaattataagtaaaaatacaattttgaaagcaattcacaactaaactttcctttatcgtctcgcatcgctcgttgggaattataagtaaaaatacaattttgaaagcaattcacaaccaaaaacaccttcatagaaacttccagtatgttgggaattataagtaaaaatacaattttgaaagcaattcacaacgattttccaacaattaatggtattaaaaacgttgggaattataagtaaaaatacaattttgaaagcaattcacaacacgatccatacgggccaataattcacctccgttgggaattataagtaaaaatacaattttgaaagcaattcacaaccgtatccatttatagtttgtgttgatactgttgggaattataagtaaaaatacaattttgaaagcaattcacaactaaaacaggaaaagccagatcagcaaaaatgttgggaattataagtaaaaatacaattttgaaagcaattcacaactaacgatgtctaaataaagtgttctaaaaagttgggaattataagtaaaaatacaattttgaaagcaattcacaactagagaaacgcactaatcacattatgtatggttgggaattataagtaaaaatacaattttgaaagcaattcacaaccacaacctatatcagaatttcaattgtatggttgggaattataagtaaaaatacaattttgaaagcaattcacaacgcaagtaatgcaagtgtttacagatatctggttgggaattataagtaaaaatacaattttgaaagcaattcacaactatctcttttctcttcttttctttcttctcgttgggaattataagtaaaaatacaattttgaaagcaattcacaactagttagtaatggtgaattatcggttattagttgggaattataagtaaaaatacaattttgaaagcaattcacaactacccgctacaatacgttcctcatcatcatgttgggaattataagtaaaaatacaattttgaaagcaattcacaacgatatcgtaagcgaattaaaagcagaggttgttgggaattataagtaaaaatacaattttgaaagcaattcacaacacagaatgcaagctttacattagtaagttggttgggaattataagtaaaaatacaattttgaaagcaattcacaacattaatggcacaagtatctacaggacatggttgggaattataagtaaaaatacaattttgaaagcaattcacaactagtaccaatggttttatcaggtctttcaagttgggaattataagtaaaaatacaattttgaaagcaattcacaacaggaaatacaaactggagatagtataaatagttgggaattataagtaaaaatacaattttgaaagcaattcacaacctcagcaatatcatcattgatttctatatcgttgggaattataagtaaaaatacaattttgaaagcaattcacaacattgaatatcaccatcatttttaagccatagttgggaattataagtaaaaatacaattttgaaagcaattcacaactaactgcactagctaatgatgccgaacttggttgggaattataagtaaaaatacaattttgaaagcaattcacaactagctaaagaaggataagaatacccagttggttgggaattataagtaaaaatacaattttgaaagcaattcacaactaaatactccctttgaataatccggaattggttgggaattataagtaaaaatacaattttgaaagcaattcacaactatattttaattcatattttttcataatggttgggaattataagtaaaaatacaattttgaaagcaattcacaactatgggtgcgttttaccgatatactacacagttgggaattataagtaaaaatacaattttgaaagcaattcacaacaggcgttttcatacattgctgtataaaagcgttgggaattataagtaaaaatacaattttgaaagcaattcacaaccataatgactttcgtatgtatcatttgcagttgggaattataagtaaaaatacaattttgaaagcaattcacaacagttgttgtagtacctggagttattgaattgttgggaattataagtaaaaatacaattttgaaagcaattcacaaccggcgctgccaatataccacgccacctgttaaagatgttaatatggctctgcttggaatgatgtatcctttttattgcatcactatgtttcggcgctgatagagcataatgaatataacggtaagattttagaagagataaaaaataggagtgcagtttcctttttaatgatcagggagaatttctttctaattaaaaaaacttagtttattcagaaactaagcatgtctaataaaaagtttaaaatgattggctttcagaaaggaaaaatgttgtttcgtgaaataaaataattattttgttccatatttgtaccattgttttgtaatgtattggtaaccaggcgttgttatttttgaagaagataagtaatgatacgttttgatgtgtttttttgcgtaaaatattgttgtttaggtatttgtgtgttaatcgtctgagataagtaattttctaaaaagtggctttttattttctatagaaaggtaattcatttttaatgtatttatgattatatagttacacctaattaaaagatgtaggtctttcaaaagtctctagctcataaagactatttgaaagtaacaaaaaaagaggttcatttgccctaccgtctggacacaaatatatttttagttatatttgataaaaagtgagatattttgaaaatttaaaagacaagcgattgttgaatagaggtaattctattctcaatcgcttatttgctaatagtatttattcgataagacaattagcagaaagtgacgctgaagccaaagctatttaccgatttttgcaaaatgataatgaaagtgaggctgatattaaaaagggtatgtcttttaatccagcttcaaaacaatctcaattttgagaaattaatttaaataaaccttaataggatgaaatatataacagaattgcaggaaggaactaaaataaaattagttatactccttattgttttatctataagttcatattatttttttaaaaattacaaaacaacggacttacaattaaaaatactttcgttcatagggatagtaggttcggtttggctcatgtacaatgcaatttataaaaataataatgttcaattgctaaagagaaattttgaattaactacggggaaaatcgaaaaatatattgttcctaatataaaaggagcaattccttcgttaggcaaaggtgcagatcataactatataaaatattcatatgaagtaaataacaatcatgagacaaattcatatgatgaaaattattttatagacctaccagatataaaaccaaatttggatatgtcgtatttggtaatttacgaaaaaagcaatccagcaaatagttttattcttgtaaactatcctattaatgattcagctgatttagatcgctatcgaaaaatattttctcaaggtattccagatgatacttttaaacaagagtaattgctgaatatttcaaattagcggtacatgatcatactgcttgcattgaaaaaaaatataaataaaaatatcatattgaaaatgacacaatacaattcttatttggtaggtttgataacaacaaaagccgagtaagttttttattaagcttttctaaatattgcaaattctattattttttctgaagctgaaataagaaaaataaagtataaatttgataaaagaatcatgagattccgggtaagcttaaagatcgatctgatccagatatagtaacttatttaaatggtaaatacccttggggattactgaatatctcagatgaagaattaaaaaagcttttgttgctggatgaagttgaaattctctataagtacaattggcaaactataaaaaaaatggaggtcattgagttaaatataatttctcaaattctatttgtaataaaaatggagttgatggaaattttagatcagaatcctacttgttttttctgatgcattaaaaaaaatatctaatagagatagattaaaaaaggaattagccgatacaataggctatcttaaaataacgaaacttaaagaatataaaaacattattataatggatttttcaaatagcacaatactaaaagcaatagttcacgaagtaggcaataaatttagggatgaaggaattctttattctgaggagaatctcgatgtagaaaatgatgatgcacaattattgttttccaggtatcttttaggatcttttaaaggaactgaattttataatttttttcattccactgatttagagatgaacgaagtctattcatctgttaaaaatatttttaaaaataatgaagaatttaaagaagagtctaaaaagatttcgctgcatctttataatgagtcaacgcatgcaaaaataaataaaggtgaaatttatatcgtatactttcaagattgtagaattgatgatgaattaatcgatgcagtaggtttgttcaaatctgaaacaaaagaaatatatctgaaagcccagaaaaaagaggctaattatcttttagcttctgagagaggtatgaatgtggataagttagaaaaaggttgtataatttttaatactgatgcagataaaggatacaagattgctttggtgaatacttctcgctcggaagatgctcagtattggaaagaaaagtttttgaatgttgtacctgttcgtgacaattataactccactaaaaattatctttctttggctaagtcttttgtgacaagccaattaacggatgagtctgaggtaagtaaggcggagaaggccgatttgctaaataaatcagtagaatattttaaaaacaataaccactttgtagaagaggaatttacatcagctgtttttcaagattctaaagttgctgattcttttaaagaattcaaagagagttatgagaaccaaggagaaattctaccaaaagattttgagatcgctccacaagttgtaaaaaagcaggccagaacttttaaaagtgttataaaacttgataaaaattttcatatttatgtgcatggtaaaccgggtttaattcataaaggatttgatgaagtaagtggaaaacatttctacaaagtgttctttgatagtgaaacataataagggatacaattattgtcgagattttcgcactcaatattaatagttgaattagttaatttactttttgtaatttaaatttataatgactattgcgtaataattttttttcaaaaacaaaagaaaaaaaggaaagcacaagtcaaatctacgataatgagccggagtgctataagccccgaaggacggcatagccgttatgcgcatgcaggtgacggcgggcactactttggccgcccttttagtccgttttgaatgaaaattttaatgtagtatttaatattttgacttaaaagatcattcttaaacaagtaataagtgcttgtaaattatttagttagtgatgtaggtttactatttaattacttttttgaaagaaaaaaactatacaaaaacacatcaagttaattcgctttttactatgtttttttaagtatttatgatttttttaattacaatcatcaaatcactttattgccgatatttaaaaacgtaggaaatgaattaaaaaaaaaattatgtttacacgtatttttaagcttaaactgttaaagatcaaagattttagtttttcatacttcccgccttataaaagctaaaagtactttcatataaaaaaaacaaattataactgtaaaattatgaataaaataattactcttttaattataatgtgctctattcagacatcgcagtctcaaaacaaagtcaaattttcttatgatactgctggtaaccaaatcaaccgggaaatctgttttggaagttgtttgactgcaaaaccagcaaaggatataaaagaagaagccctgacggaggacgatctgcaaaaattctcccagactgattctttttcctattatcctaatcctgtcagggaagagttatatttaagatgggaactgacctcagagaatgccataaactcagtggaggtttattccatcttaggtactgtggtaaaaagttatcacggggtgtcttcagccaatagtttgaatattccttttagggaatactcaaatggtgtttatctgatatcgatcaattacgcaaatggtgatcaaaaaacaatcaaaataattaaacaataaacatatgaagcaactttactttctgctactgtttttaattatgcaaacgggctatggtcaaaatttcaccgatactaaaggggaattgcaaatttcagctgcgggcacggcaacctataacttacctatcgctgtaccaccgagtataaaaaatgtggccccaattataaatcttagctacagcagtggtgtgcgaggcggacttgcgggacaagggtggacaatcaacagcatctctacaataagccggatagctacacgacgtgatattgacggttatactgatggggttgattttgatgcagatgataaattggcccttgatggccaaagattactgataaagaccggtgtttactgggcttcgggatctacttatcaaaccgaatataagagcaattcaaaaattgagctgataattgaaggtacaactacttattttattgttacttctcctgacggatcaagatcctggtacggatccaaaggatccggaagtctgcaaaattcagcttcagtgaactcgtggtatattgtcaggtatgaggacgtaaacgggaatttcattgattataattacactacggttacctataataatacaactcagctatacattgataatattgtatttagcggaaatgcaacagcaggaattgctgcccaggataagattagtttcatttataaaaattccagccgtgtcgagcgtgactatataaaagggggaccagtgtatgctacaaaaattttagattatattcaggtttatgccagtagtgctattttcaggacctacaaactctcccatactgtggattctacgttgggttatgacagattaacaagcgttcaggaaattaacgcacaaaatgaagtatcaaatcctgtcatttttcaatacagtccggcccctaccactcctgagagaactgaaaaaacctataccaataaccttatgtttgataaaacagatcttgcaggagattttgatggtgatggaagactggattttgttgccggtaatcagatatttaccaacctatttacaggagacagtggaaatgcaccatcaaattttgcttttgatatcctgaaaagaaagttcaccggcactacattatctaataataagatgaaccagttccaatcaatcattattgctaatcccggtacaaataccaaggatttccaggtttataatttagttaataacgctttacaattaagttacaccaaaaccgttacaacagatacacaggagctgcagcatcttaacgacttggtttcatttcccagtgtta

SEQ ID NO: 1546 - DNA, 24047 bp, synthetic construct
  misc_feature 1..24047: note = Synthetic
  source 1..24047: mol_type = other DNA
ttttttcctcctaagtatatttcgggtaatgagataattgatctcactcaggacaatatagtgctaatatgtgatcatggtcatataagtgattttccttggtccaaatatttacgatggaggactgagtcccctatggagattaattccgaaaaaccaattgatttgtttaattctcaatcctgttgcggcagtgatgatgcaactaatgctgaaattaagataacatctagcactgctaatgcatctggttttgatgggaaatggcttaaatgtgaaaattgcggcagacagacgtcactaaaaggattgatgagtgtcaaaattaaatgtcccggtcataaaccatgggaagctgaaacttcacatgacggaaacttaaaatattattcaggaagtccgctttctagaaatcaaatgcctccttctgaaaaatgcatgtcaagcaagccaatgaaagttgcattaactactggaaacaatctctattattcaaacatgcttactagtatttatatgcctgatgaattgtttctaaatgaggttatactaaggaaaaagaaacttgaaaaagaaaaagagttggctaaggatgaagatagaattgatgatctaattcaaattgtcagtgaaataaaattaattgaaaatgaattagtaaatcagcctaacgaagaaatcccagatttagaaaagcctattttataccgcttcgaagaatttaaagcattagcagggaaaaatgaagaagagattaatgtcgataaagaaaatgagcatttaaaagttaaagatgttacagagaacattaaaggttctccgcttgataaatatttttcaagaattcttagaattgataatatgaaaataacttctgctcaacttgatttttcccgagtagttccggttgattctgattctggcagtgtagttactaaaaatatcttcagcagtaaaaatttggaaaaagtggaagcctatccagttgttgaaaattatggcgaaggcatcttcttttctttcaaagatgaacagttggaattattttctaatgtagtttcatcatccataatagaaaagctcataaaattggataaaaacagtgataccttttctgaaaaagccataaaatatggaatacaaaataattggcagctgtatttagttcattcattttctcatcttatcatgagggaattagaatttagatgcggttatccgacagcatccctgcaagaaaggatttacgtttcgaataatccaaaatataaaatgtatggatgtatgatttatactgctgagggtgctgaaggcagcatggggggagtaattgctcaaaccagaacaaataacttattaaatctaattacaagtgccttgaaaagagctactgtgtgtaatagcgatcctctttgttgggaatcagacggtcagggattatttgacttaaattttgcttcttgcttttcttgcagtcttgttagtgagacatcttgcgaacacagaaatatttatctagacaggagaattttggtggatgaaaataatggtttttttaaagatatattataatggggtatttttcttcaaatgaaaattttataaaaattaagttccatagtgagatgaaaacattgtcactggaagaaaagatcaagcattataattataatttaaagtctgaaacactgagaagaacaaaagcttattttgaaaaactagattcccagtttttgatgattagcgatcttaaccaaggaattggattaattacctccgaagattttggattggaaacaaaaacaaaagcttatgaagaaattattcagctgctgagagattatgaataccaattaattatctattccatttattttgaagattatggcgataaaatattttttaatttatctcatttattgcttgatagtggtgcttcgaattttcaagatgattatttaataaatagctttattagcaaatatgcttcaaatcaaaccttaatccataaatctatattgacagataaattaggtttatcagagagagactgggaagatgaagataatcaaaggaatccaatagtgggaggattgatgtcttggttagagaaaaaattggtgtcaaaaaatacggattcagaaatcaaattagtactgtttcattattctaaactatggaatcttaattattcaaaaccatataatgaaaataagggaattctgcttttaaacagtttaatagtaaccttaaaaaagtattgcctgatttaaaagttgatttcgattctattttatttgaattaaatttaatttttaattctttattttccactataaccttgcctccctatcttgagtgtgatgatactttagctagtaattccagaactgcaatatcatctggatataaattaaagaagaatgaatttaattctttacggaaagagtctgttacatatctgaatttcgaaaagttctcaattcaggagcttataaaaacatattttttgtctaatgaaggtttgcagaaaattatatatgataaaataactaaatcaataaacgaaggatattttattaccagatctgatattgaattttttacagaattgcaaaatgctgacatattattaacaacacatgatacgcagaaactcacggagtacttttataaaacgaactatttatttggcaaattaattttgaaatagaatttataaagaagattttgccaatctctcctgtacggcataagggttttactttcctagaaccttattttttttctaatctataagttgcaatgttgtttaaaattacaattttcataattacattgtgcaaatattttattatttaagtataatgcagaatgcatttcaaggaagttaattggttataagttaaataattctattgcaataatactttttagattcgactcgtcagttatgttgaatttcctgtcttctcgaaaatctatgtgggtcttttctaaattgtagctgaataccttgctatgtatattcttgaagaacagctccagcgaactgatatcattatttgttttgtcagcgtaattataagacatatatcccgcagcatcccgctgaaaacttatgccgctttttctcagatgatatgaggattttatgcccgtaattgtctcaggtaaattttgaaaagtatcatgatcaaatttctgatagctacccggatgcttataattgtggaaatagtcatccagtttggaagcgcttgatgcattgtatataaataaatgtttctcggttctgtaatcaagaatctgggaaacagaagcaaaatattttataatttcatgaaaagctgttttgctgtttactgtggtctttacttctattactgccaacacagatttgctgggaacaacaactatatcatttaccctgtataatggtgaatacaactgattatcgtagatgatgatatcgatttgccttgagagattgcttttttcatctattacgaaaccctgctcgactgcaatccccttatgaagataagtggcaagaaagcgccttaatatttcttcagtcagaactcctatggtcggattatgtttctttataaaagtttttacctgcaggatctcattgagcagttcttcggttttcaatctaaaaaattcgttagtcataggatcaggtttatggattgctgatagtatctggcgctaataccatctttcatattttattgaagtaggtatattttgcgcctgttttgttttattgcagttttcgcagaggagctgaatgttggtaacatcattaatgcctccaattgctagaggtatgatatgatcaaaattatttatgcttcctacgctgataagacctgttaaatctttatgacagcttacgcacatgcctctatctctatggataactgcacgcattacccattttggtatcgaaactcttttcagcatgccgtcttttttaaagaaagacaggtcttccatttcaatttcctcaattgttttttcttgaatttgatgtgaaatcaattcattaaatcgttgcagggtcttcctgtttaggaaaaggacgaaaaaaatttcatccgacatcgtttccagcagctcttcatagggaccgtaaaaacttaaatatctaaaatagtccgcaatgtcatcatcaattatttcagctcttatctttttattttctttcagccacttgtcaaaactgtcgaatttgaaatcatagtgtcccattgcaatttcaacccagagttttcttcttcctcttttaaatgattcattttcggattctgataaatcatcataatttatgctgtcgattatgaatatgataaaagaatggagagctgaaatttttgggaatggacttaaaaaacttctataattctcatcgccgaaaaaatcattcagcgggcggatataggaaaagggatcacgcagtatattattaatcatattggcgaaataataggtctcaatatatttaatctctgaaatttgcggttttcccatattgctttattgattttaggttttaagtctggtgatttttctactgctaatatagaagtattatcattgtcctcagcccacttttacattattaaaatgctgatgacattctctgtttaattctcagttatcaatatttttttttcaatagtttcaatttttgctgttttatagcataggctgtaaattaaggaatttttcaatgatccatcgcttgccttaccctcagaatcatgaaatcaatgttccgagacagaagatgaaattatacttttttccagttgctttaatttctggatttcaataatcacgccgtaggcataaaatgtgctgtaggcctcttcgccgtaatcaaagccgtctgttatattacggctttccgcagcagaaagatttatatcttctgtctgcactttaaagccgatgccgggatttttgaattcagcaaattctacttctaatctatcgatgcaggcgctttgcgattccatcagactttcctttttctgtatcttgttaagattgttatggtgcattataaaaacaatgaaaccgctttttagcgaattttcaaaatttgggatttcagcggcaaggaactgctgtatcctctggaaatccttttttagttctcccatgtctggatttatcgctttggcctcaaagatgtattctgaaatgttctccgagttgcagattctcgataaggcaatatcgacctttccgcttcgtattgcatcatagttttgactgtattctttagactggctggcaaagatggtgggcgaccagatatcttccctaagttgtttgtaattctcaaaacagtttttgtataaggtctgggtgtttttttctgcttcgattttataattataaccatctttttcattccatttcagaagcgctttgcaaaggttcacggtaatgaaatattctgtcattttggtgacgttctgatcaaatgagagtttcagtacctggcactctccatatgattttcgaagggcggcgaatgttgccgctttaaaaggattgtctgtcataatttttagtaactgatataaagtgttataaatatagtatcattttttactcgtaaagttgagcttttttttaaaataatgccgtctaaatgattcaagactgcaatctgtatgagatgtcgctgtagattttttcttcctttttgtttttcctcttagctatcggttgcttgtacatttttgacgatgcatcaatgaaagtttaagtaagggtgtcttcaattcgaaacggataaaaaggcagccaagatagtgtgcgccggatcctgcaggcgcataacggccctgccgcccttcgggacttatagccctccgcatccttaagcgcccacttgattcttgctttctttttttccgttttttcttttgaaaacattttttgcggagcaggcgggaagaagcagtaataatctaaaacttttaaatcatggaaattacaggacgcttaaccagagatgctgttgttgccaaaacagcaaaagacagacaggttgttaacttctgcattgcagttaatgacacctacaaaaacaaagacaggaatgaggtaaaaaaaatagtcacttttattgactgctcgtactggctcagtgcaggtatagcccagtggcttaaaaaaggcacaatggtggaactattcggaagaatcggtgtgaacgcttatctcagcagtgagggtaaagcaataggcagtctcacttttcacaccaataatattaaaatactgattttcaaatcagacactcagcctgttcagtcgggaaatttttctgccaagaaaagtaaaaaagaagaacccgatgatctgcctttttaatgttcggatgataaatgtataagcctaaagaaatgagttatgaaagccttagaaaaatcaatatacgccgattatgatgtacgccttgcgttcaataaaattattctttccgatttggaatcgtatgacggaactaaaaaagtaaagcttaaatctttccttgaagacctgcagagaatcgggtgcatcagcggtatgatttccgaatttatttatcatgccgattgtaaaaaattctatatccagcatcttgatgatttagaagacatcagggaagaaatcgaagattcgcttggcgaagctgtaaaaaacagacaccgcctgcctcactacacttttatgtgctggctgtgtttcgaagaatactgttttgacatatacagaagcagttttgaataacagttactgttcaatcttaaatcaacttttatgaaagcttcagaccaatttaaaaccgttatagaaaattatctgagtgaaactgcgcagagcgacaccgtctttgcgcaggacttcagtaaagcatgcaaaaacttggaaagctgtttcaattacatttttgccgaggtaaaaaaaacgggactgtgcgcctttgataatcaggaaatatttgacatggctgttaaatattataccgatgacactattgccgagcctcagcctataaaatgcagggttgtggtaaatcagcctgaaaaacctgatttgtttacctcctcatccgaagttcctcaaaacagcatcgttttaaaaacgcaagtgcctgcttataaaaccgcaccaaaaaccttaacactctttgacctatgatacctaaaaccatcatcgaaaagcagattacagaactgagtgtctcccttaaacctgtaacggaaaaaatgcaggggagagcggaaaaagacatttttcttaaatgggctgtcctgtcaaggggaaaatttcattgtttggaatgcacctgcacttggaagcctgatgcgcagaaagcatcctgcacaaattatataaactgcacagcttgtagggggaaactcaaaatacagcagtacaatcaggtgcatttcaaagaaatagagtactgggcagttttgaatatatgcgcaggatttcaggtggtgcgtattatctgctcgcataaaaatatgaaaaagaattttatgccgtcttactttcacaaagaagccatgcagcactggataaattcaaaaggggaggtgcgtacactctcgctcggcaccaacgttttttcaaatacctatgatgcctggaaatattactcgccccttgaaatccgccccaaaaattttgaggattctcccaaataccgcattaatccttataaggtttatgcaggagggcaggtgcttgatgtccttaaaagaaacggtttcaaaggcagtttttacaccattgcaccgcaggtgctttttacggctcttttgaaagattcccatgccgagacgctccttaaaacgggacagacagattttttgaagcattatctgctgtcgcgcgcgcagtatatcagggaaaactggcaggcggttaaaacgtgttttaaaaacaattttaaggtgtcaaattttacgctttgggaagattacatctcactgctgagatggtttaaaatggatttgaatattccccagaatgtctgtcctgaaaacttagctgaacagcatgacaggcttgtcgagcgcaaacgcagaattcagagacgtcttaaaataaaggaactccgctcggaaatccagcaggcgcagatgatctatgaggagcagaaaaaacagtttttcggactggagttcacagaggaaaatctcagcattagtgtcatggaaagcgtgcaggattttctcgaagagggcgacgtgctccgacactgcgtatttaccaacgaatactataaaaagaataactcccttattctttcagctaaatttgaaaacaagcctgtagagaccatagaggtggcactcccgtcacttgaaattgtgcagtgcaggggagacaaaaacaaggtttccccgcaccacaaacagattctaaaacttttgaatcagaacctgtatcagattaaaaagcggataaaaaagcggataaaaaacaaaaaagcagtccgagccgaaatttagttttcggctttttttttaacaaaatgttaaattgcggcgcccagacacttaaaggctggggtattgtctcaaggggttcaggcttaattctaaaacaaagttcgggaaggaaaggcggttcgccgaaaaaaattcccccataaatgcaggtgaaaaacctgctttattgcgttgcttttttcgctcgctttctcattcccggctgaggttccataattaatcttaaaactttagaaatcatggaaacttcaaagacacttcagaactggaatcaggtagcagaaattcagttggtttacaaaacaaaagtgaaagcatcagaaagacctttcataaattcttccaaaacggcttaccagctggcgctccagtcctggaatcccgatacaatagaatttttcgagcagtttaaaatccttcttctcaatcaatccaataaggtacttggaatctatgaagtttcatctggaggtatttccggcaccatagttgacctcagactgatttttgcagcggcacttaaagctaatgccgtatcgctgattatgattcataatcatccttcgggacaaatcagaccttccgaggctgataaacagataaccagaaaagtcaaagaggccggtagcattctcaatattacactgctggatcatctcatcattacccctgaaacctactattcctttgcagatgaaggagctttttagctcctacattttttaataattggaacgtaggtatttaataaattgacctactaattatttttataaagaagctttatctcaaattatgtagagatttctttgatttgctattaataggaaacatgtctagacattttaattagttacataaatttacggaaacgctaatctttcggataaatcaataggtaaatattagtaacaattaattatgaataaacagtataaatcgtacagacaatatatttttactcagctaatgataattttcaatttcagatgttacaatatatacctaactagcattattttgcttattgtagttgtcaaatcgataagcttatcaatagctcgtgaatcaacacgcagcttttaagttttttaaattatataataagcatctgcgatatttctactgaatctgtactaagttgtaaatagtataacatctgtaccttgcttaaactccttaagatttgtgaatgatttttgcgatgccggcctattgaaattttttagtagaatagtcaaaataatttctcaacaaatattataatgcctaaaataataagtataaaaaaagcgacccttgtgaggccgctttgaatgttttcacaacggaataatccttattgtgaattgcttcaaaattgtattgcaataatacaaaaaaatctctatccttaattatggttttccgtaaatcaattaattatcttttacttaattttaaaaattaattttttagagatgaaaaaaatattaggattagatttagggacaacttctattggttgggcatatatccatgaagcagaaaataatgatgagacatcatcaataataaattcaggtgtacgtattgtgcctcttactactgatgaagaagccgacttcaaaaaaggaaatactatttccataaatgcagacagaacattaaagcgtggagcaagacgaggcctgcagcgttttaaacaaagaagagatgctttattagagaccttcaataaaataaaatttatttctactggttttgtttatgctgaaacaggaaaagaaactactttctcttcataccaattaagagctaaagcagcaattgaaccagtttctaaagaagagctagttcaagttttattgatgcttaataaaaaaagaggttacaaaagcagccgaaaagcaaagactgctgaagagggagatgcaattgatggaatgaaaattgccaaagaaatttttgaaaataatttaacacctggacaatgggtttataattcattatcaaaaggaagtagatttattcctgatttctatcgttcagatttacagaaggaattagataaaattgtgcgttttcaaaatcaattctatccagaacaattaaacaacaaacttctagaagatattcaaggaaaatcaagaacacaaacttctcaacatttttcaagaacattaaaaattgaacttgcagaaaacaaaggaaccagagaagaaaccaaattacagcattataaatggagaaatgatgctttgacaaacgaacttgatttaaaaattttagcatttattcttactgaaataaacaaccaaattaatcaatccagtggctaccttggtgcaattagcgacagaagcaaagaattatatttcaatcaacaaactgttggtcaatttcaatacaagcaactcgagaaagatccacatgccaaactgaaaaatcaagtattctatcgtcaggattatttagatgagtttgaaaaaatttgggaaacacaaaggcaatttcatagcgaattaaacgacctgctaaaaacagaggttcgtgatgtcacaattttttatcaacgaaaattaaagtcccagaagcatcttgtaagtttctgcgaatttgaaaaaggacataaagcaattccgaaatcatctcctttgtttcaggaatttagagtttggcagaacttaaataatattgttgtcaaaaatgagactacaaaagaaccttttgttttggatgaagacctaaaaaaaattcttgcacaacaattattgtttaaggacagtattactgactctcaattattatctttttgtgagctaaaaaaggggactcatactgcaaatttcaaaaaaattgaaggaaacagaactaatactgagatttataaagcttttgaaaaaattctggttttagaaggctatgatgaattagaccttactaaattagatgcttttgaaataaataaaataatcaaatctgcattttctgatttagaaattaatactgatattcttgatttcgatacaaatattcaagggaatgattttgacaaacagccctactatcagttttggcatttattattttctgcggaagatgatgattttttaaaaaaaagtctgatgagtaaatttggctttagagaaaatcacattccatttcttttgaatgtaatcttacaagctgattatggtagtctgagcgctaaagcaattaaaaaaatcctccctcatttaattgacggacatatttatgacaaggcatgtacattagttggctataatcattcatcatccctaacagcagaacaaaataataatagagttatcaaagatactttggaactacttaaaaaaaatagcttaaggaaccccgttgtagaaaagatacttaatcaaatgattaacgttattaatgctattttaaaggacccgacattaggaaagccagatgaaattcgtgtagaattagcccgtgaattgaaaaacaataatgagcaacgcagtgaaatgacaaaagctattaataagagtactgtagaacacgagcaaatcaggaaattattacatcacgaatttggaattcatcgtgtaaccagaaatgatgttatacgctataagctttggaaagagtgcgacggtatttctttatacacaggaaaaccaatagaaccatcaaaattgtttacaaaagattacgacattgagcatattattccaaaatcacgtttatttgacgatagtttttcgaacaaaaccatttgtgaacgtcaattaaatattgataaaagcaataaaacagcttactcttttttacaagaaaaattatctgctgaagagtttgatcaattcgaaaaaagagtaaaaagcttgtttggaaaaattagccgaacaaaacagaacaaactcttaatggctgataatgaaattccagaaggttttattgaacgccaattaagagaaacacaatatattgcaaaaaaagccaaagaaattttactggaagtttccagaaatgtaacttcaactattggaagtgtaactgataaacttcgcgaagattgggaactggttgatgtgatgaaagaactcaattgggacaaatatgataaattaggtttaactcatatagaggaaggtaagaacggagagcgtttgtacaaaattaaagattggacaaaacgaaatgaccatcgtcatcatgcgatggatgctataacagttgcttttacaaagccagcatacattcaatatttgaacaatttaaatgcaaaaacgcaaggcgataaaaaagcagattctatttttggaattgaaactaaatatttaaaaagagataagaataataagcttcgattcatcgaaccaatgcctaactttagggaagaagcaaaaaagcaactcgaaagcatattaatatcctacaaagcaaaaaataaagtagttaccaaaaataagaatataactaaaaaaggcggaggaacaaatcagaaaacacagctcactccacgtggacaattgcataaagaaacagtttatggtaagttacaacaatatggtacaaaagaagaaaaagtaggtgttaattttacagctgaattaattaataaggttgcgaaaaaacagtatagagaagctttattaaatcgtttgtcagaaaacaaaaatgatcctaaaaaagctttttcagggaaaaatacattatctaaaaatccaatatatctagatgtcaacaaaactattgaattaccagaaaaggtaaaattagtttggctagaatccgattatactatcagaaaagatattactccagatttaaaaattgataaagtaatagatattggcttaaaatctattcttcaaagccgtttaaatgaatttggtggagatcctaaaaaagcttttatcaatttagacgaaaatccaatttggcagaacaaagaaaaaggaattgccataaaacgagtaaccattagtggagtaagtaatgctcaggctttacacgttaagagagatcacttcgggactgaaattttagatgataacggaacttcgattccggttgattttgttagtacaggtaataatcatcatgtagctatttacagagatgcaaagggaaatttacaggaaaaaattgtttctttctatgaggccgtaactcaaattagtttaggattgtcaattattgataaggattatagaaaatctgaaggttggggatttgtattcacattgaagcaaaatgaatattttatatttccttctgaaggatttaatccacaagaaattgatcttctaaatcctagtaattattctttgattagtcctaatctgtttagggtacaaaaattaggaacaaaagattataattttagacatcatttagaaactcaattattggacaatagtaaattgaataacatcgcttataaaagaattagaagtccaaaagaattatcaactatcgtcaaggttaggattaatcatttgggtcaatttgtgcaattaggagaatattagttatgataaaacggacacttttctttggtaccccagcttatttaagtactaaaaatgagcaaattataatatcttatcccgacaaggatcaggagactaaaagcgtttctattgaggatattggggtaattgttttagaaaatcaacaaattactataactaatggattattagaaaaactaacccaaaataatgttgctttaattaattgcgaccaacaacatttgccaataggcttgttaatgccgctaaacgggcacacagaacaaacagaacgttttaaaaatcaaattaatgcttctgttccactaaaaaagaatctgtggcaacagactataagctctaaaattacgaatcaggctggcctattaaaagaaaagggaattccaatgcgtaaaatggaattatgggcaaaggaagtaacctctggagactctttaaatcacgaagcacgggctgcagtatactattggcaaagcctgataaaagtggagaattttacaaggggtcaaaaaggaatacctcctaataatttactcaattacggctatgccattttaagagccatcacggcaagagccttagtaagttcgggaatgctgcctacattaggaatctttcatcgcaataaatataatgcctactgccttgctgacgacattatggaaccttatcgaccatatgtggatttgattgtatgccatattatggaaacagctgattcttatgaagaattaactgttgaaataaaaaaacaattattgaatattgcaacaatagatgtaaacattgatggtaaaaatagccctttgatggtagctatgagtagaacaaccaattctttacatgagtgttttgaaggaagttccagaagaattttatacccaatttatgtatgacgagcattatacacgtttaaatcaatataggagtttgtggatattagtattttttgatctgcccaccgaaacgcgtaaagagcgtaaagttgctagtgcttttcgtaagaaattattagacgatggcttttctatgttccaattttcgatatatatgcgtttttgtgctagtagggaaaatgcagaggtacatgctaagagaataaaaaatagcttgcctgagcatggaaaaattggcgtgatgcaaatcacagataaacaatttggaatgatggaactgttttatggaaaaaaacctgttgaaacagaaaaaccatctcaacaattagaacttttctaataattaggataaaaaaaatacctaaacagctctggttcaggtcttaaattaagcaactttttaattcctaagaaaatacataattgccaacatatcaaacgattaactcgcggtatgttgggaattataagtaaaaatacaattttgaaagcaattcacaacacataatgcaacggttcaaaagtataatggttgggaattataagtaaaaatacaattttgaaagcaattcacaacaacccaacggttggcggttctctttacctcgttgggaattataagtaaaaatacaattttgaaagcaattcacaacgcgtttctgatgcatacagacagttaataggttgggaattataagtaaaaatacaattttgaaagcaattcacaacacgacgtcggcgactcccatttttgaaaacgttgggaattataagtaaaaatacaattttgaaagcaattcacaactacgatataaatgtagagggcttagcaaccgttgggaattataagtaaaaatacaattttgaaagcaattcacaacaataattaaacacaaataaacatgaactcggttgggaattataagtaaaaatacaattttgaaagcaattcacaactggagtttaaataaagtagagaaacagtcagttgggaattataagtaaaaatacaattttgaaagcaattcacaacaacgaggtctactattcaagagcttgctggttgggaattataagtaaaaatacaattttgaaagcaattcacaactatgggtaagaaccaatccttcaaaacctgttgggaattataagtaaaaatacaattttgaaagcaattcacaaccgatacaatgcaatggtatcaagatagtatgttgggaattataagtaaaaatacaattttgaaagcaattcacaactgatacagttattgaaaaattaaaaaaaggttgggaattataagtaaaaatacaattttgaaagcaattcacaacacacggtactgctgatttactagcagaagcgttgggaattataagtaaaaatacaattttgaaagcaattcacaacatgaattatcgcaatctgcatcacacggttgttgggaattataagtaaaaatacaattttgaaagcaattcacaacatcataggagccgcttttttaaaataataagttgggaattataagtaaaaatacaattttgaaagcaattcacaacgtatttggccctgtaattaaactttctacagttgggaattataagtaaaaatacaattttgaaagcaattcacaactcatttaaggtttctctaagtttctttaatgttgggaattataagtaaaaatacaattttgaaagcaattcacaacaatattcttctatgtatgtgataatgcttagttgggaattataagtaaaaatacaattttgaaagcaattcacaactgaaccgttagcggtttgtccttgcattgcgttgggaattataagtaaaaatacaattttgaaagcaattcacaactaataagataatagcccgtaacaggcaagtgttgggaattataagtaaaaatacaattttgaaagcaattcacaactaacgtgcaggacatgagcgcggtcgttcagttgggaattataagtaaaaatacaattttgaaagcaattcacaacagaagcagtaagtactgcataaccgtctgagttgggaattataagtaaaaatacaattttgaaagcaattcacaactatttcggaagagatgccattagaacttttgttgggaattataagtaaaaatacaattttgaaagcaattcacaactatattacatatccaaaagatattaatgaagttgggaattataagtaaaaatacaattttgaaagcaattcacaacacatttcgctgtctttagtaatgaattttagttgggaattataagtaaaaatacaattttgaaagcaattcacaacttgacttgtgaagcgttagcattgttctctgttgggaattataagtaaaaatacaattttgaaagcaattcacaacagtacaagcaattagtaagcatcgaacttgttgggaattataagtaaaaatacaattttgaaagcaattcacaaccacatacttgttgaattatttgtcctttaggttgggaattataagtaaaaatacaattttgaaagcaattcacaacatagactatattacaatttcgagttcattgttgggaattataagtaaaaatacaattttgaaagcaattcacaacgatgacaaaggaaatgagcaaaaaggaactgttgggaattataagtaaaaatacaattttgaaagcaattcacaacatagactatattacaatttcgagttcattggttgggaattataagtaaaaatacaattttgaaagcaattcacaacgaatttcctccagtaaaattttgataaatagttgggaattataagtaaaaatacaattttgaaagcaattcacaacctattagttacatgcttactgtcttttgctgttgggaattataagtaaaaatacaattttgaaagcaattcacaacagctatttgtttcattacatctattaaacggttgggaattataagtaaaaatacaattttgaaagcaattcacaaccagttagagttcattacttacaccctctaagttgggaattataagtaaaaatacaattttgaaagcaattcacaactatgaatctactaaatctttctgtattccagttgggaattataagtaaaaatacaattttgaaagcaattcacaacattagaacagcaaccttataagaaaggcctgttgggaattataagtaaaaatacaattttgaaagcaattcacaactgaaatatctgtgctaattgtcgaaggaagttgggaattataagtaaaaatacaattttgaaagcaattcacaacaaggacaattagataattctgatgattttggttgggaattataagtaaaaatacaattttgaaagcaattcacaacaaacgacagtaaaacagttttaaatattaagttgggaattataagtaaaaatacaattttgaaagcaattcacaactaaatgtaatcgcattttcggccacctctagttgggaattataagtaaaaatacaattttgaaagcaattcacaacgattacgtaatatttaaaaccaagtttttcgttgggaattataagtaaaaatacaattttgaaagcaattcacaactcgtaacctgtatgtaattgaactccgttagttgggaattataagtaaaaatacaattttgaaagcaattcacaacgggaagagtaatctaattaggattttggaagttgggaattataagtaaaaatacaattttgaaagcaattcacaacagtcattaagattaagcattactaaaaaaggttgggaattataagtaaaaatacaattttgaaagcaattcacaacaggttgtttggaaacttagcgattccataagttgggaattataagtaaaaatacaattttgaaagcaattcacaacatgatagttaaaactaaatcgaatttacaagttgggaattataagtaaaaatacaattttgaaagcaattcacaactaacaaggttttgcaagtaaatgacaacgggttgggaattataagtaaaaatacaattttgaaagcaattcacaacggattagctacaatcaatataaaatttactgttgggaattataagtaaaaatacaattttgaaagcaattcacaactttgatgctttaatactcataagacaaaaggttgggaattataagtaaaaatacaattttgaactattttattttgacagaaagtaaaattatctctaaaaatcctttttggttttggaaagtaaccaaaatagactttaattcaattacaagtatatccatattacaccctccaaagacagcaatttcattagaaattaaaatggagaatgcaacaaaacttatacctgtatctagtttaagagatcatacttggaaagaattgaaaaagcatctgattaaagaaaatattgtgttgtatgataaagtgggtttttagtaaggaattttttcttgctaaaaatataaaattaaattttacaagagattaaaaataggagttagagtttcccatttaaggattaaggatagtttctttctaactaaaggaacttagtttattcagaaactaagcctgtcaaataaaattttaaatgattggctttcagaaaagaaatatgttattttgtgaaataaaatagttactttgttccatatttgtaccattgtattgtaatgtattgataatcagttactgttatttttgaagaagtcaaataattcttctttaaacaataatgaaaaaccgagtcagaaatgactcggtttttttttgctaatttttaaaggattatcggcctcggttttcagtccagaacttgaaaccagaaacaaaatataacagtcagataagatgtttttgatagatgttaattctctgtttggtaggtttttatggagtgttagcattttttgttctatttattttcagatattaaaaaccaaataggatgttatgtcgtaaatgcttttataactaaaaaattaagtcatgaaaactaaaaacattttaacagcagtaatttttacattagtatttggagcaacttctttcgctcaaaaatcagttatggttggtggagcagcaatgtatcctaacaaaaacattattgagaatgcagtcaactcaaaagaccatactacattagtagctgcggttaaagctgcgggcttagtagaaactttagaaggtaaagggccatttactgtttttgcgccaacaaatgaggcatttaataaattgccaaaaggtacagttgaaacattgttgaaaccagaaaatattaaaaaattacaaaccattttaacttaccatgttatagctggtaaaatgaatgcatccgatatcgcaaaagctataaaaatgggtggtggtaaagcttcgcttaaaacagtaagtggaggaacgataacagcctggatgaaaggaaaagatttgtacataagtgacgaaagcggaaataaagcaaacgttactattgcagatgtgaatcaatctaatggtgtaattcatgtaattaatacagtgttgttgcctaaaagttaatatttagacccgattgctccaataatcaaaaaaagccctgtatgttgtacaggacttttttgtgtttaatgaataatgtatgttatcctaaagcgcgtgctgtaacaaaatagcggtaaccaataatagccatttgccatttctttgcttttgttatatcaagtccttgtttggtaaaactgggtagaataagtttatttatctgagctagaattttatacataagagtaggatttttttcaaagatataaaaaaagactttgtagtgatacaaagccctttttattgaattttaaataagttttaaatactattttgcaagtagtttatctattttagccaacatttctttggcgtttgcattttctggcgaaagctccagtgctttttgatacgcctgtttagagatttcaatctgaccgttattaaagtaactttcggctagactatcaaatgcatttcctgatttaggattctcttttgtatttaattcaaaaacttttatggcatcatttactctttcgtaattcatcaatgtatagccaatagcgtttaatctgtcttcaaacttccattcaggatgattctttttcaaggcaagatagttttgctccgcttttgtaaagtctaatttcaaaaaatcctgtgttatcttttcgtcagctagtaagtaatcatcgattaaggttttatctacaattcctgctacatgatttactacttgagactgtacagataaattgccatatttgtgaccattagataaaaaaatgatagttaaatcgtttttagtaaactttctaaaagcagtttcatttccgcctgtaaaaccatacgagatgattttgtttacagggtaaaaatcccaaccatatccaaaattttgagtactattagtgtatttaaatggctcccacattggatactttgtttctttttttaagaaagtatttttatctaaattttcattccaacgaataaattcttgcagagtaatatttagaccatttgccgaatggagatcagcgccactatttgaggtttgttttacatactcctttgttttattattgtaattatatctaaatgcactgttaggcaccgattcaccaaaattagaggagaaataaactccagatttaactcctgggaattgattttgcatgatgtattcttcaaacgacaaacctgttattttttctattatcttggtaaggaacaaataatttgtttgattgtaattgtattcacttccagttgcaaactccattggtttctttgatagtattgcaattttttcattataggataatgtaatcggaatatcttcaaacattacgatgtttggtaagcctgatgaatgagttaataaattcttcacttttatactttgccattcttttgggagattatcaagatatttagaaattgggtcttccagagataattttcctttctcgataagttgaaaaattccaacatttgttatcagttttgttgtagagaaaatcttaaaagcagtgtttttatctactggtttattatcctcaaaagaagcttttccaaagtatttttcgtagataacttttccgtctttgataacagctagtgcaactccagggatttcatttattttgattacttcattaatatagctatcgattttttgttttatttcgttttgattaacagctgctttttgaccaaaacagctgttgaagatgagtagaaatactgaaattaaaaatgcttctttcatagtaacaattaaggaataatgcatgtgtgtgtatgatttttcatcacagattaaagaaagatagtttcttttttcttattttgatttgctttctttttgaaattttcgcatgtccttgtcaaattttgccatttcgacattgaattttttcatgtctagatcaaattgcttcatttctaaatcaaattctttcatttcaatgtcgaatttggccatttctttttcataaatcgcttcacgctttgccattacagcttctacttctttttcgtaagcagacatatttggtttaaaagcttccatctttttattaaattcagccatttctttgttgaatttttgcatagcttttgcatcatttatatcttttggatgtacaggaggttttggcattttagacatgtcaatattcgcaacaggcattggtccttcaggaaattcaggagtatccggaggtgttggtggcgttggaggtataggaaaatcttcattggtattataactttcatcttcttctgagctttcactcatagttacaggctgatggatatctttaccagtttgtaaattaatagattcggtaccatcttcgttttttattataacaacaccaaaaggttttatggcttcattgccactagtttgcataatttgcgatttaccattttttctttttatgtcaacacgtattccagttaattcattagtcgaatttcttgttatatcgctgaatgcaatgattacttcatgatttgtttttaatttttgtacaatttcatctaattctttatctgttgtattcttcttaattttgtatacaaatacatttttaggatcagattttgtattaacaataatatcttcttttacttccttttgttctttttcctgtgcaataacttttacttgaaataggaatacaaatgctcctaatgcgggaagtattaaggcatactttaagtaatttttcttttttgattgatttttgtttaacatgacgattcgttttttgattaatgattgataaaagtgattggtgattgcaacacagttttcgtgtgttgttatttttaaaagtgtgtattgataggcccttttatcggctatttttttcaaggcttcagcatcggcaatgaattccagattttgcatgatggcttttttataaagccaaacaattgggttaaaccagaatacaatacagaatatccttgatatcaatacatctgaggtgtgattttgttcgctgtgaattttttcgtgctcaagaatgttttctagttcagtagaattgtacagtgatgagttgtacacaatataactgaagaatgaaaatggagcaatattttctgaaacatctacaaacttaaaatcggattgatttagaatggtttgtcctttaataactctttttaagctataaaagtcgaaagcaaactttaataataatatagagatgattgaaacatacaatagtaccaagcacaaatttaaatgaatatcaaaccaactctgttcgacaggaattgtttgtataacattattatttataggtaaagtaaaatttgtacgaacaggggcaacccaaactattttggtataaactacaagaggcaatacaatcgaggtgattaatcccgataataaaaaccatctattgctattaaaaaaagtttcttttcgcaataagaagtaatacgctaaataaaacaaggtgattagtccgctagttttaagaatatagatgaaaattgcctccataaattattattt

SEQ ID NO: 1547 - DNA, 24047 bp, synthetic construct
  source 1..24047: mol_type = other DNA
  misc_feature 1..24047: note = Synthetic
ggaggagttcgacttggtaatggggtttccgaactgcaactaacacataataaaacgattagtaagctatagattattttatacatattttgagtatttaggaataagaccaaaaatattaaaaaaagtttagtgagtttttttattttttattttctttggaatttaataagagtaactttgtcgaagagataaaatgtctttttatcccagaaaccctagccatgatggctgaattgtttacacaattcccttttgtgacggtgtcagccaaagagatatagtgaacagcaggatttagctccaaaaaaaataattttatgaaaaatacttttaacattgtattcttatcgtttctttttgtctcttgtcaacaaaagataaaacctgatgatattgccaaaataaatggctattgggaaatcgaaaaagtcgtttttgaagatgggaataacaaagattataagataaacgagagttatgattattttgaaattggcaaaaataacttaggtcttcgtaagaaagtaatgccccaattagacggcagttttattgtaaacgatactcaagaaagtttaaaaattcggttcgaaaaagataaagtttatctagattacaatactccttatgccaaatggtcagaggaattaattgcgatttcagacgaaaagatggtttttatgaataccgaaaaaaaccaatatcattataaaaaagcaaccccaataaacattctaggtgatggcaaaaagattaaataatcaaagtaccgttggcgatgttttaaagcacatcattcaagctaacaaattgcaacccggaatggatcaaattgatgtgagagaagcttggaaaaacctgatgggcaacggtgtgaatcattataccaaaaatgtggttttgaaaggcagcaccttgtatgtagaactttcttcggcagttttgagagaagaattaacccacggaaaatcgaaaattgtcgccatgattaacgaagaattgaaacgcgaagtagttaaggaagttgttttgaggtaatgatttcagattgtagattacagattttatgacaattctaaaatacaaaaaggctttcgaataccgaaagcctttttgtatggaactaaatatttaaattacaacttgagattcaatcccaatttgaagtttcttccaagagtattataacccacattttctacaaattcttcgttcaaaatattagttgctgtaccaaaaatgtttaggatacctttaattaattcatagttcaaggaggcgtttaccaattggtaagaaccaagaactacattctgagttccgtatgtatttccatcaaagaaagcgtcatttctaccatctacatactgataattgacgttaaaagtagtccttgtagcaatttgataatccaatgatgaattcactttatgctttggaatcaatcgatccaatgctttatctacttgggtaaaagtataattggaattccattttaatttttcactcaaagcaaaactgatttgagtttcaacccctttggctttattcgtcccatcgatattaatgtatttataggcggatgaaaatccaataaaattagtctgctcacgatagaatcctactacagaaaatataatcttcttatccaaaaggcgtgtttcaaaaccagcttcaactgtggtatttttttcgggtgtcaaagccgtatttccgtatggagaaaacaattgatacaaacttggggtaacaaaagctgtgctataagatgccaaaactttcaacggaaacgctttgaaatcataggatggattcacattataaaccaactgatttccatactcgctatgaatgttcaatcgtgctccagcattcacattcaacccaaaatctgaagtaaaaactccagtcaaataaggatcaatcatattgaatttagtgctctctttagcgatattgccataaggcgttatactgttcatatcaaaaaattgatattgcgctcctgtcacaacaaacaaggagttggtgatttcatatttattaaaagcatccacatttacgtttctagaatcgtatttcgaatagccaaccgtgccagaatacgaatcaaattcgtcataagagcgaccaatttgattgtaactagaattcaataccaattctcctttattgtatttgaattttggcaaaaatccaaatcgagattgttctgatttggaatgattctggctaatgtcgtttgcacctgtattatcgaaacctccatcataatcattttccactttgtcgtaatttccaaagaaatccaaagtcaatttatcggaaactttataacctattttccctaaataattgattctcgaaaatcgatcggcttcataacttaggctttcatttggctcagcaatttgggagattcctgtagttgcagtactattcaacgaagcaaaataattcaattttttggcgtttccatttactgaaaacccttgattgtaatcctgtggaattgtttttgaagtcgatgctgtgttatacgttcccacattcatatacccatttccctgaatggctttcttgcccgatcttttcaaagtgatattgataacagcagtagctgcgccagttccatacaaagtgctcgaagcccctttcataatttcgatgctttccacttgctcggcaggaagcaaacgcaaatcatattccagactaattcccgacgcatcggtaactggaattccatcaataagaatcaagacttgattgctttttccgccacgaatgtagtagcctaaattttttcctgcagcactttgacctccgttgatttcgacacccgcaaccgaattaagaatggttgccacactttgtccttgcttcatttttaaatcagcggaagtgattttggtaattacttttccagatttttctttggccaaagcaaatttggaatccgaaattactacttcatccaattgagtttcggatgcattgctgtctttttgctgcgcaaatacacagttagtcattagtacgaataacgcactaatacgaacgattttgttgttcattttaataaaacatttttaataataaaaaatgggagaaaagcatagaatgacccatacccaaaccttttttcccgaaagtttgatactcgatgtaataggcaggtctcctggcttgcgtcttgttgtttaccttcccattcaaagttagaaattagaaatatgaagtaagaagtatttaacttctaacctctaccttctaacctcccacttccaaacagtggttttgtagataacaacaagctttctagcttacagttgcgggtacagcccaggattttcgattttcgattttcgattttcgattttttacaatctgaaatctgcaatctgcaatctgccacctgattcccttttaatgcggttttgaaaaacaaaacagcaacctcaatacgacggcaaagatagcgcaattgtaaattaaaatcattgcaattttatttatatatttgtagtaaactataacattatggaaacaattatcgtccatccaaaaaacaatgaagaacaaaaagtgataaaagcttttctggaagcattgaaaatcaagtttgaaaaccttaaaaacaaatccgaggagactgattatagtcctgaatttgttgaaatgattgaacaaaacagaaaggattataaagcaggaaaaggtattaaagtcaatttagatgatatatggaaataatattcctgcccaaatctaaagaacaccttgactttttcaagaaagtcaataaccctattattctaaaaaaaattcgacaacttttagaaataattccagaaacaccttattctggaattggaaaacctgaaccattaaagcatcatttgtctggactttggagcagaaggattaatcaggaacatcgattagtttacgaagtcatacaagctgataatgtaattttgatacattccctaaaaggtcattattaaaaaaagactacttcttattctccttcttcttcgaaagtttgacaatcaaccaaacgaaaccaactagaaaacacaagataattattcccgcaacaacataaataaaagtgtttgaattgcctctcataacttcctttttaacaaatttaatatctttgttatggttaaaaagtatcaaaagttacacaagtatatttttgtgaaaacaaaaaacgatacttttgtaaaaaattaccttaaatgaaatccttacaaaatagcgctttctactttttagtctttttgctgttcattcaatgcaaagaagttacaaaaaaagaaacaacacttgcctcttcaaaaaatgaaattcaatatgccaaaggcttagaaatatacaaatactcaggtttttccatcctaaaaatcacaaatccttggccaaatgctaaagaaagttttacctatattcttcaagaaaaaaacggaattattcccgatagtataaaacaatttccactaattcaaattccgctaaaatcgattgttgtaacctcaacaacacacattccggctttggaattattgggagtagaaaatactttagtgggttttccgaatacaaattatatttcttcagttaaaacccgaaagttaattgatgccggaaaagttcgcgaagtaggagtcaatgaaaatctgaacaccgaagttttaatcgatatgaaacccgatgtgattgtgagttttggtttaaataatagcaatccaactttggacaatcttcaaaaaagtggtttgaaagtaatgctcaacggcgattggacagaacaatctcctttgggaaaagccgaatggattaagttctttggcgcactttacggtttggattctaaagcagatgctatcttcgaaaaaattgaaaaagaatataagactactttggaattagctaaaaaagcgacaacaaaaccaactgttctcagtggcgcaatgtatcaggaacaatggtacgttccgcagggcgaaagctgggcagccttgtttttgaaagatgccaaatcccaatatttatgggcaaacactaaaggaaatggaagtttatccgtaccctttgaagtcattttagagaaagcacaaaaggccgatttctggattgctcctggcgatttttcaagtttgaaacaaatgagcgacagcaatccacattacaatcaatttgcttcgtttaaaaataaaaaagtatattcgtacagcctaaacaaaggcgcaaaaggaggaattgtttatttcgaattagcctcttctcgccccgatttagttttgaaagatttgatcaaaatagtacatcctgaattagtacctaattacaaactttttttctttcaaaaattagaataagacacgaattatattaatttaaaaaacttaattatcttaattccttaatggtttaaatccttgcaacacaaaaaccgaaatatccttttattcaccatactgacattgtcgctgctattgctattgttattgaacatcagtttgggttcggtttctatccccataaaagacgttttctacagcttgacgggaggaaattccagcaaagaaacttgggattacatcatcgtaaattatagattacccaaagccattgcggcaattcttgtgggaataggactcgccatcagcggattgttgatgcaaactttgtttagaaatccattggctggaccggatgttttgggattgagttctggtgcaagtttgggcgtagcaacggtaattttaggagctggatttttacctgcatttttagcttcatttttattgtcttcttatggaattatattggcttcgagtttggggagtttcttggttttattggccgttttatcggtttcgcaacgattgcgcgacacaatggctatcctgattgtaggattgatgtttggcagtttaaccagtgccattgtgggaacactcacctatttcagctccgctgagcaattgcaaaaattcactttttggtctttaggaaatctgggtaatttgtcttggtcatcgattgtgattttatctgtttgtgtagtgattggtttgtttttaagccttttgaatatcaaacccttgaatgctttgttgcttggcgaaaactacgcccgaagtatgggaatgaactacaaaagaacccgattgattatcatcttggccaccagtattttgacgggaagcatcaccgcttttgccggtccaattgcctttataggattggccgttccgcatattgccaaattggtttttcaaacgagtaatcacactattttattctggagcacgttgcttttgggagccataattatgttgatttgtgatagcatttcgcaacttccaggaagcgatattaccttgccaattaatgcggtgacttctttatttggtgcgccaatcgtaatttggttattgcttcgaaaacgtaaaatgatgaactaatatttttttaaacgcatagaaacatagtttttattacttttatcaagacgcttcgctttattacagtaaatcatagctttgctaaaacaaagaatagtcaatctcattctttctactatgcttctgtaattttttaaaaaaataaatatgataacacaaaaatatttagatgatttgacatacgaagtcataggttcacaatagaagtacacaaaataatgggaagaggtttgcttgaaagtgtttaccatcagtgtataaaagaagaattagcacaaagaaaaataaacttttctacagagatgaaagttcctctagtttataaaaccaaagaactcaaaatagattttaaatgtgatttattcatcgaaaattgtttagttgtagaattaaaatcggtagtacaatcaaaccctatatttgaagctcaacttttaacctatatgaaacttttaaaagctccgaaaggaattttaatcaattttaattgtttcaatatttttaaagatgggcagaaaacttttgtaaacgaatattttaaaaatttacccgaaaagtaacttattcctctatgtttgaaaccaagtttcaactataaactcttttaaagattcccaaaaactatgtttctatgcgtttaaaatcttatcttgtaaaaaaaaaaatgagcaataaaaatatcctttcaacttcaaatttaagcatcggttacaaaaccaaaagcgcgacaataatcattgccgaaaatctaaacttgaatttaagggaaggtaaactaatcgctttaatcggtgcaaatggtattggaaaatcaacacttttaagaactattacaggaatccaaaaaaccatttcaggaacagtttctttgaacgaaaaggacattcacgaattagacactttgactttggcacaaaatttaagtgttgttcttaccgagaaattaccaccaagcaatctgacggtttgggaactcattgctttgggaagacagccttataccaattggattggaaccctaaccgacaatgatattgcaaaaataaacgaagcaatcgaactgacacaaattggtcatttaacacaaaaaagacattacgaaattagtgacgggcaattgcaaatcgtcttgattgcaagagctttggcacaagatacgcctttaataatattggatgaacccacgacccacttagatttattacacaaagtagtactttttaaactcttgaaaaagctaacacaagaaacgggaaagtgtattctgttttcgacccacgacatcgatatggcgatacaattgagcgatgaaatgatcattatgactcccgaaaacaccatacaagaccaaccttgtaatttaattatgaaaggcagtttcaatactttattcaaggacgaacatattgtttttgatgctgaaaagggaaagtttgtgatttcttaaccacaaagacacgaagcccttcgacaagcacaggatgacgcacggagttcacaaagttggctcgaaatccatatttatcaaatactccaatactgcaacctgctacctgcaacctgctatctgctacttaccacctgctatctgcctctttgcttcgccaaccacaaaagcaaccgaattggcaatattaaaacttcgaattaattttgacatcggaatggttaaatgattttcgaattgagccaaaacggcttcgcttaaaccaacgctttctttgccaaaaaccaaccaatcgccatcttgaaattcggtatcataaatggatgttgttgcgtgagaactcatcaggaaaacacgggatttgtcaggaatttgagcattccattcttcgatattttgatattcagttacatcgagatgtacccaataatccaaaccagagcgtttcagatttttatcattgataacaaatccaaacggatgaatcaggtgcaaacggctttcggtacccacacacaaacgaccaatatttccagtattgttagggatttcaggttctacaaggacgatatttaacatatttgaggttttgggttttgggttttgggttttggaattacaaatctattaattttctattttaaaattttcaacttccactacttctccagcttttaaatcatttaaatgtacgtttccaattcggactcgcactaatcgcaaggtaggaaaaccaacggcagccgtcatttttcgaacttggcgaaacttcccttcattgacagtgattgaagcccaagaagtaggtccgtgacgttcgtctcttatttttttccctctcgctccaaaggctggaatttcatttataataaaagacacacaccgtttggtgatgtatttcgtgccgttgaaaccaatttcgactccttttttcatttcatcaatggcttcctgcgtgatgattccatcgacttgaacataatattctttatctacttttttgcttcgaacaatttcgctcattttaccatcggtggtaagcattaacaagccttcggaatcttcatctaatcgtccaatagccattgttcctgctggaaaatcgtgcaattctcccaagagttttttcttgcgtttcaattcataaataaattgactcaaatagccgtaaggcttgtggaggataaaatggtggtggtggtgggacattgtttttaaagagtagaagattaggatttaatagctagaccaagcagaatgattcggatgcaccaacggaattggatttgtttttaaaacaaatcactatgggttccagttctaatcaaaataagttcctttatatcatcgtcttgcagccaaatcaaaagccaatcaggctttatatgacattcccaatgatttttgtaattcccgcttaaagtatgtggcttgtattttgctggaagtttgcctgtttttccaagagtttctactacaactttaaattcatcaaaaacataatttcttttctggcaaagtttaatgtcttttttaaattttgtagaataaacaaaactgtacattaaatccctaattttttaaataaatctttagagtcttttgcatttgttaagccaattttattttcagcttcatacattgcttttatggtttcaaagtttggagtatcacaaacctcaactcctttattttcagaagaaattaaattaactatcgacaaaagagctttacccgctttagttttctcgtttattttaagagtgattgtggtcatagtacttgaatttgaattacaaaaatacaaaattttaaatagggttcaattacttgacagtaaactttacctcaacttcattgaaataaaaaagcgacccttttgaggccgctttgaatgttttcacaacggaataatccttattgtgaattgcttcaaaattgtactgcaatgatacaacaaaagttttaatgttcgaatgaggtttcccgtaaagcagttaattttcttttgattaaatttaaagattaatttagataacgagaaaattcattataaaatatagtacaaatgaagaaaatattaggattggatttggggacaacatcaataggttggtcatttatcaatgaagcggagaatgataatgaaacctcatctattataaacactggagttcgcatcgttccgcttactacagatgaagaagctgatttcaaaaaaggaaatacaatttctataaatgctgatagaacattaaaacgtggagcaagaagaggtttgcaacgtttcaagcaaagaagaagtgctttgttagaaatttttagcaaaataaaattcattcctaccgattttgtttatgcagaaacaggttctgcaactactttttcttcttatcgattaagagcaaaatcagcaaccgaagctattaccaaagaagaattggttcaagttttattaatgctaaataaaaaaagagggtataaaagcagtcgaaaagcaaaaactacagaagaaggagatgcgattgacggaatgaaaattgccaaagaaattttcgataaaaatttaacgcctggacaatgggtttacaattctttatcaaaaggcgggaaatttattcctgatttttatcgttcggatttacagaaggaattagagaagattgtgagttttcagaatcaatttcatccagagcaaatgaatgataaattattggaagacattcaaggcaaagcacgaacagtaacttctcaatatttttcaaaaacattgaatattcctcttgctgaaaataaaggaactagagaagaaatcaaatttcaacattacaaatggagaaatgatgctttggcaaatgaactcaatttgaaaattttagcattcattattacagaaatcaataatcaaattaatcaatctagtggttatttaggtgccattagcgaccgaagcaaggaattgtattttaatcaagaaactgtggggcaatttcaatacaaacaacttcagaaaaatacacacgccaaactaaaaaatcaagttttttaccgtcaggattatttagatgagtttgaaaaaatatgggaaacacaatcgaaatttcatcccgaattgaatgataaattaaaatcagaagtaagagatattaccattttctaccaaagaaaattgaaatctcaaaaacatttagtaagcttttgtgaatttgaaaaaggacataaagccattccaaaatcgtcgcctttatttcaggaatttaggatttggcaaaacatcaataatattgaatttaaaaaaagtaaagaagtttatgctataggtgaagaactaaaacaaattattagtcaagaactcttattcaaagaaaatatgactgataatcaatttattaaatttattatcagtcaatgtaaattagaaaaagctgattattcaatcaattttaaaaaaattgaaggaaataggaccaatacagaaatttataaagcttttgaaaagattctaatttctgagggatatgatgaattggatatttcaaatttagaaaccgaagaaataaaaaaaattatcaaatctgctttttctgatttagaaatcaacactgatattttagatttcgatccaaaaattcaagaaaataaatttgacaagcaaccgtattatcaattgtggcatttgctttattctgcggaagaagatgagtttctgaaaaaaagtttgatgtctaaatttggttttaaagaaaatcacattccttttcttttaaatataaatctacaagccgattatggaagtttgagtgccaaagcgattaaaaaaatattgccccatttgatggatggacatatttatgacaaagcctgtttaatggttggttataatcattcttcttcattaacaacagaacaaaataatgacagagttttgaaagaaactctagaattactaaagaaaaacagtttgcgcaatcctgtggttgagaaaatcctcaatcaaatgattaatgtgattaatgccattatgaaagacccagcgatgggaaaaccagatgaaattcgtgtggaattggctcgtgagttgaaaaacaataatgagcaacgtagcgatatgactaaagcgattaacaaaagtactgctgaacacgaggaaatcaggaaattattgcataatgaatttggaatatcaagagtaaccagaaatgatattattagatataaactttggaaagaaacagatggcatttcactttacacaggaaaaacaatagaaccttcaaaactatttacaaaagactacgatattgaacatattattccaaaatcgcgtttgtttgatgatagtttttctaacaaaacagtttgtgaacgcaacttaaacatcgagaaaagcaacaaaacagcttattcttttttacaagaaaaattatctcccgaagaatttgaccaatttgaaaaaagagtaaaaagcttgtttggaaaaattagccgaaccaaacaaaataaactcttgatggcagataatgaaattcctgaaggtttcattgctcgtcaattaagagaaacacaatacattgccaaaaaagctaaagaaattttactagaagtttctagaaatgtaacagcaacaattggaagcgttaccgataaattgcgtgaagattgggaattggtagatgtaatgcaagaactcaattgggaaaaatacgataaattgggtttgacttatgaagaaaaaggtaaaaatggagaacgtttatataaaataaaagattggaccaaacgaaacgaccatcgccatcacgctatggatgccataacagttgcctttaccaaacctgcatacattcaatatttgaacaatttgaatgcaaaaacacaaggtgacaaaaaagcaaattcaattattggaattgaaaacaagcatttatttcgagacaaaaacaataaactacgttttaaatctccaatgaataattttagagaagaagctaaaaagcaacttgaaagcattttgatttcctataaagcaaaaaataaagtggttaccaaaaacaaaaatattactaaaaaaagtggcggaacaaatcagaaaattcaattgacgccaagagggcaattgcacaaagaaactgtttatggaaaactacagcaatatgcaaccaaagaggaaaaagtaagtggtagttttaccaaagaatacattcaaaaagttgccaaaaaagaatatcgagaagcccttttgaaacgattggaagaaaataataatgacccgaaaaaagcatttacagggaaaaatactttgacaaaaacacctatttatattagtttaaaagacaatattgtagttccagaaaaagtaaaattagtttggctagaagccgattatactataagaaaggatattacacccgatttaaaaatagacaaagtaattgacattggtttaaaaaccattcttcaagaccgtttgaatgattttggtaatgacccaaaaaaagcattcgtaaaccttgacgaaaacccgatttggcaaaacaaagaaaaaggaattgtgataaaacgtgtaactattagtggagtgagtaatgcacaagctttacataccaaaaaagaccattttgggaatgaaattttagacgaaaacaacaatccaattcctgttgactttgtaagcacaggaaacaatcatcacgtggctatttacagagacgagaaagacaatctacaagaagaaatagtttcgttttatgatgcagttgttcgcagaaatttaggattatctgttattaataaaaatcatgaaaaaggatgggaatttttattttctatgaaacaaaatgagttttttatattcccatcagataattttaatcttcctgaaatggatttattaaacccaagcaattaccatttgattagtcctactatttttagggtgcagaaattagcaacaaaaaactatttctttagacatcatttagaaacaactgtagaagaggtaaaagaattaaaagacattgcttatagaagtataagaagtacctctcccttaaatggaattataaaagtccgcatcaatcatttaggacaaattgttcaagttggagaatattaatttgagattaaaaaatcaataggattgggctttagcccattcaaataaaattagcaataaacataaagggctttagccaaacaattttggctaaagccaatttaaaaatcaattattatatccctccagctaaagctggaggcaattcaaaagctggaggcaattcaaaatgaatcaattcaaaaataatatgctattttaaataaccaattatgccttttatcaaaacctatattcattttgtttggagtacaaaaaacagaattccctttttggacaacaaagaattaagacaaaaagtgtggtatcatatcaaagaaaatgctaaagagaaaggaatctttgtcgattttattaatggatatacagaccattgtcactgcttggtttctttgggagctgatcaaactattcaaaaaacaatgcaactcatcaaaggagaatcttctttttggattaacaaaaacaaattgtgcttggacaaatttgaatggcaggatgaatattttgcagtttcagtttcggaatctatggttgataaaattcgaaattatatcaaaaaccaagaagaacatcatagcaaacaaacctttcaagaagaatatgatgaatttatgtcaaaatataaattcaacaaagaatagttttttggctaaagccatttaattattatcattttttccctccagctaaagctggaggcaattcaaaaatgagaaaacattcaaaaagatagtatcaattcagatttttgaatttaacatttttaaaaatagcaatatttcaaaatcaataggattgggctttagcccattcgacaataaaaaacaatcgagtttggctttagccaaaatattttggctaaagccattttgcccccatactatttccctccaattaaagctggaggcaattcaataaaactacaaaatgataaaaagaacccttttcttcggtaatcccgcttatttgagtaccaaaaatgagcaaatcgtaatttcttatcccgacaaggaacaagagactaaaactttggctatcgaagatattggcgttatcgttctagaaaatcaacaaattacaattaccaatggtttactggaaaaactaaccaataataatgtggcgttaatcaattgtgaccaataccacttgcctattggtttgctaatgcctcttaacggacatactgaacaaacggagcggttcaaaaatcagattaatgcttctgtcccattaaaaaagaatttgtggcaacaaactattagttccaaaatctcaaaccaagccggactgctcaaagaaaaaggaatcccgtgccgaaaaatggaactttgggcaaaagaagtcacatcgggagatgctctcaatcacgaatcgagggcagcagttttttattggcaaaacctcatcccgatagaaaattttactagaggacaaaaaggaattccacccaataatttattaaattatggttatgcaattttgagagcgattacggcaagagcgattgtcagttcgggtatgctgcccactttaggaatatttcatcgcaacaaatacaatgcatactgcctagccgatgatattatggagccgtatcgcccgtatgtagatttgattgtttgccacattatggaaactgaagatagttatgacgaattaacaatcgagatcaaaaaacaattgctgaacattgctactattgatgttttcatagacggcaaaaacagtccgttgatggtggcaatgagtcgaactacgcattccttacacgaatgttttgaaggatcagcaaggaaaattttatacccttcgtatgtatgacgaacattacacccgtttaaaccaatatagaagtttgtggatattagtctttttcgatcttcctaccgaaacacgcaaagagcgtaaaattgccagtacatttcgcaagaaattattggatgatggcttttctatgttccaattttccatatatatgcgtttttgtgccagtagagaaaatgccgaagttcacaccaaaagaataaaaaacaacctacccgaatacggcaaaattggcgtgatgcaaataaccgacaaacaatttgggatgatggaacttttttatggaaaaaaactggtagaaacggacaaaccttcacaacaattagagttgttttaatggtacaggataagaaaacagactaactcgctgtattacaccaaacaaataccacttctttttaatttcaaaataagctcataactaccaacatatcaaacgattgaatcgcgatatgttgggaattataagctaaaatacaattttgaaagcaattcacaacccagaaagccgtgatggcaaagtatatttcagttgggaattataagctaaaatacaattttgaaagcaattcacaaccaatgcgttaaatttttcgacactcacgcggttgggaattataagctaaaatacaattttgaaagcaattcacaaccaataaaatggtctttactatttaggaacgttgggaattataagctaaaatacaattttgaaagcaattcacaacttattattgggatatgactggcgatgtggggttgggaattataagctaaaatacaattttgaaagcaattcacaacatgccattaatagccgcttccgcatcttttgttgggaattataagctaaaatacaattttgaaagcaattcacaacaagcgaagtaattttattgacaactacattgttgggaattataagctaaaatacaattttgaaagcaattcacaaccaagaacaactaattagattaaccacttagttgggaattataagctaaaatacaattttgaaagcaattcacaactcgcaagaagaaatggttgagtttgatgaagttgggaattataagctaaaatacaattttgaaagcaattcacaacagggttatgtgttatggaaatctttttcaagttgggaattataagctaaaatacaattttgaaagcaattcacaacagagacggtagtatacttgctactgactttgttgggaattataagctaaaatacaattttgaaagcaattcacaactatgaactctaatcactttagccatataaggttgggaattataagctaaaatacaattttgaaagcaattcacaacaagagcgccattctttcttttaaagtgaatgttgggaattataagctaaaatacaattttgaaagcaattcacaacaataagcgataaactcaaacgatgataaatgttgggaattataagctaaaatacaattttgaaagcaattcacaacctcaatgcgtttcaggtttgaaaatggatgttgggaattataagctaaaatacaattttgaaagcaattcacaacgtaaatccgactttgttttgttgatgttttgttgggaattataagctaaaatacaattttgaaagcaattcacaacaagtgctaaagactgaatttctttaaatgtgttgggaattataagctaaaatacaattttgaaagcaattcacaacgtagtacatagaattagtaaaacgagtattgttgggaattataagctaaaatacaattttgaaagcaattcacaacttgattttgctttcaaattgatagctctacgttgggaattataagctaaaatacaattttgaaagcaattcacaacaagattgccgcgcaagctcgcaatgactatgttgggaattataagctaaaatacaattttgaaagcaattcacaactaacatttgtttttgctttcataatctgtggttgggaattataagctaaaatacaattttgaaagcaattcacaaccggctatagccgatgcgaaacaatctatcggttgggaattataagctaaaatacaattttgaaagcaattcacaaccttgtaactgaaatattctcagcgctcaatgttgggaattataagctaaaatacaattttgaaagcaattcacaaccgtattcgttcaatacattagtaaaaaaggttgggaattataagctaaaatacaattttgaaagcaattcacaaccagagcaagtcaggtttaatttggcaatttgttgggaattataagctaaaatacaattttgaaagcaattcacaactcaagtgtttaagatggtctcgatattttagttgggaattataagctaaaatacaattttgaaagcaattcacaacatagatttatcaaacaattcctttgcctcggttgggaattataagctaaaatacaattttgaaagcaattcacaacgtaagttagtagcagatgctaaataccatcgttgggaattataagctaaaatacaattttgaaagcaattcacaactgtgttatcagtgcttagttgagcaataccgttgggaattataagctaaaatacaattttgaaagcaattcacaaccatagcgttgcacagcggaattatataatcgttgggaattataagctaaaatacaattttgaaagcaattcacaacaaaattttattagatcattatatacaaggtgttgggaattataagctaaaatacaattttgaaagcaattcacaacaacgcctgtaccgtcagtaaccatactgttgttgggaattataagctaaaatacaattttgaaagcaattcacaacaacgaatacgaaatccctcaaaaagtagttgttgggaattataagctaaaatacaattttgaaagcaattcacaacttattgggcgaattaatcaaacaacaaatggttgggaattataagctaaaatacaattttgaaagcaattcacaacgtgcaaacagcacctacacgcaagttttgtgttgggaattataagctaaaatacaattttgaaagcaattcacaacccattggcaatagacgaaaccgccgtgattgttgggaattataagctaaaatacaattttgaaagcaattcacaacaaggaaaccgaaccagtctgaccacaaatggttgggaattataagctaaaatacaattttgaaagcaattcacaacacagcagtaagttcagcttggtattttttagttgggaattataagctaaaatacaattttgaaagcaattcacaaccttcttgcaataaatcataagtgtgaaaatgttgggaattataagctaaaatacaattttgaaagcaattcacaacaagcacgaacaatttaatgaagcgtttgaagttgggaattataagctaaaatacaattttgaaagcaattcacaacgatgggagaaccttgtatcatcattcacgggttgggaattataagctaaaatacaattttgaaagcaattcacaacaagcggtgtaaacttacgattatttattgggttgggaattataagctaaaatacaattttgaaagcaattcacaactaatgagccgcgccacaaaatatgatttagttgggaattataagctaaaatacaattttgaaagcaattcacaaccgtccgcaattagtaaacaacgctaatgatgttgggaattataagctaaaatacaattttgaaagcaattcacaacaagcgaagtaattttattgacaactacattgttgggaattataagctaaaatacaattttgaaagcaattcacaacataataaagagtttacctttttgcctgtgtgttgggaattataagctaaaatacaattttgaaagcaattcacaacttagcgtctgaagctattccagcattatatgttgggaattataagctaaaatacaattttgaaagcaattcacaacactcccgaagctttaaagaaagagttccttgttgggaattataagctaaaatacaattttgaaagcaattcacaacatagaagactgagcggttctggagcgaccagttgggaattataagctaaaatacaattttgaaagcaattcacaaccgagtaacttcatagctttatacttttaatgttgggaattataagctaaaatacaattttgaaagcaattcacaacctgcaaaaggtttatcaccttctggctcttgttgggaattataagctaaaatacaattttgaaagcaattcacaacgaaaaatcgttgcaacaaaatcggaaggacgattttccgttgtgaattggatgtttaagattagcaaaagtgctgaacgacatagtttacttcaaaaatagattcaacgctgcagtcctgcttcggtgggacttttttattttcttcctaaaaaaatcacaccgctacaaaacattagatccttctccacaaaccaaatgctatgttaaatgattgcattaccatagccaaatagaatatctttataaaagttgacactattaatcctaaaacaaccactatggaaaataatgatctaggttcaaaaaagatgaacaataagcaaaatacgccagaagaattcagcaatgaaatcctacctgaaaattatgatccttcagcaactacacttgtacccgaagtggaaaccaatagcaatggagaacaaaaaattgtatacagagcacgaaatgttgatgcaaatctagaacaaaacaatgatgaaaataaagaaaatccgagttgtagtgttgaaattttttcagataaagaaacccaaagaatgattgaaaataaggaccataattcagatattacggcacatcgatatcccaattcggatcccgataatcacgaagatcgaggaaatatcaaattagacgaataatttttttgtttttttgagaagccaataagaaagaaattttttgttggcttctttttttgctttttaaacattcctaaatattatttaaaaaactctctaatattttcttacttttactctccacaaaaactctatttttatgtcaaatatgcttccgtttttactgctttttattgttgcactcgctattggaatttttattggtaaactcctattttcggcacgatttcaatcggaaaaaattagtttggaagaaaaattaatcgcttcaaacaaccaaatcaaccaacaaaaagagcagttttcaatagaaaaaaacacattcgaaaagcaactggaagtttcaaatactgaaaaagaaagcattagaaatgaaaaggacagtttggctattcaattgacaaagaaagaagtcgattttgaaaatctttggcaacgcaacaaagaacaaaaagaagaagtagaaaaacttcaggaaaaattcaccaaggaattcgagaatttggccaataaaatcttggacgaaaaatcaagtaaattcaccgaacaaaacaaggagaatatgaaaaatatcttgtcacctttgcaagataaaattcagttattcgaaaagaaagtcgaagatactcacaaggaaagcattgattatcatgcagctttgcgccaacaaattctgggtttgaaagaaatgaatcttcaaatgagcaaggaaactttgaacctgaccaaagccttaaaaggcgatagcaaaatgcaaggaaattggggagaattgattctagaacgcgtgctggaaaaatcaggattagaaaaagaccgagaatattttgtgcaacaatcccacaccaactcagaaggaagtagagttttccctgatgtcgttatcaatcttcctgatggtaaaaagatgattgtcgattcgaaagtgtccttaactgcttatgaaaaattcatcaatgaagaagatgacagcgtaaaaaacggttatttaaaagaacatgtcaattccatcaaacgtcacgtagagcaactaggcgaaaaaaattaccacgatttataccaaatagaaagtcctgattttgtcttgctttttatcccgatggaacccgcttttgccttggcgttaaacgaagacacgactttatacaacaaagctttcgagaaaaatatcgtgattgtaacgccttctaccctattggcgactttgcgcactattgacagtatgtgggccaaccaaaaacaacaggaaaatgcttttgaaattgcccgtcaagccggagctttatatgataaatttgaaggttttgtggccgatttaattaaaattggaaagaagattgacgaaagcaaagtagaataccaaggtgcgatgaacaaactcgttgacggtaaaggaaacctcatcacgagtgtcgaaaaattaaaaaaaatgggagccaaagccaagaaagcacttcctgacaacattttaactagagctggaaaagacgaaaatttggagttaaattaaaccaccttgggacagagccccagaggtattagagaaatatcagctacggattcacagattttcaaaaatatttttaatctgtgactcgagcaataacgaacaggcgaagcaatctgtagcaaaaaaaccgaagcgaggaataaaacataaaagaaattaaaaaaactatatgaaaaaatttttagtcattactattggaattctggtattattaactgtttgctactttacatttttgtacaatgcaacgtatagcgagggcattcgttcgggagaattgataaaatttagcaacaagggaatggttttcaaaacctatgaaggggaattgagccaaggtatttcgggtgcccaaatttttagtttctccgtattggatagtgatgaaaaagtcatcaaggatttgaaagcattggaaggtcattatgtgaaattaacatatatagaacggtataaaactttcccttggtggggagattccaactattttatcactgggataaaagaagagaattctccattcaaaataaaataaattttctaaaatattagctgctctatttaagaattattcgaataattcggtatctttaggtaattaaattggcagcaaaatgaaaaaaatcatttcaatccttctattcttactagtccataattcatttgcccaaaaagaaatgacaacggctaatggtgtcatacattttgaagcatcggtccctttatacgaagaagttacggcaacaaacaaaactatttcaagtaaattaaatatagtaactggagctttaactagtgtagttccaatgaaagaatttcgttttaaattgtctttaatggaagaacattttaacgaaaaatacttagaaactgaccattatccacaagctacttttaaaggaaaaattgaaggttttaatttgaatatcatagactcaaaccccaaggaatttaaactgaaaggagaattaaaaatacacggcaaaataaaaaaaatatatacaattgttgcattaaaaaaaatagaaaacaaattggaaattgtttcaaatttcaatgtgaatattaaagattacaatataaaaattcctgaaatattgagtatgaaaatagcagaaactgtaactattcgaactgtcttttgggttcaataaaatcatttaccaatacaatcctcaagagccaattctagattattaaattgaaattgaaatcctgttttttcgattttttccgaagaaactcgtcgccctgccaaaataattaatgccatttcgcccagtaccatttgtatcaaaaaagcaggaactttgggcaaccacagtgaatatccgtagcattttgccaatgttatcgaaaagatttcgttgtttgtattgtcgttgatggccgcattgtaagcaccggacatttcattgttttttatagcttctagataaatggagcacaaatcatcaatatgaatccaaggcatgtactgttttcctgaacccaaagcagaacccaatctgtatttaaaaattggggctaatttctttaaaaaaccttcgtctttccccaatactaatcctgttctaatttttacagtacgaattcccaaactcgcaattgtatctgcagctgcttcccatttttgacaagttgaacctaaaaaatcattaactgctaaagtgttttcggtacaaatctcggaaccattaacagcaccgtaaatcccg

SEQ ID NO: 1548 - DNA, 24041 bp, synthetic construct
  misc_feature 1..24041: note = Synthetic
  source 1..24041: mol_type = other DNA
ctaaactcaaaaaatggaactcaccctacaaggcaaaagtcttgtttttgctaaaaacgagttatttaaagctgaatttagagttctttttttccagtttaaaattagcagcctaaaaaagacctttcttaaaaggctttcttttggattgtagaaaaggaaaaattgaagattttaacgcaaaaaagaggttttttcacagcctgacgttccgccgcttctcgtcagttgcgaacttcggaacgaattattttctgataaagataaaaaatcttgcgaaacggaaacgtgaatttaccacaaaattcgtaattgcgagaaacggttgttatatgctgtacttaccaatcaggtttaaatttcagaaacgatttcggcatttccatcgctttatatgttgatatataaccatcattttctaattcaaaaatatcatttgaaattctgttgaatttttcttttataaaacattgaccacattgtggatttttaaaataaacttgaattataagtttctcttttttgtaattatacaagtaacttttagctttttttggattaaaagaattttcgtcttcaaaatctacatcgctaaattcagcaactctgccgtttttgtaaaactttaaataatttgctttgtaacctggaaaatttactggttttctgaaattgtctgttatagaaatttcgtaatatattttcgaagtatctattattctataaacagtttcgtctgtatttggttttattctttctatgttaaatttcactctgtctctaccaaactcatttctataggaacaactagttaagaaacatattgaaattaaaataattatttgtttcattttcttcttttttacaggatttttatagtattccatatgaagtcccgctactaaagcgggtttaggactaaattaagcccattactcgggttttccaaatcctcccaaatacaaaactaactttccattaagccaatagcctaaatccgttgtagtggctactggcagtagtggttttcaggcgattgatacaggatgctaccaatctggttttgttatattgacattttttggaataatttccttaaaaaaatatgattttatttctgcatctgtataggtttttgtcaaaatcattgtgtcattttgaacagacagtatctcatttgttaattctgctgcgttcatattagaattataaaactggacaataaaatctttaccattaaaattataaaaccccatatgagctttcttagcttcgagtgtcggatcttttttaaaatctatcaaataactatcaaaccaagcaattcttccattggaataaaatttataataaaagggttgaacagaaccttgacttacatttattcttttatccttgataaatttataaatagaatttgtatcaataattgaatacgcttcatcgtttgtatttgcttcaattttatattttgatttactatatctatgaatgccaaactcattttgagctacacaggaaactaacaataaaaatataaagaaaaaaaatactttcatattcatttttgtttgattttgtctttttggcaccattactgccaacgtcccgctactacagcgggtttgggactaaattaagccctattttcggatttaccaaatcatcccaaatacaagaccatttttccattaagccaaatgcccaaatccgttgtagtggctgttatatgccgtttttatagcacccaaccgccttcagtattttgtttgtaattacttttcgaatgttcatagacttttacacctttgtcaattaaagctttatatttcttatgctcggtccaaaacaaaatatttgtcatttttaagttaggtaattttaaagcaatctcaaatagtttgtctagcaataaatttctgtttgatgctttaaaattttctgggaatataaacaatagttcttcaaggttttcgagagatttaatttctttgatgttttctatctttgataaattttggatttgtatttttttcaaactttttaatccttgaaaacttggcaaagtatccatagttgctaaaccttcaaagtgtaaaaattttaaattgataagaccattcaaaaagtcataactttcaatttgtctcactctacttatgcctaaatattctaaattttttaattcaaataaagattctaatgattgataacttccaaacattaactttaagagcctcaatttttctaaattgctaatccaatttacatttttaagttttactccccttaaattcagagaactaatttgtgtcaaatatttaatgttttcaattccctttttcatcccatctatattaagaatttctaaattcttaaaagttttgatgaaatctatattaattgcaattgatttcgtttcgcctaaatgaagtttagtaagttgcgataagatttcaataggtttaaattcttttgttaaatatgagtctactccaaattttctaacatttggaattttattaaggaaagcaaagtcaattgtgtcgtaccaaaatatcgtcaacccaatttcgggatatttttcataaaatttatttaaagtttcccaagttttttctgatggatttttaaaagaataaaattgtaatgagtgtatatttttctcttgaattagtatttcaatatctggctcaaccaagtctttatagatattgatattaccgctaaaatttccccacttatcttctttttttaaacttggtaaattcatagtctgttgttaaaatggcatataactagtgtatatgcgctacaaagtagcgcatatagatcttattttgggtggataggcgctacttagtagcgtattacattcaaatatacattttaatccgttgggtgtaattaaattgtttaatttttaatattatttatagatgtatcaaagacgaatttattaatatattaaaccaatgttaatgctgttatttttgctaaaattcttgttttaaaaccttcaaaagttttatcataattgtttctaattgtgaactggtcgcatagttgtgaaaataatgtttcaattctttttcttgatttcctaaagatataaggttgtggcttgtaatctttttgattagttctttttggtgtttcaaatttgatatttacagtttgaaacaaatctaattgaatgctttgagataagtaacctctatcacgaagcaatacacaatcagacatttgttgttttatgttttgcaaaaaatgaacgtcttgaacttctgcttttgtaatattcaatgattgaaaaacttaatttatagaataaactccgtgcaatttatatccgtaaaaccagttgttttgagaaacacaaaaaccttttgaaggagcagtttcaaactcatttttacagattttaattcttctatgacgtgcaaatttgcaaatctccaaaggcatactatccacgatgaaataatcttcaaattctaaaaacctagatgctaattttattcttacttcctctaaaaataaaaataattttcgtcttcttttattgaactgacttcgctcaattaaattaggaatttgttgcttatcaatctctttgaataaggaattctctttatcaatagacataaatccagctgttaaactcaatgcaactactcttaaatcagacattttttgttttctgccaaaatccgatttatgctctaatttaccattcaaagaacttataacttctaaaactctaaaataattttttactctatttgacttagatattgggtgttttgcgacttcaagatactaaatttcagcatcttgaccaatatctaatcactttattttattccaaataattacacccaacgggttattttattaatcaactatgtatttaataatcataagattatgacagtaataaatgaaataatataaatactcgtttcaaacaatagcgttattaataatttttcagttcactctttataaaaccgtccaaatccgctttctttattttaaaaattttctctaacgatagtagcagctcgtcattcgttttaccggagttcatcaaattaaacaaaccttctttaccatacttttttaaagttatatcacataataaggcacctatagtgtaccacaatgaggttgtgtcatccaaaatatagtgttctgatttattaaaaagctcttcataaacatttaaatccttttcattcaagtgctcttttaattttaaaatatgatcctcaaatttaattccttttgaacctccaaagtaagtagctaaaccttcatctactattttatgaattttatgaaaatgttgataggtatataaatgaacgacttcatgcgggtaaaattcggaatcatttcctgcaaaaattagattatccgcagggaaagtttcaccaccaatttgattttggtcaaccatcatgctatcaaagtcaaaacctctaatttccttgaattgcttcatatctttactcaacaaataggtaaatttcattatatcttcttcaaaaaaaagtgccatctttttattaaaggttaccatttttcttgctgttttcctatttaattcatggtcttgatgaataacatattttatttcattaacattaaatgttttaaaatcttttgtattacgatctaaaacattctcaaaaatgatttcatttttgttgttaaaagcaataaagttatagactgcgtaaagattaccaaaattattattgtttttaatccatgcaactttcactaaacttctatgatcgtcaatattgtttatcgataaaagtgtcattttatgatttttcgcatttttaatgacatctaaaaaatcatcctcaggatgcttaaaatatttactgtcgccccaaaaagcattcataccattatcttctgtagtagcgttgatgaattcataaaatttatttaagacagcagtattgtgatcactttttaaagtataattcaaaaaaaaattatttttttcttgagaataaccatacggaactgagagaaaaaatgagagaaaaaaaaataatttcattgtgaattttcataaaattaaaaagctacttcataacgaagctaaaataaaaaaatttatcgcaatgctaacgaaagtttaaccggatttcacaaagaaagttgtttttaagtaaaacatggtaaaatacaggatatttaaattatcaaaaaaaattaactacaactttagtcttaatcaaactcatacaagcatgcagttggctttataatttgttttagcctttcatcatctctaaattgtgtccaatctaattttaaatagtcatgccaatcactgaattttatttttgaagatttgaaaacataattttttgctctatttttcaatgaagcatcttgttcttttatctaatttttttgtcactattgtgtttaacttaaatccctacattttcagaccatcataaattgcttgtgaaaagacgttatagcaaacgaaaattaaaagtagtttaaaaggaaacttcataagttattctatttttattcataaaaaatgcaagcaggaaagtaattattttctaaaacgccgctattcactgcaccgtccattacttctctaatcgtttgaattaaaacaccttatctacaatttaattctgcagcagtgaacagaatcaactggtatactctcggtgacagtttaaaatttaaacacgtgaataatttttgatgtaagctataattaatctctccacctcgttgtaactcattccaaagactctttctaggactgattgaaaattatctttgttgcaattgtatagttcccatattcctttttgaccgtgtttttcaaatacaaatttacaaataacccctccaataacatataagatattattatcaaactcatttctaaattgaaacgtcattatatcttcaaaagtaattctatctttcttttgaaatgatttagatacactttgtagagcttcctcaaaagtttcatttgcactaggacctgcaagccaggtagcaagcccctcattaatgatcataggacaatgaaggcgcggatctttttgatacggaaacaacatgtgtacaaattcatgcggataattttcagaaccgtaagaggtgaaaatttcatttaaaggcgtcatggtctgacctcccatgtacgacatccaatactcaaaattataaagtctacccatctcgtcagaatttggcactaaataataagtaaatggctgtattttaatcttaaattgttttgcaattttttcacagaaagcaatggctttttccgcttcttttttattaaaattacagtctggatgcacaatgtaatttataaatttatgacggtattttttccagtttcgagtgtcatacgaaattacattttctaatttaaattcaccttgtgagtttctgactgcatacaattttgtaatgcaatccggtgtaaattttttatattcctgatctggattggctactgcaaaaattgtttttatctggtatctgtttactgcaatactgtctatctgcagtattttaggaatttaatatcccaagtattgatttgacttgtaatagttgaacattagattagctgctctgtcaactcttaaaatcttactttttaaataatattccgtttcctcttctttccaatttggatttttgtaaatactgtcgggcctcgaattcaaataatttttgtacagttggtatacggctttcacaacaactttcgaagtatcaactctcgcggaaatatcagggttaatagtttgagccttgctagtaaaactaatcattcccaataataagtaacagataaataagtatttcatggtgttttttggtcttttatctttgataacgaaagtgtattatgtttaactatttgaactttcgttccatatttatttaaaagatggaaatctccaattgtacgtgttgggttaactgagaggtggtcttattacaactaaaaacccttgacaaacgttgcctttgattccgttaagcattgctatcatctctttactttatcaaaatttctacattaacagtaatgctggaaactattgttgattttcaagctttaaaagcaactaatcgcgtattcataaagcttatttattttcaactaatagatacactaaaaaaaattcagaaattttataggtcttataccattctttcacatcaatagtaccctttgaaacttcgcaatatcctaaatcaccttttccaggatcattatttggtggtgttattaacccaatctgcgtctctttaccaatctgaaaatcaatttttccgtcaccgccagttacttcacgaagtaaaaatgtaccgtcatcaaaacttttgtttatttcaaaaatctgcttgttaaaaaaatttgaaaagaaaaaggcaattttctccttattcaaaatgtgctgtgtaataatagaaaatttaaattcttttccaattttgggaagtccttccactctagtatcaatcacgactttatctttttcaattttcccgttcttatacttgcgtattataatcttgaagtgtttatccattaattttgtagtatttgaaaaactaatatttaatttttcaattccttgaaaagtctccattacaaattcttttgaaccaaatgttgcatgatcataagctgaaatcattttaatttcattgtcttcaacaaactgactgtagcaggaaaaggtcagaaagaacaaggctgtttgtagtattctcatcattttttaattttttaatgcgtacgtgttgttttaggtcaccctactattgtaattattttatttttttactttaatctcttgccagattattactccgcttttatcttttgtttgtaaaagatagattcttttattgaaaactaaagtattttgtttttaacagacagtattcttttctaacctattcgtaggaattgcaagggataaatcttcattttgtataaggcagcaaccctaattggataggctatttttttactgcttgtttttaaaatttgctatttgttgctcccacagtgttggtataaaagcgttcaaacttcccatttaccgttaagcaacgagtaaatatatgggatttaaacttacaattaaaattctttgtgaaaaattggttaatggctcttaaaaaaaaggcaattactgaaaagcgttaaaaaccgcttttagagctaccaaatgacaagccaaacttccacatactgttttactagattttcatccaccaaggtaaaaatcgattgcagcttgtaggctaaaaaaatcaatcactatttttctcaacgctaagggcaaagtttaatcataatatacgctgacgatagggacctattagcccggtattgataattttcgaataggaaacccataataaatccaaaagctaaagtcaaaaatttaaagtctctacccatcaaaaacaatattctaaataaaagttaaaatacttattatcaatttattattgttttattagttatatctttgagtgtggttttgattgatcacttgagtaaaaccatctgagaagagaagcttattcaaatagttatttcatacttaacggcatgatttgataaatggtgaatcaaaatctacaatcggaggccctttaaaaggcctcctttttttgctatatcctattcgtcagatttaattgctgaggtactatagatttttcgagactacaaaatagaattagataaataatgtacgttcttcgggtctctgctattatcaaaaaaagctggcctcccctatttacttcgcagctggataactcctctgaactattttttgcataaagtctaatgaaagtaatacgtaagtcacaagtactcacttttacttgtcttcgtcaacaattagtttcaacgaattgatgtaatccgtatcaaattcaatcactctaattttcttgggcttgaaactcatttcaccgtcaaactgtccttctgttcctaaaaaatcgatgacaagttcttcttcatttagctctatgagtttacctaaataaaccgctttgtcagacttagtcgcaatttgaaaaatagtatacttactggctaaaaagtggatgatggaggacaaatcctgtagcggaattatttcttcggcacttgtttttaaccctttaaatttaattaccctttcggtgaattcatgatctttgtcctgaataatggccttcacatttttatttttcaagatcgtgtagccatcaattataaaatcgaccggattatttttcagtaaaatccaatcttccgtccaatcaattagaaaaccactaaaattttcttttttgtcttcaaattgtattgtaattaattgacgtatgtatttttccattttataatttacagtttaaaaaaggatttttttaggtgaaagttacacaaagatacaaggtaaaaagcaatcaataaaactaaaatgaatcgaaagtaaaagtattagatttattcaataattaaaattattttaaaaaagagttacatgttagctgctaaaaggaaaaaaatcaagaagtattatctatcaccgttagaaacatagaaacaatagtacgtgatactgtcgtggtaaatttagattcattaaattaataatagttgataggcaaaagactttatttgattttgtgcattatcgtctataaagatattgaccgtaaaaaactgagttaaatctcaataaaaaagcgacccttgtggggccgctttgaatgttttcacaacggaataatccttattgtgaattgcttcaaaattgtaatgcaatgatacaacaaaagttttgatattcgtttacggtttcccgtaaggatgctaattttcttatatttatattagcacttatttttataatgcaatggacttaagtacaaaatacatacaatgaaaaaaatattaggattggatttaggaactacatctattggatggtcttttattaatgaagctgaaaatgataatgaaacatcatcaataataaataccggcgttcgcattgttcctcttacaacagacgaagaagccgattttaaaaaaggcaatacgatttctattaatgccgatagaactttaaaacgaggtgcgagaagaggtttacaacgtttcaaacaaagaagagatgcattattggaatcttttaataaaataaagtttatttcttccacttttatttatgcagaaacaggaaaagaaactactttttcatcatataggttaagagctaaatcagcaacggaggccgttactaaagaagaatttgtaaaagttcttttgatgctgaataaaaagcgaggttataaaagcagtagaaaagcaaaaacagccgaggagggagaagcaattgatggaatggcaattgctaccgcacttttcgaaaataatctcactccagggcaatgggtttataattccttgttaaatggcggaaaatacattcctgatttctatcgttccgatttgcaaaaagaattagaaaaaatcgtgcattttcagaaacaattccatcctgaaagtataaatagcaaattacttgaagatattcgggggaaatcaaggacgcaaacttctcaacattttaataaaatattaaaaatagaacttactgaaaataaaggctcacgagaagaaaccaaattgcaacattacaaatggagaaacgatgctttggcaaatgaacttgatttaaaagttattgcatttatcattactgaaatcaacaatcaaataaatcagtcaagcggttatcttggagctatcagtgaccgcagtaaagagctatatttcaacaaggaaactgttggacaatttcaatacaaacaactccaaaacaacacacattctaaactaaaaaaccaagttttttaccgccaagattatttagatgaatttgaaaaaatctgggaaactcaagccaaatatcatcctgaattaaacgataagctaaaatcagaagttagagatattaccattttttatcaaagaaaattgaaatctcagaaacatttgattagccattgtgaatttgaaaaaggacataaagctattccaaaatcatctcctttatttcaagaattcagaatttggcaaaacttgaataatattgtcgttaaaaacgaaactactaaagaaccccatttgttaagtgaagaattaaaaaaacaaattgccgaagtacttcagtttaaagatggaatgactgacatccaactgatggatttttgcgaattgaaaaaaggcagccattccgttaatttcaaaaaaatagaaggaaacagaacaaatacggtactttacaaagcttttgaaaaattacttgaagttgaaggttatgaaatggatttctcaaagatgagctcttttgagattaaagaagctattgtaaaaatatttgaaaatttaaatatcaataccaatatactcgattttgatccaaccattcagggaaatgaatttgataaacagccctattaccaattgtggcatttactgtactcctcggaagaggatgaaaccttgaaaaaaagtttaatgagcaaatttaattttaaagaaaatcacgttccttttcttttaaatataaatcttcaagccgattacggtagtttgagtgcaaaagcaatcaaaaaagtattgcctcatttaatggatggacaaatttatgaccaagcttgtttcctttcaggttataatcattcctcatcattaactaaagaagcgaatgacattagaattctaaaagataccctagaattactaaagaaaaacagtttgcgaaatccagtggtagagaaaatccttaatcaaatgattaacgtgattaatgccataattgcagacccaacaatgggaaaaccagatgaaattcgtgtggaattagctcgtgagctaaaaaacaacaacgaacaacgtagtgaaatgactaaggctattaataaaagtacagccgaacacgaactaattagaaaattattacatacagaatttggaatccatcgtgtaaccagaaacgacattattcgttataaactttggaaagaatcagatgggatttcactttatactggaaaacctattgagccatccaaattattttctaaagaatatgatattgaacatataattccaaaatcgcgcttgtttgacgatagtttttctaacaaaacaatttgtgaacgtcagttgaatattgacaaaagcaataaaacagcctattcttttttaaaagacaaattatctcctgaagattttgaccaattcgaaaaaagagtaaaaagtttatttggtaaaataagtagaacgaagcagaataaacttttgatggcagacagcgatattcctgaaggctttattgaccgacaattaagagaaacacaatatatagccaaaaaagccaaagaaatccttttggaggtttctagaaatgtaacctcaacgattggaagcgtaaccgacaaattacgtgaagattgggaacttgttgaagtgatgaaagagctgaattgggacaaatatcataaactgggattaacaaaagaggaagaaggtaaaaacggagaacgtttatacaaaatattggattggactaaacgaaacgaccatcgccatcacgccatggatgccataacggttgcatttactaaacccgcttatattcaatatctaaataatctgaatgcacgggatataaatactaaaaaaggaagctctattttagggatcgaatctaaatatttaaaaagagacaaaaataataaattgcgttttatagctcctatgaaaaactttagggaagaagctaaaaagcaacttgaaagtattttgatttcctacaaagccaaaaacaaagtagttaccaataataaaaacagaacaaaaattaaaggtggttgggcagaacctaaaactcaactcacacctcgtggacaattacataaagaaaccgtttacggaaaactgcaactatacgcaacaaaagaggaaaaagttagtgccagtttcacagctgaatatatcagtaaagtagcaaaaaaacaatatcgtgaagcattattggttcgattatttgaaaacagtgacgatccgaaaaaagctttcacagggaaaaatgccctgactaaaaatcctatttatttggatccagaaaacacagaagtagtacctgaaaaagttaaaatggttaggtttgaagataattataccattagaaaagatattactcccgatttaaaaatcgacaaagttattgacattggattaaaaactattcttcaaaatcgtttgaacgaatataacaatgatcctaaaaaagcttttgtcaatttagatgaaaatcctatttggcaaaacaaagaaaaaggaatagccataaaaagagtaactattagtggcgtgagtaatgcacaagcgttacatactaaaaaagatcattttggaaatgaaatttttgacgaaaaaggcaatccaattccagtagattttgtcagtactggaaacaaccatcatgtagcaatttacaaagatgggaaaggaaatttacaagaagaagtagtttctttttatgatgctgtagttcgtcagaacttaggattatctattatcaataaaaatcatgcacacggttgggaatttatgtttactatgaagcaaaatgagttttttatatttccgacggattcttttaatcctcaagagattgatttaaaaaacccaaataactattatttgattagtcccaatatatttagagttcagaaaattgcaactaaaaattatatgtttagacatcatttagagactatcattgaagagaaaaacgaattaaaagatataacgtatagaaatattagaagtacctctcctttatcaggaattgttaaagttagaattaatcatttaggtaaaattgttcaacttggagaatattaattatgataaaaagaacccttttctttggcaatcctgcttatttgagcactaaaaatgagcaaatagtaatctcttatcctgacaaggaacacgaaacaaaaacagtggctattgaagatattggtgttatcgttctggaaaatcaacaaatcacgattactaatggattattagaaaaactaattcacaacaatgtagcattaatcaattgcgaccaatatcacctgcctattggtttgctaatgcccctcaacggacataccgaacaaagcgaacggttcaaaaaccaaattaatgcttctgctccactcaaaaagaatctgtggcagcaaaccattagttccaaaattatgaaccaagctggaatattgaaagaaaaaggaatcccgtgccgaaaaatggagctttgggcaaaagaagttacttcgggagatgcactcaatcacgaatccagagctgcagtatattattggccaaacctcatcaaaatagaaaattttactagaggacaaaaaggaatcgcccctaataatctgttgaattatggttatgccattctaagggctattaccgcacgagctattgttagttctgggatgctgcccactttaggcatttttcatcgcaacaaatacaatgcgtattgccttgctgatgatattatggaaccgtatcgcccgtatgtagatttgattgtatgccatatcatggaaactgaagatacttttgaagaattgaccattgacattaaaaaacaattattgagtatagccagtatagatgtttttattgacggaaaaaacagtccattgatggtggccatgagcagaaccacacattccttacacgaatgttttgagggaacggcaaggaaaattttataccccgtttatgtatgatgaacattacacccgtttaaatcaatatagaagtttgtggatattagtattttttgatcttcctacggaaacgcgcaaagagcgcaaaatagccagtacatttcgtaagaaattattagacgacggcttttctatgtttcaattttcgatctatatgcgattttgtgccagcagggaaaatgcggaagtacacactaaaagaataaaaaataacttacccgaacacggcaaaattggcgtcatgcaaataaccgataaacaatttgggatgatggagcttttttatggaaaaaaattggtagaaacagacaaaccttcgcaacaattagagttgttttaatctaacaggattagaaaaaagtataactcactgtacaacaacatataaacacttcttttttttaatttcaaaacaaacccataactgccaacatatcaaacgattaggtcgaggtatgttgggaattataagctaaaatacaattttgaaagcaattcacaacaatcagtttgcttatggattgaatcttaatgttgggaattataagctaaaatacaattttgaaagcaattcacaacggtcccaatagttttttttataaatagaccgttgggaattataagctaaaatacaattttgaaagcaattcacaactgtttcaactgattttatcaactgggacaagttgggaattataagctaaaatacaattttgaaagcaattcacaacggcgaactttagagccagcacaagtagagcgttgggaattataagctaaaatacaattttgaaagcaattcacaactatgctggttgtacaagtgatattttccaagttgggaattataagctaaaatacaattttgaaagcaattcacaaccatgaagatcaacacgcttcaatgaaggttgttgggaattataagctaaaatacaattttgaaagcaattcacaacaatcaacttgaaagcttttaaaggaactagttgggaattataagctaaaatacaattttgaaagcaattcacaaccggaaaaataaaacatgacggaaatcccgcgttgggaattataagctaaaatacaattttgaaagcaattcacaacactgcaacggatggttctgctgcaacttggttgggaattataagctaaaatacaattttgaaagcaattcacaacacggcttccaaaactgtttcttcggtcacggttgggaattataagctaaaatacaattttgaaagcaattcacaactcttttcgagcatactgttttgtgtcaaccgttgggaattataagctaaaatacaattttgaaagcaattcacaacgctgacgtggctacggtgttgacgaacgacgttgggaattataagctaaaatacaattttgaaagcaattcacaacctttgattgcaattggtacctatgcaaaagttgggaattataagctaaaatacaattttgaaagcaattcacaacccgtgttaagaaacttaacagggtgcactgttgggaattataagctaaaatacaattttgaaagcaattcacaacgaaactgattatcgacatacaattcattctgttgggaattataagctaaaatacaattttgaaagcaattcacaactaacgattactgctaattttgaaaatgctggttgggaattataagctaaaatacaattttgaaagcaattcacaactgtacagttcctttgaaatctaaatttttcgttgggaattataagctaaaatacaattttgaaagcaattcacaacgaataggttgtatggatgaagactttttaagttgggaattataagctaaaatacaattttgaaagcaattcacaacttactgttaagaggttcgcagcctcacccgttgggaattataagctaaaatacaattttgaaagcaattcacaaccgctatgatgctattttagcggcgactttcgttgggaattataagctaaaatacaattttgaaagcaattcacaacactcgtatacaatggggtcaaagtttatatgttgggaattataagctaaaatacaattttgaaagcaattcacaactaaatgatcgaatggcgcttcatctgataagttgggaattataagctaaaatacaattttgaaagcaattcacaacgttgaaaccgcattggctgcagcatccgccgttgggaattataagctaaaatacaattttgaaagcaattcacaacgcttgctccttccaaaactattgatctattgttgggaattataagctaaaatacaattttgaaagcaattcacaactaaccgatgcaaacggtttggccgttgctagttgggaattataagctaaaatacaattttgaaagcaattcacaacaaacacatacacttatattaaaacgtgtaagttgggaattataagctaaaatacaattttgaaagcaattcacaactcagttgaacgacaagaaaaagcgtttttggttgggaattataagctaaaatacaattttgaaagcaattcacaactcacctttcaattcaatgtttaaatattttgttgggaattataagctaaaatacaattttgaaagcaattcacaactatgaagatatgaagatatgaagatagatagttgggaattataagctaaaatacaattttgaaagcaattcacaacttacgccgccaccacccctgaccggcgatcgttgggaattataagctaaaatacaattttgaaagcaattcacaacgaagcgggaaaagacgctgttagaaaacgagttgggaattataagctaaaatacaattttgaaagcaattcacaacggaaataatttagtcttttcatgggttttagttgggaattataagctaaaatacaattttgaaagcaattcacaacaaggggaaaatacttttcttattgctgtaagttgggaattataagctaaaatacaattttgaaagcaattcacaactttacgtcagtaaactttcgcattaagcgagttgggaattataagctaaaatacaattttgaaagcaattcacaactacctaagccgttgcactcgatggagtactgttgggaattataagctaaaatacaattttgaaagcaattcacaaccattgaatcttcttaatacttgtgttcctgttgggaattataagctaaaatacaattttgaaagcaattcacaacgttccgattgacaaagtaaattcagttttgttgggaattataagctaaaatacaattttgaaagcaattcacaactcccaacaacaacaggctcaactgacggctgttgggaattataagctaaaatacaattttgaaagcaattcacaacaaggactacctgctattgaaatcaatgagagttgggaattataagctaaaatacaattttgaaagcaattcacaacgatacagtagaagcacaaaaaacagtaaaagttgggaattataagctaaaatacaattttgaaagcaattcacaacgtccgtacatcgtaactgaaagaagtaatgttgggaattataagctaaaatacaattttgaaagcaattcacaacggattagatgtttcattaaaaaaaagaatagttgggaattataagctaaaatacaattttgaaagcaattcacaacctgttcgggttgttccttcaatgcttgcttgttgggaattataagctaaaatacaattttgaaagcaattcacaacagttgagcatttaccgttatttttatagaagttgggaattataagctaaaatacaattttgaaagcaattcacaacgtttttgatagttcggataattttgtaaaagttgggaattataagctaaaatacaattttgaaagcaattcacaattgcctcagtactccctttgattttttacactcttcctaattaccaattatccaattagaaaatcacttgcacactaaaatattttagtcttctgtatcttgctcccgtttcattgcatttagggattcaaaatcggtcctttctagatctatgatttttttctcttgggattttctgtttggacagggcagctagaccggcagttctagccaacatttctccataatggattcttatagtcttataaacggcaaccattagaaattaaaagccaaacttccccttttaaggacatcttttatctccaatgttggtattaaatacttttatataaaatttaaataaacaatcaccatgaagcaatttacttttgatcaaatacctataatgatgaacaaaattcatgataaattggagcattgggaaaaacttattataggattctctattgtacaggaaaatatggactaaattctaaacattcaagaagcatcaaaacttttaaatctatcggtattaacaatctatagtaaagtatgtaaaaaaggtaatccccgtcaataaacaagctaaacgcatttatttttacagaaatgagttaatgaaatggattaagtccggtcgagtaaaacttatttagaaacccaaaatgatattgaaaagaggtcaaaaatctaaagttaatactagatttttgacctctttactttttaaccctaatctctaagtattcccctgcttatctaaaagatgccatggaacaattggagggacaaattgcttccactaagattgcaatggccagactctcttctcctcaattgtattatgtagtatcgggaaacgactttacattagacattaataatccagccgaaccaaaaatagtctgcatgggtaataatccccagaaaatacaaatttatggtgccgttttgtccttatatgtgtcttgcttggtaaaattggtgaatcaaaaagggaaactcaaaagcagcctgatcttcgatgaattcccgaccatctatctcaacaatatggatagtctgattgccactgcacgaagcaataaagtagcgacttgtttggggattcaagacttcagtcagttgcgtaaagattacggtcgcgaacaggccgatgttattatgaacatcaacggaaatattgtgagcggtcaagttaccggtgacaccgccaaacaattatcagaacgttttggaaaaattatgcaggacagagaatcgatatctataaatagcggcgacacttccatcagcctttacaaacaattagagtcagccgtgcctccttccaagatttcttctctaagttcaggtgaatttgtcggaatggttgccgatgatcctaactgcaagattgatctaaaaacttttcattatgaaattgtcaacgattaccaagggctaaaaaaggaagaagaaaattatacagatattgccgttattaggaagattgataacactatagttcaacgaaattatttacaaattaagcaggatattcaagagatcatgcaatctgaaattgagcgccttttaaatgatccaagtctggcctatttgatactgaagaagtgagattgtctacttccaatgaaaataatattttttatagtggttttaaaaacactgttaaacacctattcaattcttttatcagcttctttcatgagattacagtaaaagccagcgaaatcacttttttaccgctggagtatcatgaagtaacccagaagttcgacattgtagttttttttaaaagtaacaatttgtattgtgatacgaagacgttaaagcaatcaattttcatcatcatgcaagacattttaggagaaaaatcgctataccaaaacatcaattttgtgcagttggcacaagtaccagataacaaggacgggttggttaaattatatgattttcaattgtttatagacaatttaaacggtgcggaattaaataattattttcttaaaatgtggaaaaccgtgagataaattaatttagtcaacttagctttgaaaaaaccaagtagaatggaactgtttgatttatgttttttatcaacctaatttgttaataacaaaaatcttacactactttcaaattgtgtatttttagattctcaaaaaaaaagcgttaccaatgtcattatttcagccctccgtactcaagaaatacttgagccaacaagattctgccttgatccaaaaagcctataaaaaatacgtcaagtattttcacaatggtgcaattcaggaaaatattcgcaacagtaaggaggaacaattccaggaaggattcttgcgcgaattatttgtggacattttgggctacacactaaatccggcagctaactttaatctgacaacagaactcaaaaacataaaaggtgccaaaaaagtagatggcgccattctcaaagacggaaacgccctcggtgtaattgaacttaaaggtacaaatacaaaagacctcgaaagcatacgccaacaagcctttgattacaaagccaaccaaacgggttgcatctatgtgattacttccaatttcgagaaattgaggttctacatcaacaatgccgtagacttcgaggaattcaacctctttaccctcacacactctgaatttgaaatcttctacctctgtctggctaaagaaaatatcttggccaacaaaccactcagcataaaagaagcttcggtggtggaagaagaaaatattaccaaaaaattctatggtgattattcggtattcaaacgcgagttgtaccgagatttggtcaaacaaaaccgggctaacatattattgaatgacttaaccgaaaaaaccaccaaactgattcttttcaagaagtcgcaaaaactaatcgaccgatttctcttcattctctttgccgaagaccgcggactgctggctccaaactccatcaataccgttttaaaagaatggaaagccttagccgacttggatgtggaagtaccattatatgaccgctacaagcaatactttggctaccttgataccggacgcaaaggcaccgacaagaaagaagaaatctttgcctataacggtgggcttttccaagccgatactattctagatgccgttatcatagataacgatctgctctaccgtcataccttaaagctttcgacctatgatttcgaaagtcaggtggatgtcaatattctggggcacattttcgaacattccttgaatgaaatcgaaagtgtcaatgccgaaattgaaggaatcgatttcgacaaacaaaaaaccaaacgcaagaaagacggggtgttctataccccaaaatacattaccaaatacattgtcgacaataccattggtaaactctgtaccgagaaaaaacaggagttgggcattattgatgaagaatatgcaaaaggccgcaagaaccgccaaaccgccaccattgtaaaactggaccagcagctcaaggactaccgcgaatggcttttggaactcaccatttgtgacccggcttgtggctccggtgctttcctgaaccaagccttggatttcctgattcgggaacacgcctacttagacgaactcaacaaacagctctttggaggtttctttgtctttcccgatatcgaaaaccaaatcctggaacacaacatctatggtgtcgatctcaacgaggaaagtatcgagattgcgaaactctctttgtggctgcgaaccgcccaacctaaacgaaaactcacgagcttaaacaacaacatcaaatgtggcaactcgcttattgaaagcaaagccgttgccggcgacaaagccttcaactggaaggaacaatttccggaagtatttgccagagggggctttgatgtaattattgggaatccgccttatgtagatattaaagttttagagaagaatgttgtagaatatttttttaaagattacaaaactgcaaataatagaattaatttattttctctcttcattgaaaagtcttgtcagattttaaaagaaaatgctaaattttcatttattataccttcttctttattaactcaggattcttataaacttattagaaatgttttgctcactaaaactaacatcaataatattgtaagactacctaatgaatcatttggaggaagtgcaggagaggttaaagttgacactataattttgacttttactgtaacaaatattttgagacttccagttgaaattatggtgtacaaaggatttgatagaataaatgaaatatcctcaataaattgcgatgaacattcatttattgatcaatccctatggaaagaagatgaaaattatatcttcagaattaatggaaatcaaaatatttctaagcttttagataaaattgaaaaaaaatcaacttctctaattaattgtgctgaattttgtttgggacttactccatatgacaaatataaaggacatacacccgatcaaattattaatcgagtatttcattctacttatcaaaaagatgaaacatttaaaaaattgttagccggaaatggtgttaccagatataacatcgaatggaatggagaggaatggattagttatggaaattggttaggagcaaaaagagaagataaattttttaaggagaaacgaatattagtaaaacaaattattgattggtcagcgaaaaaaatctgggcaggtattacttcagaagaactctataatacacaaaatgcctttaatttaattgcaaaaaaaaactataatacagaatatttacttgttttaatcaatagcaatctaatgtctttttatcatagaaaaaaatttcttgaagagtataaagatcgttttcaaaaaattttaattaaagactgtaaagaatttcaaataccaccaatttcgatggaacaacaacaaccatttgttgaaaaagcgaataaaatactctcactaaataaagattttcaaggcgtaaacagaaagtttaacagctacttttcaggacaatataaacttgaaaaactacctaaaaaactagaaaactggagtgaattaacctttgctgatttcattacagaactcactaaagccattaaaaaaacagggctaacgcaactcaccaaaaaagacgagttcgaatggctggatctgtttgaagaaaacaaagccaaagcccaaatcctaaaa

SEQ ID NO: 1549 - DNA, 24038 bp, synthetic construct
  misc_feature 1..24038: note = Synthetic
  source 1..24038: mol_type = other DNA
ggctcccaggtaaccattggcttcccataacagggtcagcgtcgtgaattcctctatacctaattgttccgctcgtttcgttagtaagggatgatcaggtaattgcatcgcgcgcaaagcattcctcaaggtttttcttcgttggttaaaagccattttgaccagcattttaaaatgctttgggtcgcaggctaattttttatcgaaattacgaactaaacgaatcacgcccgaattgactttcggaggcggggtaaatacttcgggtcctaggctaaaaagatattcgatatcgtaataagcctgaagcaaaacacttaaaattccataatccttatttcctggtttggcagctaatcgtacggctacttccttttgtagcatccctacgacttccacacattgatctttgtattccaaaattcggaaaaagatttgggttgaaatgaaataggggaagttgccaacaatggcgaatttttcctcaccaaaaatgttttctaagggatagcgtaaaaaatccccatcgatcaaccgagtgcccgtgaattccaaataattttttcgaaggtaagcaaccgattcttgatcgatttcaatgaggtatgtctcgtactccgacttcttaactaaatattgggttaagacccccatgcctggaccaatttccagcactttcgcgtattgagaatgatcctgcaagccgtccacaatgcgttgggccgcatctaaatcatttaaaaagtgttgacctaaattcttttttgctcttacttgcacgtgttcttggggcttaagggtacgcgaaattacgcccttttttgtacatttaagcaaaaatagggaataaagccatggctgcttgggcaaataagacaaaggacgatctcattcaggaaattcaggagcttaaaaagcaattggatgtactggaaattaacgatggtattgcgtctgatgcgacgtcaaaggagaacctgatcaaaacgcttgaaggccttaaattatttggtatcatcatggctctcgatggaaccatcgtttttgccaatgcctacacccaccaattattaaattacaaagggggcgaattaaacgggaaagacttcttcgctactttattgcctgagggtgaaaccgaagaccgacgtgcgtccttccaaaaagcgattgcctcgggtggtttattcgaggatagagaacggaattacgtcaccaaaacgggcgcgatgaaatgggtggaggttgcttcaaccatcgttcaagaagcggatcaaacaacgtatttaagtattattggtgaagatatcaccgaacgaaagaaagtttccgaagccttaagtcggtcgaacgcccagttacaagatttaatcaacaacacgaccgatttaattcaaatcacgggtatttccggtcgattcctttttgtcaataaagcctggctcgaaaccatgggctattccgaagaggaagcacgtgacttgaaaatgcaggatgtactccatccggaatttgcccatgtgacgcaagcgcaatttgatttgttgagtaaaggggaggaattgccagaatttacggcagtgtttcgacgaaaagacggccgccgactctatgtttcgggttctgcgacctgtcgttttgagcggggagcgcccacggcttatcgttgtattttgcataactcgactgcaaaagttcgtgcggaacgtgccaataaattgttctcatccattgcccaggttgccattaattcaaccaatctagatgatttgtatgtgaatattcataaacaattaggggaggtgattgatgtgaagaatttcttcattgcgcagtacgatcccggtaaaagctatttgtatttcccctattacatcgatgaatatttcgactcgcgtgtccattttaccaaacgaaaactgggaaatggtttaacggaatatgcaattatggctgacaagccgttaattctgcacgatgacgatatacatcaattggccaaagaaaagaaaatctacctctatggtgtcgtacccaaagtaatgctttgtgttcctttgcgtataggtgatcgcgttacgggcattattggggttaagtcctatgagcgtgccaataaatacgagaaccgagatcttgagttattggactttatttccagtcaggttgccgtagccatcgcgcgtaagcaagcggaagaagctttggcacatgagactgcacgtttgaatgccatatttgaaggaagttctcacttaatgtggtcggtgaataagcgcttgatgttgacgagttttaatcatgaatatgcggaactcttggagcagcaactgcagattaaacctcaattgaattttagtacggaaagcatgggctttcaattggttgcgccaaacgagcgtagacctttggaagataaatacaagctagcctttcgaggtcaaaaacaacattttgaattggagcttgcgacaaaatctggcgagcaaaaatggttggaaatttacctgaatcccattcagtctgcgggtaatattgcggaggtttccggtattgcacgagacatcacggacctaaagaaatatcaaacccaacttgtagaagcgcgtgaacaggcagaacattccttgaaagtgaaggaacagtttttggccaatatgtctcatgagattcgtacgcccatgaatggggtgatcggcatggtggatttattgtgcgattcgcctttgaatgaggaccaacaagattacctgcaaacaatccgtaaatcatccgaaacgctcctacatattctgaacgatattttggatttagctaaaatcgaagcaggtaaaatggtcttacatcccgcggatttagttttcgaagatttattggatcgtttgatgtccttatttacgcccattgcccatcaaaaggggaataaggtcacttattcgattgccgaagatgtaccaaaggttgtggtcgccgatgaaacgcgtctgttacaaatcttatcgaatttaacttccaatgcgttgaagtttaccgaaaatggttccgtgactatttccgtttcaacggctcaattgacttctcagtttgtcgagcttatggttcgtgtcacggataccggaataggaattagtcccgaaaacttaacgaaattattctccgcttttcaacaactcgacaattcaacttccaagaattacggaggaacgggcttaggtttagccatttcaagggaattctgtaagatgatggaaggggagattggggtggaatcagcggaaggccatggcagtacattttggtttactgttcgtttagcgataggtgatgcctcgaaagcgtcttccatttcaaacgcagatcgttttgacatcgctggtaccttgaaagaagtacatgcaaggattttattggtcgatgataatgcaacgaatcgcaaggtggcttcccaaattttgttaaaagcaggttgtgtggtggaaactgtcatcagtggacaagaagctatcgaccatttatcgcaagatgtagcttttgatttggtcctaatggatattcaaatgcccgaaatggatggcatggagacgacccgccgactgaaaaaatcggtattggaattaccacctatcgttgccatgacggcctatgccatgaaagaagacaaggagcgattcttagctgcagggatggatgattatctagccaaaccgatacgtgcccagcaactcattcaaatggtggggaaatgggtacatgacggtcacgcgccagaaaatatcgtgattgatgcttcgtacgaagtagtcgatgaagaagtccttaaatcattatcggatgccgtaggtggagatcctacatttgttgaagggatgttggtggagtttatcgaagaagcggaggagcaaattcttcaagctgaaaaagcatatgcttcaaatgattgcaagggtgttcagtcggagttacacacgttaaaagggaattccggtaccttaggtgcggcccaggtacatatgctttgcgaaaaaatagagttgaaagcgaagctttgtgagttcagtcaatttccggttgaaatcatcgaattaaaggaggcacttgcttcatttaagcagctgatttcggacagattcgcctaatacgtgccataatggccgatttttgttcgtagtgcctatgtagagcacgccataatttccgcaattcatttatggtggttcatttgcaagtacccctgcaaatattttaaccacatgaatccaaataactacacatcccaatcgagtgtcatcattcagcaggcgatggaaattgcccaagagcgtggccaacaggccatcgaaacggggcatttattgcttgcgattttacaagatgatacgcaaaccgcctcctttctattgaagaaattaggcgtgaatcctacccaaattcaaacggctttggtgcctatcttgaattcctatccaaaggtatcaggcgagcaagcttatgcaagtaatgccttgcagcaagcattgcaacgagcggataaattaaaagccgactttggggatacgtatgtgagtgtggaattgttgttcttgtccttgttggatggtaacgattccgtggccgaagctcttaaaaagctcggaataacaacgaaaaattttaaacaagcaatcatcgaacttagaggaaatagaaaagtgaacgatccacatgcagaaggtacttaccagtctttggaaaaatacggtaagaatttaaatgaattagcgaaagcggggaaaattgacccggtgattggacgtgatgaggagattcgtcgggtcttgcaaatcctttcccgccgtactaaaaacaatcccatgctcgtaggagagccgggagttggtaaaacggcaatcgtggagggtttggcgcaaagaattgtatccggcgatgttcccgagaatctaaagtccaaaattgttatgtccttggatatgggtttattggttgcgggtgccaaatacaaaggagaatttgaggagcgtttgaaggctgtgattaaggaagtgactgattcagatggagagattgttttattcattgatgagattcataccttgattggtgccggaggtggaggcgagggagccatggatgctgcgaatttacttaagcctgccttggctcgtggggaattgcatgcgattggtgcgacaaccttgaaggagtatcaaaaatacattgagaaagataaagccctagagcgccgttttcaatcggtgattgtggatgagccggatgtagcggatgcgatttcgattttgcggggtattaaggataaatatgaattgcatcatggtgtgcgtattcaagatgatgcggtcatcgccgcagtcgaattatcgagccgctatatctcagatcgtttcttacccgataaggcgattgacttgatggatgaggcagctgccaaaatgcgtttggaaatagattctgtaccggaggcgattgatgatatccagcggaagattatgtctttggagattgaacgggaagcgatccgccgggaaaataacaaagagaaagaagctgtcttaaaccgtgaattagctgatttgtctgaaaaacgagatgcattaaaggcgcaatggcagtcggagaagggcgtactagatacgattcgtgcggaaaaagagcagatcgacaaattaaaactcgaagccgatcaagcggaacggcaaggggattacggcaaagttgctgagattcgttatggtcgattggttgaatcggaacagaagttgaaagatttgcaagcgcagtcccagggggagaatggtatgttgcaggaagaggtaacggctgagaatgtcgctgaggtagtagctaaatggacggggattccggtcagtaaaatgcttcaaacggaaattgagaagttattgcatttggaggatgagttacacaagcgtgtcgcaggacaagatcaagccattgaattggtttcggatgcagtgcgccgttctcgtgcgggtttgcaagatccacgcaggcctatcggttcatttatcttcctaggaacaaccggggttggtaaaacggaattagcgaagtctttggcttcttatctattcaatgacgagaatgccattgttcgaattgatatgtcggagtaccaagaacgtcatgcggtttcccgattagtgggagcgcctccgggctatgtaggctatgatgagggtggccaattgaccgaagcggttcgtcggaaaccttattctgttgtgctcttggacgagattgaaaaggcacatccggatgtttggaacattttgttgcaggtattggatgaaggccgactaaccgataacaaggggcggacggcgaatttcaagaacacgattatcattatgacatcgaatatcggtagtcatgtgattcaggagaaattaggccaaatggagggctggaacaatgccattctgatggaagaggcgaaagaggaggtaatgttattgttgaagcaacaagttcgtccggagtttttgaatcgagtagatgagattgtcttgtttgaacctttgacagaggagcatgcgcgtaagattttgaccattcagtttaaggagattcaacatcgtttagcggagcaacacataaccattgaagcgacagaagaagccttgaataaattggccaaagaaggttatgatcccttgtatggcggtcggccgatgaagcgcgttctacagcgtgtcgtgttaaacgaattatcgaaatccattttatcaggtaaaattcagaaggagtctgccgtgctgatggatgtggataaggaggggaatttgacttttgagaatgtagaggtggaaatgtaggttaatggaccccaggcgaaagcctggggttattttttgtagagacgcgatacctcgcgtcttttttgttttagacgcgaggtatcgcgtctctacaggtttggctaaaaattctgccaacaaaccggtctcgtgaatcggtaaatggcctcggtgcctacagaagtgcttctcgcatctgacgtagcaggaaaagggccgccatgtaccatggcaggggatacctcaacgcccgtggggaatccattcaacagaatgcgtcccactttttgggatacttcatcgagtatttcaggtatatcagctaaatcgcttggctccgcttgtatggttgcggtgagttggcctggtaattgttcggtaaacgaaatcatctcggctagatctttgcacaccacagccagcgtacaaggtccaaaaacctcttctaatacttctgggtgtgctaaagcatgttgaactgatgtgctaaacaaacttggtgctggaatttccgatgctgttaggcgttcagtagccggatggtgatttaatgtattccaaccatgtgtaaaagcatctttaatgcctgccgtcaggaatgttccgagtggcatggcatccagttttgatgctaatgtattcaagaatgctttgtccttttcgagtaacacgatcaagcctggattggtgcaaaattggcctacacccatgcaaatggattggctgaaggcatctgccagtgcctcaccttgcgaagcgattcggtcactgaataggtagacaggattgatagagcccatttcggcatagacgggaatgggtacttccctgcgtacggctaaatcaaacaaggcttttcctccacggtaggaacccgtaaatgcaacggctttggtttgcgcgtgcgtcactaagtaacctccaatttcatttccatgggcatgtaataaagaaaaagtgccatctggcatgcctgttttttcagcagctttttgaatggcttggcctaccaagtcagaagtattgggatgtgcgggatgtgctttgaatatcacgggacaacctgcagctaaggccgacatcgtatcacctccggcgacagaaaaagctaaggggaaattgcttgccccaaaaacaaccgtaggtccaagcggaatttgatgttgaaccaaacgaggcttgggaagcggttggcgctctggcatagcctcatctacgatttcgcgtttccaagcgggatttgaaatgaactgagcaaaggcttgaatttgaccaatggttcgtccgcgttcgccgcttatgcgcgcttccggtagtcctgattcggcacaggcagtttgaattaacatatcgccaatggccaaaatttccgcagctattgcgtttaaaaaagtggctctttgggcatccgttaggttacgatatactttaaatgccgcggaggctttgcttagcgcttcatttgcttcgtcagcagttgcttcgatgaagatttgtggaagtgcttcgttattcgaggcctgtataccttgaaaagttcgctgtccgttcgctttttggctaaaacctatgagttgttttcctgtgaaattcatgcttgtacggtttggataagtgtacctataggttcgatttggatatgtatttcgtcatgtgcttgcaaagtgaatggagggtcaggtacaatgcaagttccggtcatgaggtaaacgccatttggaaagctcatttcacgggttaagtagtctttgagttcttcgtggctccgtttcatttgggaaatttgggtttcaccttggaagacttcttgttggcctctgtaaatccgcatcgagatttccgtttcgggagctagaggatggtcggtcaccaaaaggcaagggccaattccggcggaggcgtcataaaccttcgcttgcggcaaataaagtgggttttcgccttcaatgtcgcgggagctcatgtcattcccaatcagataaccagcgatttgcttattcttgttaatgtacaaggtcaattcgggttctggaacattccaagcagaatcttgacgaatacgcacctcaccctgatggccgatggcgcgcaatttattgcccttgtagaaaatttcaggtctttcggcatcgtataccttgtcgtaaaatgtatcaccgcctgattctttggactcttccatgcgggccactttgctacgtaaataggttactccagccgcccaaatctcttgggattcgatgggtgtttgaatcgcttctcttggatgctcggcgtaggattgattttggcagaactgaaataattgctcctggtttatacattcatcccaagaaacgggaataggttcggataattgtccgtgttggttttcgatttggatacccgaatcgatgcggtagattttatagtagttcataggtttagtttagcatttagatgctaaaacaaatctactgaatcaaaagcgaagggaaaaggggtggggattataaatttggaaaggagaggtcttcatcgatgagcggccaatgcacacctgatcctgatggacttattttatatgtatttcgttcgatggatgttgcatgcatcaatttttgtgagatatcagcaatggccgttttgattgattttctttcgccttggatgatgatcatatcaccttcaaatcgaatttcccgaatgtgtttttgatttgatttcattggtaaatttgaaataaatatttcaggttttaatgatctgtggcaattgttcgattaatagttcttctatttctctttgcaacaatgggctcaaattaaatgaatttgcacaggatatcatattcaatttttgactaatccgatgatatgtatctacgttaatttgacgtttatttttcaggttaaatgcctcaaacaagttgatatatttattaatcggatgattaccgttaaataatttgtcactttaattttagacaattcaagtcagcgaattgacttagtttaggaaataggttagattacgatttcaggaaaatgagaaagatttggagattttataaaaaaaagaaagcgaccgaggccgctttaaatgtttgcacaacggaataatccttattgtgaataacttcaaaattgaaatgcaatattagtgaaagatttagaaatacaaaacttatgaaaaaaatattaggacttgatttgggtagttcatcagttggctgggcatttatccatgaaacggacgaaacagctaaaataattggagcgggtgttcgagttgttccaatttcaactgatgaagccaatgattttcaaaaaggaaatgcgatttcaatcaataagaacagaactttagcccgtggagctcgtcgtgggttacaacgttttaaattacgtcgagatgctttgttgagaattttcaaagagaatggtttcatctcaaaagattttaaattcgctgaacaaggaaaaaatacgacacatcaatcttttgcaattcgagcaaaagctgcaacggaacaagtgagtccagcggaattagtgcgggtgcttttaatgctaaataaaaagcgggggtataaatcaagtagaaagggacaagatgcgagtgctgatggagtggagaatgttgggcaagtgatagatggaatggaagttgcgaaagaaatgcaggcaaaaaatcagacacctggtcaatatgcgtttcatttattagagcaaaatccaaaaacaaaaattccggatttttatagttctgatttagaaaatgaaattgtcaaaatcgttgaaaagcaattacaatatcattcagatttaccgaatgatttgattttacttttaaataacaagagtaaaaatgctacctattatttgtttaatacaagattagggattccctatgctgaaaataaaggaaatcgagaggagaaaaagtttcaagcttatacttggcgttcaaaagcggttactcaaaagattgataaaagtgaaatagcatttgtaattggagaaattaaggacgcgattggaaagtcaagtggttatttggggaatattagtaatcggagtaaggaattgctatttaaccaacaaacagttggtcaataccaatacgctaaactagtggaaaatcctcatgcttctcaacgaaatatggttttcatgcgttcagattacatgcatgaattcgaccaaatttgggaggttcaaaaagcacattatcctcaattgactgatgagttgagaaaagaagtacgagatattacgatattttaccagagaaaattaaaatcacaaaaacacttaattagtttttgtgaattagaatcgcgttttcgggtagctcctaagtcttcacctgtgttccaacagtttcggatgtggcagaatatcaataatctcgcggttgaggataattcctttgaatttgatgaagatgttagaaacggaatttttgaaatattgtccaacgcgggtcgcttgaaagatagtgatttactcaaagctattggtgcgaacccgaagaaagacaagctgaacttcaaggaaattcaaggggatgtcacacgaagtcaattccttcaagcgattatttcggtttgggaatcaaaaggatatgaacaggatcaattgggttccccaattagatccgtagatgtgcagaaaattttgtctgatttgaatttgccaacagatctattagaaatagactggactttatcgggtaatgatttcgataaacaagtgtattttcagttgtggcatttgttatatactgttgaggatgatgaagttttggttttgaatcttcagaaaaaatttggatttacagaggaattagctcgtgctttattgaatgtgcgtttagaatctaattattctagtctttctgttcgtgctatgcgaaaaatccttccacacatggaagatggacttgaatacagttctgctgtcgtttgtgcgggttacgcctcacattctaaggcatctttgactaatgaggaaaatgatgcgcgtgttttactcgataaactttccctggttaaaaagaattcattgcgaaatcctgttgtggagaaaattttaaatcagacgattaatgtggtaaacgcaataatcgaatctgaacaatttggtcgacctgatgagattcggattgagcttgcgagagaattacgggcaaacaatgagcaacgcaaaaatatgacagctggtattgcgaaagctaccaaggcaaatgatgaggttcgaaaattattgcaacaagaatttaaactcaaacgcgtaacaaaaaatgatatcgttcgatataaattatggcatgaggcggggcatatttcaatctatacaggaaagcctattcctgcgtcggatctgtttacaaataaatttgacatcgagcatattattccccaatctcgcttatttgatgactctttttccaataaaacattgtgtgaaagagatttgaatattgaaaagagtaaccaaacggccttctcatttttaagtcaaaaatggagtgctttggagtttgatcaatacattgctcgcgtaaaagaattgctgaaatcagataaaatttctaaggcgaaggccgacaaacttttattgagtaatgaacaaattccggatgattttatcgcccgtcaattaaatgaaacacaatatattactaaaaaagcgaaagaaattttgcttacgatttcccataaggtgaatactacgactggaagtatcaccgatcgattgcgggaagattggggcttgacggatgtgatgaaggaattaaatttagagaagtataaattagctggcttaacttatgaagaaacaggaaaaggaggtgagcgcttagtgaaaattaaagattggtcgaaacgcgatgatcatcgccatcatgccatggatgcgattaccattgcactgactcgacaagcttatattcaatacctaaataatctgaatgctaggtcagataagtctggagcaatctttggaattgaggcgaagtatctagaacgaattgatggaaaaatgagatttaaatcgcccattgctaatattcgtgagtcatttaagcagattctagaaggaattttggtttcacataaagctaaaaataaggtagtaactaaaaataaaaataaagttaaaaccaaattcggtgtcaaagaagtgacgcaattaactccgcgagggcagctacataaggaaacagtttatggtaagcgtaagcaatatgaaacaaattatgtggcagttggcttgaaaatgaatgcagaagtaattgctcaagtggcgaaaaaaaatgaacgggacgcgttattaactcgcttacaagcaaatgacaatgatcctaaaaaagcatttacgggtaaaaacaacttaattaataatccgatttacttagatggtgataagaaggtaatgttagctgaaaaagttaaactcgtttctatggaggatgtttatacgaaacgcatggccgtgggaccagatttagatcttaagaaaattgaaaaaatcattgatccaggtgtaaaaatgcgattgcttgcgaggttagctgagtttggtggggattcgaaaaaggcctttgtaaatttagatgaaaaccctatttatttagatcaagcagggaagattgtaatcaagcgggtgacaatgtctggagtgaataatgtcgaggccctgcatacaaagaaagatttacatggaaatatattattgaatacctcaggtgcccctattccagtcgattttgtcagtacgggtaacaatcaccatgtagctatttttgaggatcaagagggcaatttgcaagaggaaattgtatcattttttgaagctgtttcaagagcagcaacaggggaacctattatacagcggtcgcataataatggttggaagttcctatttacgatgaaacagaatgtgttctttgtttttccttcggaagaatttgacccctcagaaattaatctagaggatccaatgaattatgctttaattagtaagcatttgtatcgagtgcaaaagtttacaactaaatattatgtatttcgacatcatttagaaactaatgtttctgacaataatcagttgatgggaataacttggaaacgtataacgatgctgaatagattaaagaaagtatacaaagtacgacttaatcatttaggtcaaattgtaagagttggagaatactagttatggtaaaacgcacacttttttttgaaaattccgcttatttaagtcttcaattagagcaattgttaatcacttatccacaggaatttgtcaagtccattacgattccgatcgaagatattggtatcattgtgattgaatcgctgcatgtgacgatgagtagcgccttgacaaataagctgatgtcccatggtgtagggatattctgttgtgacgaccgacatataccttctgggcttatgttgcctttagaaggacatacccagcagacagagcgaataagggtgcagttagatgccagtttgcccttaaaaaaaaatctttggcaacaaaccgtttcggccaaaatagtgaatcaagcacgtttgttgaataccagaggagaggaggttgataatttgctgcgttggagcagagaagttcaatccggagatttaaaaaatcatgaagcaagagccgcggtccagtattggtcgcggctttttccatgggagggatttacacgtcatcctgagggggaatcgccgaatcatttattgaattatggctatagtattttgcgtggaatcacggcgcgtgcgattgtatcatctgggatgcttccaatgctaggaatctttcataaaaacaaatacaatgcttttggattagcggatgatattatggaaccttatcggccatttgtggatgccttggtgttagacttagtcgatagtggcgaggatttccattcaatgaagaaagaatttaagatacatttgatgagcattatgcgtgccgatgtaattctagatggacagaaaagtccattgatggtagctatgagtcgaacgacaagttcactctttgattgttatgcgggtaggtctaggaaaattttatatcctttatatgcaggataattacgatgatcgtttaaatcaataccgtagtatgtggctatttgtctatttcgatttaccaacagaaacgcgaaaggagcgaaaagttgccgcggattttcggaaaatgttaattaaggatggctttaccatgtttcagttttcaatttatttgcgtttttgtccatcgatggaaaatacggaagtgcatgctaggagaattcgaaaaaaattaccagaacatggcaaaatttgtttgatgaaattcactgatcggcaatttggaatgatggaagtcttctttggtcagaaacctcagttaaatgaaaaaccgcctcaacagctcgaaatattttaaatgagggcctcgaattttaattctatttttactcacaattcacactatatcagccttttatgtgctgatatggtgtgaatgcggtactaaaaatacaattttgaaagctattcacaacaccaaggaggaaatcattaaggctttgaaaggtgtgaatgcggtactaaaaatacaattttgaaagctattcacaacccaattgggaaaatgtaaatatcaattggggtgtgaatgcggtactaaaaatacaattttgaaagctattcacaactcatgctagctactatttgatctattttaggtgtgaatgcggtactaaaaatacaattttgaaagctattcacaacatcttatttgatgcacaaagtgacacctacggtgtgaatgcggtactaaaaatacaattttgaaagctattcacaacacttagaccaattataatcatggaatttaggtgtgaatgcggtactaaaaatacaattttgaaagctattcacaacacctccgatacgctaataagttctgcgccggtgtgaatgcggtactaaaaatacaattttgaaagctattcacaaccaagtcctgcttcttatttcctttcttttggtgtgaatgcggtactaaaaatacaattttgaaagctattcacaactcacaacttgaaagccagtatttgatataggtgtgaatgcggtactaaaaatacaattttgaaagctattcacaaccctttgcgctccgcttttttatttagctttggtgtgaatgcggtactaaaaatacaattttgaaagctattcacaacgatactcgtgttagtgaaaagaagggtgaaggtgtgaatgcggtactaaaaatacaattttgaaagctattcacaactatcttgtcaacagtaatactaacaatctggtgtgaatgcggtactaaaaatacaattttgaaatcagctggatatgtattttccttatgtaaacaataattaaaacttgagtcgaattgattttccgtttattctaactttgacgattaattcggcctcttgtccattctggtttagattttcaaccattttattgattaatccaagacctacgttttgacgcatattttctaaattggaaacctgttgaacggaattaaatccagctactttggcaaattttgattgtgacaaatttaattcctctcgaagcttttttacgatgtttagcatattttatcaagtattttttctgtgtaggtaacaatagctttactaatttcaatgtcttcaacgaaagctaaaatttctttttcaaataattccaaatttagaaaatgcgtcgcatacttatattgttctatttgacggcctgaaggtccaaacatgatcactcgtatccattgtttggctactgatatcgtgaccatatggtggtttgctaattgaaatgttttgtaattttgagaatacatatcttggggatttaatgttttgcaatataccagtctcacttacttttgtcaatgtgtctttttgaatttcagtgacaaaacaacttgattattcccctagaataaactcaatttcaactttcaaaacaggtaggtgatgctttagaatactccatatgatttcatctgaaactgaatcatacccgtggataattcgatttcgagtatcaatgatttttcttgcgtgtgaaatgaaaatcgtttcatctcgttgactgattcgatttaacgcctctcctataatttcaatatttcgttctacagctctttttgttcgtaaatccttttgatacaaattataagtaaactgattaattccagtgaatccttctatttcgtgtaatgcgtttaagatatcataaagccaaacacgaatattagtgtccatagattaataccttttggttttgaagctcctgtataaaaagtggatttcttaatgcttgattttcaagtaggtctaccggtcgtttgaataaattttgaagtgcatctttcaatgcaaaataattgtctgcatagaattcaactctcatcgagttaaattctacaattaaatcgacatcgctggtgaaattaaattgaggagttaaaacggatccaaacgcatagagacttttaactcggtgtctcatacagagtacgcgaattggttctttgaaatttgaaattgcgttcatggtgcaagaatttgcttcaaatgtaattgaattaggcaaatgtcagcaattctgaactgataattttaatacaattccaatgctttatcaaatgctatttgtacctcatctgctatgcggagtgggaatgtaagcatgtaccaacaatcattattaacctcctgttctacaatctgaatcggatattttttgatcactttcatgacctcattcatttgtgggtagttgaaacgaatttccagggtatccatgggttcgatttcgacgatttccgaagcagcaaaagcttcaaggcttgcttctttgtaggcttggattaagccaggaacgcccaataaagttcccccaaaatagcgtacaacagcaacgagggtaaaatggacattcgtggagagaatggtatttaaaataggttttcctgcacttccagcgggttctccatcatcattggaacgggcttcttccggcgtgaagccgagtcggtaagcgtaacaaatgtgcctggccttgggatgcaattcctttaaggaatttatctgttccttgatatcttcgacatctttcacaggaaatacatacccgatgaatttacttcctttatctttgtagagtccctcagcgggttgcgaaacagaaaggtaagaatctgggagggacatgcgagtaaataaaaattcaatttatgcataacaatcattttttcctacgaatcctagcgcgagagcttcgtcaaatcttgacgtatgcacggatcaagcaatgtttttcgcaggagaaagatgaattggtgattggatttgagcgacaaaatggacaagatttttggatcaaatgcagttttggttcgcaattttcaagcatacaatttccggatgattttcgtcgggcgggacgtaattccgtggatctattttcggatttactcttgcatgaagtgcaagatgtgcgtgttttcgacaatgaacgtgccataggtttgtatttcttgggcgagcaagtgctcgtactgaaaatgtttgggaatcgatccaatgtcattcttttccaagcaggggaacaccgcggacaatttcaaaaacgcttaggtaaggattttgatttaacattgaagcaattggatcgaactatcgatcagtcttatgaggcgtttcagcaggccgatggggattggatgcctttgtatcctactttgggaaaggaaggtgccgcgtttttacttgcacaaggatatgagaatcagtcggtgcaggggaaatgggacatgctccaacaaacctttgttttcttggaatcgcccactttttcgattattgaaacaccgaaagggattggcttaagtttgtttccgatttcgaccccagcattgtatcagacgcaggatgtttttgatgcattgaatcaattttattcactgcattattccgtaggggagtttcgtcgtgaaaaggcattactgatggaaacattaggtaaactgcatttgaaggcgattcattacctagcaagtctcgaaaagcaacaagtcaaccgtgattcaaatctagcttatgaagaaataggcaatattttgatggcttttttgcatttaatccctgccggggcaaaatctgttgaactcgataatttttatacgggtggaacggttgtaatcaagctgaatgcccaactatcgggtcccgaaaatgctgaaaactattaccgtaaggcgaagaatttttccaaggaaattgctcagtgggaggcaacgctagctcgtaaaaaggctgaaattcaagagttgggtgagcaattaaaaggaatcgaagctgcccaggttcgaagggagttaaaaccttatttgcaatatttgaaagtccaggagtcaacgaaacaatcatccgatgaattgccctttaagcaatttttgacaagtggatggaccatttgggtaggaaaaaatgcgaagaataatgatttgctgacgcttaagtatgcgaagaaatttgacatttggttgcatgctcgggatgtatcgggttcccatgtgattatccggaatccccaacagcgcacggttcctaaacatgtgattgagaaagccgctgagttggcagcgcatttttccaagcgagcgacagagtcgctttgtccggtcattgtaacggctaaaaaatatgttcgaaagacgaaagatttattgcccggtcaggtcattgtggatcgcgaagaggaagtcgttatggttaagcccacctattgggaatagtataattccggtaaatccttttcttttcccctgaaatatcctattttcgcaaagattacccttaactaaacccaattttatgcaagcacacagtttacagctgctcgactacttagtctttttattttatttcattgtggtttctggctatggatattggatttacaataagaaaaaatctaaaatcgcggattccaatgatttctttttagccgaaggttcattaacctggtgggcgattggttcttccttgatcgcttccaatatttctgctgagcaatttatcggaacttcaggtgatggtttccaaatgggtttggctattgctacctatgaatggatggcggcagcgacacttttgatcgttgcgattttctttatgccgatttatttaaagaacaagatttttaccatgccgcagtttttaaatcggcgttataattcgacggtaagtttaattatggctgttttttggctgttattgtacattgcggttaacttaacgtccattttgtacttaggtgcattggctgtttcaacgatttcaggattagacttcacggtttgtatgattgccatgtcggcatttgctatcatcattacgctaggtggtatgaaggtcattggttatacggatgtgatccaagtcgtatttttggttttaggaggtttagttacttcttatttggctttaaatttagtgtcagagcgatttggtggagatggggttgtgaatgggttaaatcatttaatgacgaaagcgccggatcacttccacatgatctttaataaagacaatgcaaattatccttctttgccaggtttagcggtgttaattggaggtatgtggattgtcaacttgaactattggggatgtaatcagtacattacgcaacgtgcgttaggagctgatttgcctactgcacgcaacggaattatgtttgcggctttcttgaaaatgatgatgcctattatcgtggttttaccaggtattgcagcttatttattatggaaagatggaatgttccaagcggaaatgatgaaggatggcgttttgagcaaggataacgcatatcctgtgttattgaacttattgccagttggtttgaaaggtttatcctttgctgcgttaactgcagccgtggtagcttcgatggcaggtaaagcgaattcaatttcgacaattttcaccttggatatttacaagaattacatcaatccaaatgcatctgagaagcaattggtttcgattggacgtctttccgtggttgctgctatcatcatcgctattttaattgctccatttatgggcattgataagaaaggtggtttccaatttattcaagaatatacgggttatttctcaccaggtatttttgctttgtttatcatgggattcttctggaaacgtactacgtcaaaagcagctttattcgctttactaggtggggttactttttctattgtatccaaatacatccctacttggacaggcgttacggattgccttttctatacttcgttccaagatgctgatggcatgtatgtgattccattcattgaccgtatgggttgggtatttacattctgtatttcatcgatggtgattatctccttgttggatcctgaatcaaagaacaatcccaaaggcctggaaatcgacgcgaagatgttcaaattggctccatcgtttatcgtgggttccgttgtaatcgtgatgatgttgttgatgttgtatacctatttctggtaaaaagacgtcagacgttggactttagacattggataagtatttaaattttgctaaaaaaagaccctagggagattctccttagggtctttcttttaatcattttgcccaatggtcagcgtctaaagtccaacgtctaaagtccagcgtctatttaaagcgctcccgcaataatcgaatccacaacactcggatccaacagggtagaggtatcacctaagctaccaaattcaccctctgcgactttacgtaaaatacgacgcatgatttttcctgaacgtgttttgggtaagcccgtaacgaattgaatcttatccggtttagcgataggcccaatcacgcgagcaacggtagccaaaatatctttgcgcgttaattcatcattgatcgtcgggtgttcacaaatcacataggcataaatgccttgtcctttgacatcgtgcgggaagccaaccaccgcggattcaataactccagtgtgcatgttgatcgcattctccacttctgccgttccgatgcggtgacctgagatattcatgacatcatcaacccgaccggtaatgcggtagtatccatcttcgtcacgcatacaaccgtcgcccgtgaaataaagtcctggataggttgagaaataggttgttttgcaacgttcgtgatctccgtaggtggtgcggatgatcgacggccaaggatatttgatacataaatttccattgaccccattcccttcgatttccttgccgttttcatccactaatatcggttggacacctggtaatggcaaagttgcgaatgcaggtttaagcggagtgattcccgcgatgggagagatcattaatccgcctgtttctgtttgccaccaagtatccacgattggacaattgccttgaccaattttttcgtggtaccattgccatgcttcttcgttgatcggttcgcctacggagcctaaaacacgaagtgagcttaaatctttgccatccaaaacctcgtcgccaaaacccatcaacgagcgaatcgccgtaggggctgtatagaagatgttcacctggtgacgtttgatgatatcccagaatcgacccgcatccgggtaagtagggatgccttcaaacaacacagaaatagctccatttaataaggggccataaaccaaataggagtggcctgtgatccaaccaatatcggcggtacagaaaaatacatcgccaggattgtattgaaacacattggcgaatgtatacgctgtataaaccatgtaacctccacacgtatgtactacgcctttgggtttgccagttgagcctgatgtatataaaataaataaggggtcttctgcattcatcggctcaggaacgcaatctgcggaagcttgagcctcttcctcttcccaccaaaggtcacggcctttcaacatggcaaccggagttttggtccgtgttttgacgataacagtctcgacacatgggcaagaaattaaggcatcatcaaccgtttccttcatcgggatggtcttgtttccacgtacggctccatccgtggtaatgacgattttacacaaggaatcgttgattcgatccgaaatggattgtgcagagaatccaccaaaaacgacggagtgaattgcaccaatacgtgcacaagctaataccgcaatggctaattcggggatcatcggcatgtaaatacatacacgatctccttttttaacgccttgcgctttcaatacattactaaatttgcaaacacgctgatgcagttggcgataggtcaatgtaacggcctcgtcgccaggttcgttcggttcgtagacaatcgcagcttgatccggtattgttttcagatgacgatcgagtgcattagctgttatattcatttggccatcttcaaaccatttgacagaatagtcgtcgaaactccaatctagtactttggtaaatggtttaatccagtcgaattcattggcaatatttgcccagaattgttcggggtgatttacactttcagcgtaggcctcatggtattgtgctaaggatgtaattctcatgtgtatgtaggttagttttttagtttctcgtataattcctgtacttttttgaccaaatcacggttggaaaatggcttagggatgtataaatcagctcccatttgatatcctttttcaatgtcggaatctgcaattttagctgaaataaacaccactgccggctggtagtcggcctttaacgttttcgcttgttggcaaacgccataaccatccaccttcggcatcatgatatccaaaatgatcacttccggtaattctttttcgataagctgaatggcctcttcaccatcgcgtgctacgaaaacttgatggccttcctttcgcataagaaagtcgagtgacatcaggatggcaggttcatcatcggcaattaatattcgcatcttaggctgtttaatgaatgggtaatttaataataaatttggcaccatgccccagcgaactttctaattggattgttccatggtgcatttcgatgatttttttcgaaatggagagacccagacccgaactatcaattttccgattgggattatccacttgtt

SEQ ID NO: 1550 - DNA, 24032 bp, synthetic construct
  misc_feature 1..24032: note = Synthetic
  source 1..24032: mol_type = other DNA
atccagtttactatattcatcattggtgcagagtcctgacgatgtttcaatcaaatgaactcccagtttatccaccagttcctgcacaatagtaatagcattgcctcctgttctggagaacctgctgataaatttgatagctattgcaaaaggtttctgctttgcgcttttaacctcttcaaataatttagtaaactcttttcttgtgaaatctcccgaagcgctctcataagtacctccaagtatatttttaagtgaataaccattcttagatgcaaactggacaatttcactcctctgctcttcaagactgttgtttactagctgaagtttagaacttacccttgtgtagccccaaatttcttttacctcagccttttgagccaatttttctttttgaaattttttgaaattttcaacactcatatatttagctttaaaaattataaactattactactaactgaaacaggctttcaattatctcctgcccttcggattctgatattgtttcaaaacctttacagcttcttaattcttcaatagttaattttacctgattctttttaacttgtggctgtactaaggcagtttctgccgtgattctacttttaactgtttcattattttccattctgcaccttcagctttaaacagcaaagaccgtttttaaggtctttcctaattatacatttttacactttactaaatataaaaatgtatgctctaaatgactgcgataacagcactgctggtgctctttgtcttttaatgtcgttatctctatacaattgaaggtagacactcaatgcaataaattaaaagctgtggcagaacataactgaaagttgtattttttaaaataaatagtaattaattaaatctcacggatgtatactatcaattctttatatacggtacattgaaaatcgtgtttcatacatttgatgtaaattaaacattccagaaacgtacttaaggctttggttttctgcgattagcctttcgtttcaactggttggcaaaatcagtttcctgaaaatcttctccctgagcttggggcagtaagcttccaaatgtttcaacaacattattctccttctcgctgtaaggcgtattttcctttcccaacgagtcaggttgattgtttgagttatttatctgactaccttcacgaaaagtctcccttgcagtagcattattttttaaaggcatatctattttgttaccgttattccaccagtcattaaatacattagccgaaaggtttttagccagctctgatccgttccacacacttcgggatttgtgatcaataaaagtgatgccgtaaatacaacctccagcatttcgtcttacaacaatattaatcctttcatccattagctttttcctaaattcagattcgtttgatgcagtccgcattactgattcgatcctgtctttaactgattccttagcggaattgtcctttagttttattctgttctggttacattgggattgcagttgtagataccctgcacttttgccaaacagcgaagccttaaaaggattacttactttctctcccttttcatttaatgcaaaatataccagtccctgtttcagaattccgttatattcccctttcacttcttcggcagtaatattaaaaagggaaagcacggcattatatgccccaaaagtttgaaactggtaatatgtaggcagatagcgcagtaccgaagccatctggctttttatatctcctgccttatagtcaactggtttaaatgttggggtgtttgtctcttgctttttctctacagccgatataagaccgtactgtttttctaatgccctacagaccgccattgaacgccttttttcaaatttgtcggatattttcctgccgttttcatccacgcagacagacactatatgaatatgagtacggtctatatcagtatgtttaaataccacaaaaggctggtttccatagcccatctgcctcatatagtcttgtgccatattctcaaaatcagtatcgtttacattgtctttcggatcagggttcagagaaatatgaagcacaggtttctcggttttacgattagccaataagtgcagttcaaaagagcgtgaaagctgttccattttataactcccgtcaggggcttggattatcttttgggtaaacaaaacctgtgcattttctttttcaagtttgtgataattataggctaatgctccatacaaactgcttcctcttcctatttttgctatcactttttcaggtatttttcttcaaattccgctgtaagctgtattatcttttgagctaataaagcaaattccattgtttgatttaccaatttgtagagatacactggagctttcttttcggaaaaattacggtacataatcttcacaacctgattgtaattaaccccaatagcacggaactgtccgaataaggcagttagaagtatgtaataatccattgttgctttatcgatcttgactgtttttatacctttttgaaaaatacaagccgtaataaaatgtgccattacattcatgcccgagctctcaaaaagggttagaaaccttgcattttcctcagcagtaagactaatcgaatagcggtggacagccggatctattttgggatgcctgcctcctttatgtcgattctttttttcttcattatccatgacttcaattattggtatccttttaaaaaaattaaatccaatatattttataatcagcatttaagctccaatttggaagttcttggaaatgtttggaagcatttggcttatttgttttctacaaacagtcttgagccttaattatttgacattccctgccaaataaagccatcagaagacactcttaaagagatgacctttttcagaattaatttttctgaaaatataaaatcatgctttataaagaaactgttacccaggagatgtgggagcttctccaaaggctgatgaaagacgaaaatttaaaagattacatactggtcggcggtacagcattagctttacgattaggacatcgcttatcagtagatatagatctttttacaaaaaaagattttgattcgcagatcatgctcaaatatctgcaagacaattatggtatagatcaagaggaaagccaattcttccctaatacagttcttacctacatcgataatataaaagtcgatattgtaacacataattaccctcttttgaataccgtagaaactattgaaggagtccgcataatttcgaatgaagacattggtgcaatgaaactccatgccatccatcagagcggagacaggtacaaggattttgtcgatatttactttatgcttgaacaagaacccctaaagttctaccttcaagcttacgagagaaaatatggtaaagatccttattgggcttgtatagggctgaatacatatgacaagattaccacctttgaagctgtagatatgctgaaagagaaagagcaaaattggaaaaaaatccaaagacggctggaactggcagtaaaaaatcctttatataaatttaaatccgaaagtcaggatttaccagataaccccaataaaaagagaggttttcgcaggtaattcagtagaaattgcttatatttgatactaacccaattttaaaaattatgaaagcatcagctgaagatatacctaatcttcatcctaaatttttctgggattttagatttgataagattgattgggaagggggatataaaatggtaattgcccgtattatagagcgtggaggtcaattgcagattgacgaaatcgtgcgtttttatggtcgcgaaaaagtaattacggctgtgcgtgacgaaatttactttcttccaaattacggcattgaaaatgcccttaaattctttcccgaactcaaaaaggaagagatgtactgctacctcaaccgcaaggataaaccctatcactggatttagtcctgcttctttattaaacacaagattctttttactttatatttttaccaaaagaaataaaaagaaaacaaaggtatgaggggctttttcagtctgccaaaaagactacggcataatgttttgctcgtgcctcacaaaccacccttcgggacttattccgtttccttcttgtctgcctgcatcccgtcatatgaaattgctttctttttcttttttccggtttttctgttttcttttggaaatatacttttattgggattgtgcaggtttaattattttaaagtttgcctgatataaaattgcaaatttaccggaaaaaccataaaagcatttttacatttttatgcttttaaaaatacttatacaaataagtaaatgcttgcaggcttgcacacctgaatgccagagtgcttgcatgccaacatacttgcctgcttacattcctgcatacttgcaaacctacatatttgcttgcgcacagtacagcatacttgaatgtctgcatctcctcttacttacttgcagtcctgcatacttgagcccttgcttataagtaagatctaagttaattattgtgctaatatatcttcccgaaatctgctagcttcaccaaaaaaatactttatgatcaggctgtgttatacgcctgcatacttgcatatttctaaaataaattacttgtaaaaattacaatataaaaagggcatcaagccctttcaattaaaaatcattggtaataatattttcgagagaaaatagcaagttgtgttttgagatgcttgaaatgaattcagcatctcaaaacaacttgccctgcggggctgaaaaacgcctccggagtcggtgttttataaagattataaatagacatgaatcagtctgcactgattttcttcttttcttttaaatatctgctgtgaagcatgtccagcagatctccttcttccagcggaatcatcatttctataaccttaagaagactgtaaatatatctttcagtctgcttgtgattattctcacttatttcaatcccttccaaagccagcattcctgcttttagtaaatccataatcatggtaaaaagatcagaatatccactaacatttatgttcagattgtatatatcttttcttgtttttgacgctggcttgagcattacaaaataatgttcgggattctcaaccatatcacttaatttgattttattctttttcatatcacattatttttagttaaactgggcattcttgagaagatgtagtaatatcagcattcggcattatctttaggttctttagatttttttatccgttcaagacctctttccttcatcagctctccagcatccagcatttttattaaatggatatacggagtcgcaaggtcaatgtccccgtctcctttgcacggagacagcgaaaggcttactatttcagagaggaaaaattcaaactccttaagggttttctctgcaaatgccttttgaaatactgtgaaaggattgtcatattcctgctttgtcagcgaagtgagatgaaatacatcttcggtgcgcactgactctttcactttccatttactgctttttttatgcaggcagtagtatattttcaaaaatgagcatacagctttatagaacacaaaaatatcgcctggtctatcattacagcagatttcctttttaaagctgtacaatactgcctgcgttaaatttcgcttgtagtaatcaaggtgcgcaaaatcaaagagggcatcagatgcttcaaatggatttcccgcctcaaacccagcccagaatttggtcttaaagttttttttcttctttttcatgatttaaaaaattagttatccatttgttcatttttattttcctgattgatctctaaataaagcttgtgcagtttatccagtccttctgcctcacagcatggcaggagctgtatcgcaatttccagaatgctcgtaagatggaaagcgggatcctcaatctggctggagttttccagatcggaattctccagcgcatgaagtgctattttcataagattttgtaccgtgaaaatcagatttatgtagctcgtaaactttatgtcggcatggtaaatcccgtctttccctctctgcggggtcaatgttctaaaataaaaactgcctttcagttctttgataaaatcatccgcctttttattttcattagtttccatattctttaaatatttgtttggtctgctcagcgtactgctgatacattgtttttacttcactcatcagccactgcattttttcaaatgctgtctcaacaatttctgcagttaacggttcaatttcttctccccactgtacagcttttcgggcaagatcaagctttgttaaaacttctttctcttctttattatctaagtcaaaagttcagcctaagacactattaaatttcgcaatgcgctcctgctggtctgaaatgttttcatctgccacccattcgcccgttaaaatccatgaggcattaataaaaagatatcgaaactgctcatgtataacatacattgccatcaaataattcccattcccacggtagtattttaagtccctgccaatagtattggcttctgatatccacctttgataattgtcagcagtcttttttaaaagccgtctgatatttattttttttatatccagaacaggttttcctccagcatttctataaacaagatctgtttctttacaattgaaaagaaaaaataaatttccttttccgacttctctctttatacactctctgtcaaaaaaacagaatgaaaaattattgtagttttcaattactttccataaatggaagacaacatcgtcatagtaatgggggctttttttgctcacaacaattgtcagagttcctgtttttgattctacagcagaatccgaaaagtaaatacaatcagcttctacaaactctactaagagtttcaatattttcttgactgcctgatatttgggatggtctttctgtgttaaaatattataatacatgatctgtatgtttaaggttcagccgaaatcagcttctcagtacgtcttaattcatcttgtaccacacctgtgcagaaaccagcaaaatcattgtatcgatcctgcaaaagattcatatccagttcagaaaaagtatctgcaccgctgtatctcagcgaagcataggatctgcttaatatcgtaaacaagtttctgtcctgttctgtaaccctcgggaagtaactgcttatttcagggttaaaatgatcgcagatttccaatagataggaaagggaaaaatgatttggagaataccccataaacaagcggatcattccaagacagatttgttctgccatagtatggagcatcaaacctttaaggggagcataacaagcccattcataatctccctgccagctttccatatagtttaccacaatatttctatagctcaggtattctttcgctgatgttatacagcggactggcagatttacagtttccagaacggcagactcttttttaaacaaagcctttccattttttataatattcaaaaagaaaaacttctgatcgcctgttgcgctcttaagctctgaaatattatgaatcaaaagtgttgccgtgcactgctctttagttctgcttttaataacatcagccagatcatgcactgcatttaatttattttctttaaccagtactaatagataaaagtgtcttaccgttttttccaatgttccaaaacaataaaccgcctcagtcttaagataagatgtaacggtatcactgacaagcttctcatagtctattacctcatcatttaaaatttctggattctgtttcggttcaataaaaagagcggacttttcttcacagtaagaaagctggtcttggaagatctttttagtttcttttaaaatgcggtaaagtttgttctgtgcttctttaaccctttctttcttaatctttgttttgcctgcgtaaggaaattcaatccttgctctatcaagcaaatcagcaatttctttatccttatcatgatcagtattgaacacctgcttcaaaacgggtgcatagtccttaatcgtgtctaagtggcttaatgtatagtgatttgaatgagattttcccatgaccagtcctcctatgataccaaaaagcaggtttactgcctgatgtattgtatagagtgccatagaatggttatttgttccttcataatgctgggagcctcttcttaatgattccgctttggctaaaagcccgctgtttttctttactgcttttttaagcagaacagatacagccggaatatctttttttatcttaaagtcaaactcatcgtttttaaacaggcttatgtttgataaataccattttagataatataaacacccattctttaaacgatgcagtacatcccatagatttataatcacataaggaacggatggatattttttcaaaaccttatctgcccattcatacatttccgatgcaatctgctgtgaatcctcccttaagattatggtaagtatatgaccgcttttacctgcggtctctgcgtgatgcagagtgaccgctgtaatgtccataaatgattggagctctcccacggcattctccaattctttctgcttttgaaattgaatttcactcataatttttctttttttaattaatacttgtctgaaaaattgtatttttgtttaacacacaggcaagtaagtgattagtcgtactgtaccgtatcaatttgtattgtaccgtacaagactaatttctatattgcacataggacttacttttttattcttaattattatctttgagctatgagtacagtaacaaaaccaaatcacataggacgaaaaattagtcgtattcgtgaattaaaagacatgaaacaagaagctttagcccaggctatgggaacaaaccagcaggcgatttctattatggaaaacagcgaaacgatagaagaagaaaaactaatcgaagtagcaaaggctttaggagtaagcgtagaggcaattaagaatttttcggaagaaggtgtgtttaactatttcaataatttttacgataatagtcagggaactgttgggaattatcactgcacgtttaatccattggataaattgatcgaatctcacgaacagcaaatcaaactatacgaacgtctagttcaagccgaaaaagacaaagtcgaatatttggaaaaattactaaaagcgaaataagcttttataaaagatatattaattccaaaaagagactttcgagtctcttttttgttgctaaatattatctattttttacataattcaatattatcattgaattaaattatttttcatgaatcctccccatcaaccattattttgtttctcaggtataccaaaaaacttcttcaatactgaactgcaaaaaatttatgtgtatgatagtattaaagacagagtctactttaaaaaaccgcaaaaacattatttagtgaaccgaaactaaattctaaatttaaaaagggagaagttgatcattattctatcgaaaaagaattgaatgatttagctcgtcttgagcaataagtagacttttctccaagcgatataagaaatatttttactgcaatttatttaaccttttttgacaaatagaatcattaccctctaccctctcattaaaattttcttttaaccttgtataaaatgattattaaggatctgaaaatttatatataaaattgtgggagataagaatttggaaccaagttaagttataaaaaatttataatctggaaccaaaagcttatcaaaaaattaaatcataaaaaaagcgacccttgagaggccgctttgaatgttttcacaacggaataatccttattgtgaattgcttcaaattgtactgcaattatacaattaaaattcttctacttgattacggttttccataaaactattaattttcttttgagtaaatttcgaaattaattttttgagatatgaaaaaaatattaggattggatttgggaacaacatcaatcggatgggcatatataaatgaagcagaaaataatgatgaaaaatcagttataataaactcgggagttagaattgtgccccttactacagatgaagaagccgactttaaaaaaggaaacacaatttctataaatgcagatcgaacattaaaacgtggagctagaagaggtttgcagcgtttcaaactaagaagagcagctctattagaaactttttataaaataaaatttattacttctgattttgtttatgcggaaaaaggcaaatcaactacttttttatcttatcagttaagagcaaaagcagccgttgaagcaatttctaaagaagattttgttcaagttctattgatgcttaataagaaacgtggttataaaagcagcagaaaagcaaaaaccagtgaagaaggtgatgcgattgacggaatgaaaattgctaaggagattttcgaaaataacttgacgccaggaaaatgggtttataactcattattaagtggtggcaaatttattccagatttctataggtcagatttacaaaaggaactagagaaaattgtactctttcaaaatcaatttcatcctgagcaaataaattataagctattagaagaaataaaaggaaaatcacgcactttaacttctcaatatttcactcggattttaaaaatagaactttctgaaaataaaggatcaagagacgaaaccaaattgcaacattataaatggagaaatgatgctttgacaaatgaacttgatttaaaagttttagcttttatcattactgaaatcaacaatcaaataaatcaatccagtggttaccttggcgctattagcgaccgaagtaaggaattatattttaataaggaaactgtagggcaatttcaatataaacaacttgaaaaaaacgcacatgcaaaactaaaaaatcaagtgttttaccgtcaggactatttagatgaatttgagaaaatttgggaaacacaaacaaagtttcatccagagttaaatgaaaaactaaaatctgacgtcagagacattacaattttctaccaacgaaaattgaagtctcagaaacatttagtaagtttttgtgaatttgaaaaaggtcataaagccattccaaaatcatctcctctatttcaagaattcaggatttggcaaaatttgaataatgttctcgttaaaaatgaaactacaaaagagtcttttcttctagatgaagatttaaaaaaacttattgctcaggaattactgtttaaagaaagtatgtcagatgctcaaatgttgactttttgtgaattaaaaaaaggaacacatactgttaattttaaaaaacttgaaggaaacagaactaacacttcactttttaaagcatttgaaaaaattttagtcttagaaggttatgatgatttagatctttcaaaattagacgcaaatgatacaaaacagataatcaaaaccgcttttacagatctggaaataaatattgacattcttgattttgatcccactatagaaggtaatgattttgataaacaagcgtattatcaattgtggcatttattgtattcagctgaagaagacgatgctttgaaaaatagtttaatcggaaaatttggttttaaagaaaatcatatttcttatcttttgaacataaacctgcaagccgattacggaaatttaagtgctaaagccattaaaaaaatattgcctcatttaatggatagccatatttatgataaagcgtgtaagctagttggatataatcattcgtcatcattaacaacggaacaaaataatgatagaattctaaaagacactttagaattgcttaaaaaaaacagcttaagaaatcctgtcgtagaaaaaatacttaatcagatgattaatgttattaatgctattatccaggacccgaaaatgggcaaacctgatgaaattcgtgtagagttggctcgtgagttgaaaaacaataacgagcaaagaagcgaaatgacaaaagctataaataaaagtacaaccgaacatgaacaaatcaaaaaattattgcataacgaatttggaatttcaagagtgaccagaaacgatattattagatataaactttggaaagaaactgacggtatttcgctttacacaggaaaagcaattgaaccttctaaactattttcgaaagaatatgatattgaacatatcattccaaaatcacgactatttgatgatagtttttcaaataaaaccatttgcgaacgtcaattaaacattgacaaaagtaacaaaacagcctattcatttttacaagaaaaattatctactgaggaatttgaccaattcgaaaaaagagtaaaaagcttttttggaaaaatcagccgaacaaaacagaataaacttttgatggcagacaatgaaatccctgaaggttttattgaccgtcaattaagagaaacacaatatattgccaaaaaagctaaagaaattttactggaagtctccagaaatgtaacctcgacaattggaagtgtaacagacaaacttcgtgatgattgggagctggttgatgtaatgaaggaactcaattggaacaaatttgaaaaacttggtttaacttatattgaggaaggaaaaaacggagaacgactttataaaattaaagattggacaaagagaaatgaccatcgtcatcatgctatggatgccattacagttgcttttactaaacctgcttacattcagtatttgaataatcttaatgcaaaaacaaaaggcgataagaaagcagattctatttttggaattgaaacaaaatatttaagaagagataaaaacaataagcttcggttcatagaaccaatgcctaactttcgagaagaagccagaaaacaacttgaggctattttgatttcctataaagcaaaaaacaaagtggtaactaaaaataaaaacatcactaaaaaaagtggtggaatcaatcaaaaaattcaacttacgcctcgcggacaattacacaaagaaactacttatggaaagctgcaccaatatgttaccaaagaagaaaaaataagtgcaaatttcacaaaagaatacattcaaaagattgcgagaaaagagtatcgagaagctcttttgaaaagattagaagaaaatgacaacgatcctaaaaaagcatttacaggaaaaaatgcgttaagcaaaaatccaattaatttaaaaaacaattttgttgttcctgaaaaaataaaaatagtttggtttgaagatgattttacaataagaaaagatatttctccagatttaaaaattgataaagtaattgatgttggattgaaaattattcttcaaaaccgattgaatgaatttggaggagatcctaaaaaagcttttgtcaacttagacgaaaacccaatttggcaaaataaagaaaaaggaattgcaataaagagagttacaattagtggagtcagtaatgcgcaagctttacataccaaaaaagatcaattaggcaatgaagtcctaaatgaagacggcaaaccaattccggtagattttgtcagtacaggaaacaatcatcatgttgctatttacagagatgaaaaaggaaatttacaggaagaagtcgtatcattttatgatgctgtggttcgaacaaatttaggcctttcagttattaataaaaaccatgaaaaaggttgggattttttgttttcaatgaagcaaaatgagttttttatatttccatctgaaaattttagcccaaatgaaatagacttattaaatcccaataattatcatttaattagtcctaatatttttagagtacaaaaattcacaattagggattatttttttagacatcatttagaaacatctgtagaagacaaaaaagaactcaaagacttttcatataaacgtttaggtttaaatggaattaataacataataaaagtgcgtattaatcatcttggtcaaattgttcaattaggagaatattaactatgataaaaagaacacttttcttcggtaatcccgcttatttaagtacaaaaaatgagcaaatagtaatttcttatccagacaaggagcaagaaactaaaacggtggctattgaagacattggcgtaattgtcttggagaatcagcaaattacaattacaaacggtttactagaaaaattaacgcataataatgttgccttaatcaattgcgatcagcaacacttgcctattggtttactaatgccattgagcggtcatacagaacaaacggaacgttttaaaaatcaaatcaatgcttctgttccgctcaaaaagaatttgtggcaacaaactatcagttctaaaataatgaatcaggctggattactaaaagaaaaaggtattccaatgcgaaaaatggaactttggtcaaaagaagttacttcaggcgattcgctgaatcatgaatcaagagcagcagtttattattggcaaaacctcattcaaatagaaaatttcacaagaggtcaaaaaggaattgcgccaaacaatttactcaattatggttatgcaattttaagagcaattacagctcgagcactggtaagctcaggattacttcctacactaggtatttttcatcgtaataagtacaatgcgtattgtcttgcagatgatattatggagccttacagaccttatgttgattttatagtctgccatattatgcaaacggaagattcttatgaagaattaactgttgaaataaaaaaacaattattaggtattgccaccattgatgttttaatagatggaaaaaacagtcctttgatggtatccatgagccggacaacaaattcgctccatgaatgttttgaaggaagttcgagaagaattttatacccagtttatgtatgacgagcattatacacgtttaaatcaatatagaagtttgtggatattagtcttttttgatctgcccactgaaacgcgaaaagagcgtaaaattgctagtacatttcgtaagaaattattagatgatggcttttctatgtttcaattttccatttatatgcgcttttgtgcgagccgagaaaatgccgaggtacattctaaaagaataaaaaacagtcttcctgaacatggtaaaattggtgtgatgcaaattaccgataaacaatttggaatgatggaactattttatggcaaaaaacctgtagaaccagagaaaccatctcaacaattagagcttttctaaaaaacaggattaaaaaaatacttaaccaactctttctcagcactcaaacaaggcaatttttacatttcaaaaccaactcataactcacaacatatcaaacgattaactcgcggtatgttgggaattataagtaaaaatacaattttgaaagcaattcacaactgaaattattaaatcagttgcagggtgaatgttgggaattataagtaaaaatacaattttgaaagcaattcacaactatagccgtgaatagatctttcacgaagagttgggaattataagtaaaaatacaattttgaaagcaattcacaacccaaagataatgaaagtagattttgagaaagttgggaattataagtaaaaatacaattttgaaagcaattcacaaccagctgtaggagacgtcgcgtaaactgtagttgggaattataagtaaaaatacaattttgaaagcaattcacaacctgttcgcaaataagtaaagcttcagatttgttgggaattataagtaaaaatacaattttgaaagcaattcacaacctggtgatcttataaactgccattcacatggttgggaattataagtaaaaatacaattttgaaagcaattcacaactgaatgatgaattaaaaattgaatcaaaaagttgggaattataagtaaaaatacaattttgaaagcaattcacaactgattccgcttatacaatgagtggttcgtcgttgggaattataagtaaaaatacaattttgaaagcaattcacaaccagctcgattcacagctctattcacagctgttgggaattataagtaaaaatacaattttgaaagcaattcacaactggccatagacaagtttacctccgttctcgttgggaattataagtaaaaatacaattttgaaagcaattcacaacacatttcaatgaagccttaatttttacaggttgggaattataagtaaaaatacaattttgaaagcaattcacaactgtaattgaaaaagatatttcagatagaatgttgggaattataagtaaaaatacaattttgaaagcaattcacaactgaatcttccaattcgtgctatattatttagttgggaattataagtaaaaatacaattttgaaagcaattcacaactattttagtcaattcagtatttaatttttggttgggaattataagtaaaaatacaattttgaaagcaattcacaactgctggtttcaattttaaaactaattctttgttgggaattataagtaaaaatacaattttgaaagcaattcacaactatatcaggatctaatgtaacaggattaacgttgggaattataagtaaaaatacaattttgaaagcaattcacaacaacatttccatctactctcatttcaaatccgttgggaattataagtaaaaatacaattttgaaagcaattcacaacttaccaaaattcaacaggaggtaattcttgttgggaattataagtaaaaatacaattttgaaagcaattcacaacacttgaatttgctttattttcttccggttgttgggaattataagtaaaaatacaattttgaaagcaattcacaacagcttggttgttttcatctcccatactaacgttgggaattataagtaaaaatacaattttgaaagcaattcacaacaagtgctgcctgagctaatgtagcaatatagttgggaattataagtaaaaatacaattttgaaagcaattcacaacttggccgtggtcttcttttgttagacctttgttgggaattataagtaaaaatacaattttgaaagcaattcacaacgtactgctttaatgaatcaactccttgaaggttgggaattataagtaaaaatacaattttgaaagcaattcacaacataacatagaaaggttttattttagcattagttgggaattataagtaaaaatacaattttgaaagcaattcacaacttacaatcgccaattataatcactaaattgttgggaattataagtaaaaatacaattttgaaagcaattcacaactataaggagcaagcattaacccctcttctggttgggaattataagtaaaaatacaattttgaaagcaattcacaactaaagttccaaaacaatgtcggcttcatggttgggaattataagtaaaaatacaattttgaaagcaattcacaaccaatggcaagtttcagagtttataagagtagttgggaattataagtaaaaatacaattttgaaagcaattcacaacagtaccgatattgaactatgcaaagcttgagttgggaattataagtaaaaatacaattttgaaagcaattcacaaccagcgcctcgcagtggatcaactgcacacgttgggaattataagtaaaaatacaattttgaaagcaattcacaacctgaatctgacaggatagcaacagacgtccgttgggaattataagtaaaaatacaattttgaaagcaattcacaactgttgacttggttaataaaactaatggcatgttgggaattataagtaaaaatacaattttgaaagcaattcacaactaagtccaaacatttaagttgttttgtgttgttgggaattataagtaaaaatacaattttgaaagcaattcacaactcggaaagaaaatgcctcacatagatcctcgttgggaattataagtaaaaatacaattttgaaagcaattcacaacagccgatgccagcgcacaaagaatcgcagagttgggaattataagtaaaaatacaattttgaaagcaattcacaacccagttttcttatgaatcaaaatagaaattgttgggaattataagtaaaaatacaattttgaaagcaattcacaactataagaaactttgatcttcatttgcccggttgggaattataagtaaaaatacaattttgaaagcaattcacaactacgtatgccattttagttatatgttactggttgggaattataagtaaaaatacaattttgaaagcaattcacaactagcacgtatctttcttctttatttatgttgttgggaattataagtaaaaatacaattttgaaagcaattcacaactcctgtgtatttaacgtaccgtgttgttggttgggaattataagtaaaaatacaattttgaaagcaattcacaacgatcagaagctttgcgttcattgtttaaatgttggaaattataagtaaaaatacgatttgttccttttactaaagattcggatttaggataaacttactatttaattactcaaatccaaaagtaaatctttaaaattgaaactagaattttagacttttactaaaacaaattgttcgacgattcaattttttgagatgagttcttagtgttagattcttcctttcaatatgatttgtaccaaagcgttttactgaatgtaatttgtcatcaattagatatctatagttttttaatctgtcggtaaatatctttttcgcttctgataattttaaagtatccagaacacgatttaatgttttattagttcgtttgccaacattaaagctcacaacatttttagaattcttttccagagcataaaccagccaaataaaaattcgtttgtgtctgatataagtacacatttcatctacttcataagtttttcctttactgataaatggctgattaatagttttagcaattgatacaattctttttaacaaggttgtgtttgaaatttttaatattctcgcagtacttcttattcctaaaccttcttttgtaaactgaataacatttttgtttacatcagacttataagccatataagtgtaattttctataaatcgtttaccacaatttttacaataatattgttgttttttatttttagttgtaccatttttcgacacttttttctctctacatcttggacaactcataccatcactaaatctggaacacgaagtagcatttttgctcattttagttcttttaaggcaatattaaaacaaaaaagatgagcagtacttctcatctttaaattatttttcgctaataataactctatttcaacatgttagaaattaaaaatttcatatcactaactctgaaacactaccgatattttttacttctgacagaattaaactgatgaagtgttaaataattaccgaattcgacttacttataatatatgaatataataattcatcataaacactatcccattcaattatcttataataagcttttattgctaattcaaatcttacgggtgctacatatgatctgtaatataatttatcctcttcatcagctttagcttttcttatggaattacctgaaaaatcttctatataaatagggttcgtccctaatttataaaatggcaaatttatttcatcaagattagatttttcattatcaaatacaatccaatgtttatgatgaaatttagcatcaaaagtatttccaaataataatatattatctgccaaaatttctttaacactgggtcttgatttataaagcccttcaaagaaaactatagtatatgcatcttttttgtgagtacttagtatttgaccatagcatagtctattctcactaaaatgtacttcaaaaacatctccattttttaatttcattttttgctatttatttattacattttttttattagatgctccaccattcgggtttgatttattagttggtccattaagtctatctaatgcttgctgttcttttcgatctaatgatgttgggaatttaccacttgtactgccacgatctattattttaaattcaaaatccgcttctggatgagctctggcatgttcagcttgtctagctaaatatctagcctcacttttagcctgacctgcataaggtttaagaactaaggttctatctgttcttaaataaataattccttctggacttggaatactagcaaggattgaagccgccgctaataattgttgtggatctgtccattgacttaaagcttcactgaaacccattgctaatgcatttgcataagtaggattttggatgtaattaatagctttttgtctagaccattgtcttgtaaatcctcctaaaagattattcatttgatcaaccgtcttaaatccaagaaacttagccttcatgttgtcattccaatcaaccctgtctgacatagaagttggagttacatcaataaggtctttgaaatctttaagttgtgaatcaggtactacaacaacatcattacttccatcatttgtatctagcaagacattacctcttctatccgtgtattttgtttcaatcctattgttatcagacatttcgcctactaagccttttggatcaatataaatcactggattgttatgaacatactggtaaggtgtttcatcatcagtaacttctgcataaggatcaacattgaaccaacgtccaattgcaggatcaaaattcctaaacccatagtcataaaccccaagtcccatctcgtcttgaagctcttttccattgtacttatacttataaggatttgcaaaatttccttaatcgtaattagtgcgctttgtcagtcgttatgtaattcaaagaacttcctttccgtgacgaaaatagaagtaatcttacgaaattcctaactatatggcataaaaaaaacctatcaaatcaatgaaaggtttataatgcatttgcttttaaaatccgtctattcgaataatcaaaattttactttttaggagaatttttggatggtttcaacgatggcgtatttccaggcgtacctttgttatcacgctgacgttggtctggttttcctgttgaatctgctattctttttggtcctggtttaagagaattagatgacataatttaaaaatttagttggttatattattccaaatatagtcattttttcaaataggaaaatacttatttatcaactccctttgttgaaaactattagctttgaaatacttctctgtagcgccaggccacttatgtcccgcaagttcctgaacttgctcaagagccagtttatcttcattgagccagttgcagataacactcattcggatagtttgagggttgaggtttttatctgggaacaacagctttagcggttgaatcatggcatgaacactatcaacagttattggctttcccagttttccaatgatgagtttatcggttgcgcctctgagcattctgggtctgacttcgttgatgtatttaaaaaaaggcattatctgttgaggtaagagtctggcttttctcctgttgagattcttggaagctttgatgtagattgttcccgcatccaaatcaatatcctgaacattgagccgtataatttcatcgctggtcaatccttggtaaatcagcagattgataagaacgttgtttctggtgtccagattctcgtatcggttctcacgagttaaaagcaattgaagttcttctgaactgaacaaatcctgaacctgtaccgcctgattgctgttgactttgatattgagttttttgcagggatggtcttctctgtaaccgctcataaccagatagtcgtagtatttcttgatagccgagaggataacgacccgatattttgggttgggctgttgctttccgatttcttccatgtactcaacgatattcctgtatttgtatcgtttcgctttagggttcagctttaaaaagtgattaatggcaaataaataagtctttacggtctctttgcttagctcttgaagcagatagttttcaattgttattttggtcataggcttgctggtttaaaaggtggttacaggttttcttttcttgtttttgactgcatagatgtaggtcgtattgatttgcgaatgaccgagaaatcctcgtataaaatcaattcctgcgttcttttccatcagatggcttgcgatgctgtgtctcagggagtggagcattatgtccttctggattagctcataactgctggtctgttctgtcattttcttcaaggtatcgttgaggtattcgccattcatccgtttaccgctgtcatggataaaaaatgcatcttcaatctggctacttcctttcagcttttcataacgttcctcagctatgtatcttttgatgtgacctgcaaccatatcgctcataggaacttcacgtcttttgcttccttttccgtctcggacaatgagcatacctctggaaagctgaatatcccgtgtgttcaaagccaccaattccgaccttcgaagtccgcaaccgtatgccactgacagcaaagcccgctgtaaatcactctggcagtgctggtagagcagtttgatttcttcaacgctcagggcatttctggaatttccactgtctcctgaatagcttggaatgtagaaagctttttcaatctgcctgttctccaaaaggttcagaacaaagagtcctaaagcaaaaagatgaaattttatggtctttcctgctagagttccgtttcctctgtgtttgggtctgcttataagatgctcgtaatagcttaccgattctctgcctgttacgttctttatcttagtgattcctgaatcttccagccagataagaaattccgctacggcattctggtacattgtgccttttccctgtttgtagttcttcacttttacatagctgtcaaaatcattaaacaggttttgaaatccagaggtctgtattgttgttttcattggttttgttgttgttttttaatcatcatttgaaaactttccttatgcgcattttccaatttatggaacaccagcgttatattgccagtaattgcaggtactggcgtgttcttttaggtggttttcagctggtctaactgtctgctgaggtcttccttaatcttggctttcatcttctccagattgtcccagtagcttatcacatacttgaatcctttgtttggcgagccttcaaccgcctgaatgtactccagctcctgtagggtctgcatgtacttaaaggctgaggtcttgctgatattaagctcctgtctgatttcccttgtcgtaaatcggtgtgttgttccgttggtttggtttcttacatatcctttcagcttttcaaagaactgtctggtgctcttgtcaagttcatccactttgatgataatcgagctaaagaaaatctcaacagcttttctcacatcttcttcggtggctatcagtcttcttttatcatccatttttcgctggtactggttcaggattgtaatctgagcgacaaaattctgaaaatgggcgttgagccttctgagcattttggcttccagcgggagcataagcttatcggcaaacggattcacaacttcatagctctttagaactctcatgcagtttctcaagagctgtctggcttcctgttcacgcacagtattgctgatgccagcatttttcttgttctgcgcatcgatgattctaagggtctgttcaaggctttcatccactcccaagactaccgaacggctcatgttatcgtagtaaacctctgctttggtcgtggcggtaaggcttgcaaaatgggcttcaacctttttcattttccctgtggtgttccccagcatatccttaaccaccgtggaactggtcaggagcttattcgactgcatttccctgaatgcaaactgggcatcttcatccagtccgtcaaagtcttgaataactataaatttgtttatcaattctttgtttttgtaatgatag

SEQ ID NO: 1551 - DNA, 23675 bp, synthetic construct
  source 1..23675: mol_type = other DNA
  misc_feature 1..23675: note = Synthetic
gattttttaagaaagaagcacatgatttattaatagacaatgagtctttaggattataccaacgaattgttaatttaaaagacggaagtattataagcgataagtttttagattacgataaatttaacggactagatattaccaaaaaaggaaaagtaagaggcgacggctatttaaactttaccaaaatagaaatgaatccagatggaagttattttctattgggcgaaacatacggtagctatactctaggtttttattactatgggctatattcctttaacatcaataaagattttaatatggaaaaaatatacacctttgataccaaaagatctattggcacaaaatacgtattctcacaaactttattaaataaatcaggaaaagtatattttttctttgacaaaaacgaagaaaaagaaccagaattaaatatcctaaattttaattacgccaacaaagaatctgtggtcgaaaaaataaaaataaccaacaaagacagcgaaataaaaataataccagccaaaccaggttatgtagcatagtcgaaatttttaaagacccaaaagaaggagaaaaagcactagaactacgccttgaaaaactaaactacaaacgttaatttaattaaaataataaaaacatttctaatattaactaccctaccataagcaagccgttataaatctagggattgaatttagcaattaaaaaacaaaagagagattccttgcccaagaaaatctcttttgttttacaaaaaataagccatgcaaaccttaaaaaaaatatatccatttacataaaatgaagcctatacattaatagcctgtaccctattataaccctaaccacacaaaaacaacaccatttaagcaatataaatcttattgtatttatattttttggtacacttgcaagctacaacgttacaaaacaccccagactttttactaatatcaaaacaaaacctctagcaatactcacaactatattagtagtgtgactatctattattatttaaaactcccaaaacacgcaaggatcaatcctaaaagttgtggggaaatataaaaatgttgacttttgtattttaaattatatagaaatgtaagattcatttgttgaacttctcaagttattattgcccgaaataatcgttgaacttcttatgaaaaaagagaagaaatacttcatctatacctaagagagattaattcaatccctaaagaatatcgtcaatctaaattaagtttaaaaggattcttcgatgagataacagttcaggattttccaattcgtggtcaccaagtatatctgcacatcactcgtagaagatggctcaatgaagatactggtcaagtggtttttagagattggaatttagtagcagatgggactcgggtaacacaagagtttgcgtttttttaaaagaaatcaatagatttcaagccaaatgattgtaatgctatagggtctttctatggcgttagcggtaaaaatttacaataccaatacaaataatttttaagtgattttaaatcctgggatcaaataaaacacgcaaaagaatggctgctttttcctaaaaacatagccaagcgtttgtcaatagaccaaacttccttccctccttgaccgttttactaatattttataaacaaaaaaccctatccgatttggatagggtttctttaaagaaaggcgacgacatactctcccacataaatgcagtaccatctgcgcaggcgggcttaacttctctgttcgagatgggaagaggtgagccccgccgcaataatcaccttaagtttttaagtgaaaagtattaacttttgcactttccatagtaacttttgacttgtgtcgaagaactagtggttaatatcttaacatactgagataaagaagtattttttttttagaaagtttcttcccgagtcttgcaactcgggaaaagtgtgtacataagcttacgggttattagtactactcgactatgacattactgcctttacatctatagcctattaacgtagtcatctcctacgacccttaaaagaaatctcatcttgtggtgggtttcgcgcttatatgctttcagcgcttatcccttcccaacgtagctactctgcggtgctcctggcggaacaacagatacaccagaggttagtccaattcggtcctctcgtactagaatcagatccactcaaatttcttgcgcccacagtagatagagaccgaactgtctcacgacgttctgaacccagctcgcgtgccactttaatgggcgaacagcccaacccttgggaccttctccagccccaggatgtgacgagccgacatcgaggtgccaaacccccccgtcgatatgagctcttgggggagatcagcctgttatccccggcgtaccttttatcctttgagcgatggcccttccatgcggaaccaccggatcactatgctctactttcgtacctgatcgacctgtatgtctctcagtcaagctcccttatgccattgcactctacgcacggttaccaagcgtgctgagggaacctttagaagcctccgttactcttttggaggcgaccaccccagtcaaactacccaccaagcaatgtcccccacttatgcggggttaggcctcagataaacaaagggttgtatttcaacaatgactccacaacgcctagcgacgccacttcacagtctccaacctatcctacacatcatttatccaaggtcaatactaagctatagtaaaggtgcacagggtcttttcgtcccactgcgggtaaacggcatcttcaccgttactacaatttcaccgagctcatggctgagacagtgtccagatcgttacaccattcgtgcaggtcggaacttacccgacaaggaatttcgctaccttaggaccgttatagttacggccgccgtttactggggcttcatttcaatgcttctggttacccataacatctccacttaaccttccagcaccgggcaggtgtcaggccctatacttcatcttacgattttgcagagccctgtgtttttgataaacagtcgcctggacctcttcactgcggccagcattgctgctggcgacccttctcccgaagttacgggtctattttgcctaattccttagccatgaatctctcgagcaccttaggattctctcctcaactacctgtgtcggtttacggtactggtactattaatctgaagtttagaggtttttcttggaagcccttaggcgcactatctctttgcccgaaggctccgagtactatcgtatttccccaaaaaccgtggatttgcctgcggttcttataggtaggtacttcaacgaactattccgtcagttcgcggcgctttcatcactccgtcaccccatcacaattaatagtagtacgggaatattaacccgttggccatcgactgtccctttcgggttcgccttaggaccagactaacccacagctgattagcatagctgtggaaaccttagtttttcggtgtgcgggtttctcgcccgcattatcgttacttatgcctacattttcttttctaaccagtccagcaagccttacgactcaccttctaccctgttagaatgctcccctaccacttagagtaatctctaaatccatagcttcggtaatatacttatgcccgattattatccatgcccgtccgctcgactagtgagctgttacgcactctttaaatgaatggctgcttccaagccaacatcctagctgtcgatgcagacagacctcgttctttcaacttagtatatatttggggaccttagctgatggtctgggttctttccctctcggacttggaccttagcacccaagccctcactgttatgaaacattatatagcattcggagtttgtcaggaattggtaggcggtgaagcccccgcatccaatcagtagctctacctctatataactttacgcataacgctgcacctaaatgcatttcggggagtacgagctatttccgagtttgattggcctttcacccctacccacagatcatcccaagacttttcaacgtcaacggttcggacctccactatgtgttaccacagcttcatcctgtccatgggtagatcacacggtttcgcgtctaacactactgactaaagcgccctattcagactcgctttcgctacggatccgtgacttaatcacttaaccttgccagcaacgttaactcgtaggctcattatgcaaaaggcacgccgtcaccccacgaaagggctccgaccgcttgtaagcgtatggtttcaggatctatttcactccgttattcacggttcttttcacctttccctcacggtactggttcactatcggtctctcaggagtatttagccttagcggatggtcccgccaaattcagacaggatttctcgtgtcccgccctactcaggataccactatcgttatcttctattacttatacagggctatcaccttctttggctttactttccagtaaattctaattctatccgcaacaaataacgtggtcctacaaccccaacattgccgtaacaacattggtttgggctaatccgcgttcgctcgccactacttacggaatcacttttgttttcttctcctccgcctacttagatgtttcagttcagcgggtttgcccacctatcggtgtactatgtcttcaacatagtgggttgccccattcggtatctacggatcaagtcatgtgtgctgatccccgtagcttttcgcagcttatcacgcccttcatcgcctctgagagccaaggcatcccccatacgcccttattttgcttattgtactttttctagccattagccattagtaattagccattagtttttcaacttatgcctaataccttttgcctaatcactaaaaagtgttctttctactttttaaatattttcttatctcaatatgtcaatgaactttaataaagtattaagtgttttgtattaagtattaagattttgtcttaatacttgatactatcatcttgatactatctcgtggagaataacggagtcgaaccgttgacctcctgcgtgcaaggcaggcgctctagccagctgagctaatccccctaatagattttagattttttgaattcagattttagattttgaattgtagttctaatttcttttggttgaatcctcaacttctaaaatttcctttactttaatgaacgtatttatcctttttttaatctaaaatcttaattctaaaatcttaaattaatttgttgtctcggacagactcgaactgtcgacccctacattatcagtgtagtactctaaccagctgagctacgagacactcttctaattgataatcaataattatcaattattttttattttgaactaacagcaaagagtaattgagaattttcttatttataaaactaaaaacatgctctagaaaggaggtgttccagccgcaccttccggtacggctaccttgttacgacttagccctagttaccagttttaccctaggcagctccttgcggtcaccgacttcaggcacccccagcttccatggcttgacgggcggtgtgtacaaggcccgggaacgtattcaccggatcatggctgatatccgattactagcgattccagcttcacggagtcgagttgcagactccgatccgaactgagaccggttttatagattcgctcctacttgcgtagtggctgctctctgtaccggccattgtagcacgtgtgtagcccaaggcgtaagggccgtgatgatttgacgtcatccccaccttcctcacagtttacactggcagtcttgctagagttcccgacatgactcgctggcaactaacaacaggggttgcgctcgttataggacttaacctgacacctcacggcacgagctgacgacaaccatgcagcaccttgtaaattgtcttgcgaaaagtctgtttccaaaccggtcaatctacatttaagccttggtaaggttcctcgcgtatcatcgaattaaaccacatgctccaccgcttgtgcgggcccccgtcaattcctttgagtttcattcttgcgaacgtactccccaggtgggatacttatcactttcgcttagccactgagattgctcccaacagctagtatccatcgtttacggcgtggactaccagggtatctaatcctgttcgctacccacgctttcgtccatcagcgtcaatcaatttgtagtaacctgccttcgcaattggtattccatgtaatctctaagcatttcaccgctacactacatattctagttacttccaaataattcaagccaaacagtatcaatggccgttccatcgttgagcgatgggctttcaccactgacttatctggccgcctacggaccctttaaacccaatgattccggataacgcttggatcctccgtattaccgcggctgctggcacggagttagccgatccttattctcacagtaccgtcaagctcggtcacgaccgagtgtttcttcctgtgcaaaagcagtttacaatccataggaccgtcatcctgcacgcggcatggctggttcaggcttgcgcccattgaccaatattcctcactgctgcctcccgtaggagtctggtccgtgtctcagtaccagtgtgggggatctccctctcaggacccctacccatcgttgccttggtaagccgttaccttaccaactagctaatgggacgcatgctcatcttttaccgttgtgactttaatagtgtgttgatgccaactcactatactatgaggtattaatccaaatttctctgggctatccctctgtaaaaggtagattgcatacgcgttacgcacccgtgcgccggtctcaaatattgctattctacccctcgacttgcatgtgttaagcctgccgctagcgttcatcctgagccaggatcaaactcttcatcgtatattgtttgaagttagcattaatgctttcttctgtttttgatgctctagctttatttcaaatcttacgattcgctcttactctttattcttttgttttaaatatcgctatttaaaacggctgtcaattcaatatgtctaggaacttgtcttgcttttttttagcctcgtttgtgtctttatctgtttctcgaagcgggtgcaaaagtagtggttattttttaactggcaagctttttgataagtttttttgaaaatatttattctcgtttgcttttctttttcttaaccaatttgtcaatgaacttaatctcttgcggggtgcaaaggtagtttctttttgctattttcctaatctttttaataaaatttttgttttattttttttcgattcgtttttaatatgtaataagaactgtgtgccaatgcgggtgcaaaagtaatacttctttttggttttgcaagctgttttttgactgtttttttgctttttgctttaaggttttggttttgtggtggttatctttgtttttttttgaagcgttgctaattgttgggggtatttaaggctttattgacatcgattgcgtttctttttagttgtcctagtagggtttgtgcttgctttctcctgttttgctgggttgcttaatgttttgtctttatatttttactccttatatataggtgtaggggttttgtgttatggaatgttgaatcttataacgcgggtatctttattttttaatgggttttgtattattgcatttgcagtttgtggtttgcaacgcagatgacacggatttgataaattaaaaaaaatggatttgtttgtttttggaaatagctgggtcaaaattttgaatgctgatgtgctgatgtgctgcgccgcgtgagggatagcagcggaaatcctttttttgaggcttttcgccgataaaaaagattgtagcgcatagcccgacccgaccttttcgggaggggcacgtccaaaaaattaaaaattaaaaattaaaaaacataccttatatatgatacttgttttatggggtttggggatctaagtttataaacttgtgtggaaatattaaaagtaggatatttgtcgtttaaaaatagatagaaaggcaagattattttgtggaatttatgaagttgttattgtctgaagtgatagtgggttattttggattgatttcttataaaaaaaatatttaatccttgtgcgtttcttaatttcgtatttattaattgaatttaaaagcgataaatgaaaaaagtactacttgccgaagatgattttgattttgctgatgttttaaaacaatatctggagctatataattaccatattacttgggctaaagacggggaagaagccttactcctatttgagaatgaaactttcgatatttgcgtgtttgatatcatgatgccaaaaatggacggttttacactagcccaaaaaataattgatatgaatcctgaaacaccatttgttttcttaactgccagaaaactcaaagaagacaaactaaaaggattgcaattgggtgccgatgattatattgtaaaaccttttgaagccgacgaattggtcttgagattaaacaatattttgaaaagaggcgagcaaaaaaatcaaacaactttttcaggcgatgaaataacaattggcaattatatttttgatccgaataggttagaattaaagttaggtaatcatacacaaaggcttacagtaaaggaagttgctattattttgttttttctaaaaaataaaaacaaacgcataaaacgaaataatattttgcaacatatttggggaaatgacgatttcttttcaggaagaagtatggatgtttttataagtcgaattagaaaatatttctctagcgacaaccgaattactattgaaagtattcgcaatgtaggtttagaatttaagattataacctaaaaaaaaagcagacctataagccggattctgttctcgatattactaacgataccttatcatttatctaggcttgcaattactcacaagctccatctttctacccttcagcaacggacgagaagcccttaactaccgatatacttgaaatttcaccgcatagagtttacctggtttcactacagcattacctgtacatactttctgttgcacttgtcctaaccccaataaattggagccgacgggtgttacccgctatgcttctctctggtgtccggactttcctcccccaataaattggcgacgataaggcggtctgcgctgcaaaagtagtttttttaggagccaatcccgctatccgttgcaatcttttttcggcgaaaagcctcaaaaaggattttcactactatcggggctagggcattgcggtaataaaacaacattttcacaaaatacctaaataaaaaagcgaccctttagaggccgctttaaatgttttcacaacggaataatccttattgtgaattgcttcaaaattgtagtacaatactacaactttttttttatatataataaaaatgtatctaaataatattaattatcttacatttatagttaaaaataaatctagacaactagaataattaaaatataaccaagtacaatgaaaaaaatattaggattagatttaggaacaaatagtattggatgggcgtttataaatgaggcagaaaacgagattgaagtgtcttcaattgtaaatacaggcgttcgcattgttccacttactacagatgaagaatctgatttcaaaaaaggcaatacaatttctataaacgcagatagaaccttaaaacgtggcgcaagaagaggtttgcaacgtttcaaacaaagaagagaagctttattagaaacattcaacagaataaaattcattgcgactgactttgtttatgcagaaactggcgcagcgacaactttttcttcttatcaattaagagctaaatcgctgttgaagccgttacaaaagaagaattagttaaagttttattaatgcttaacaaaaaaagagggtataaaagcagccgaaaagcaaaaactgccgaagaaggcgatgcaattgacggaatgaaaattgccaaagaaattttcgaaaacaatttaactccaggacaatgggtttacaattctttatcaaaaggaggtaaatttattcctgatttttatcattccgatttgcagaaggaattagaaaagatagttcgttttcaaaatcaatttcattccgaacaaataaatgataaattattagcagacattcaaggaaaatcaagaacgcagacttctcaacatttttcaaaaacattgaatattcctcttgccgaaaataaaggaactagagaagaaaccaaattgcaacattaccaatggagaaatgaagctttggcaaatgaactcgatatgaaaattttggcatttattattactgaaatcaacaatcaaattaaccaatccagcggttatttgggtgccataagcgaccgaagcaaagaattgtattttaatcaggaaacggttgggcagtatcaatacaaacaacttcaagaaaatgtacacgctaaacttaaaaatcaagttttttaccgtcaggattatttagatgaatttgaaaaaatttgggaaactcaagcaaaatttcattctgaattgaatgaaaaattaaaagcagaaattagagatataaccatattctatcaaagaaaactaaaatctcaaaaacatttagtaagcttttgcgaatttgaaaaaggacataaagccattccaaaatcgtcccctttgtttcaagaatttaggatttggcagaatttaaacaatgttgttgttaaaaacgaaactacaaaagaggtatttgaattgagtgaagagttgaagcaattaatcgccgaagaattgcagtttaaagaaagtatgaccgatgttcagatgttaactttttgcgaactaaagaaaggaactcataccgttaatttcaaaaaaattgaaggaaacagaaccaatacttctatttataaagcttttgaaaaaatattggaagtagaaggctatgaaatagatttttctaaaatgaaacctttagaaataaaagaaactgttgctccaatcttcgaaactttaaatatcaatactgttattttagattttgacccaacaattcaaggtaatgattttgacaaacaaccttattatcaattgtggcatttattatattcggcagaagatgatgataaattaaaagaaactttaaaaaccaaatttggtttcaaagaaaatcaccttccgtttattttgaatattaatcttcaagccgattacggaagtttgagtgctaaggctatcaaaaaaatattaccgcatttgatggatgggcatatttatgacaaagcttgtttaatggtaggttataatcattcctcatcattaactacagcacaaaataacgatagagttttaaaggataccttagaattactcaagaaaaatagtttgcgaaatcctgtggtggagaaaatccttaatcaaatgattaatgtgattaatgctattatgaaagatcccgcaatgggaaaaccagatgaaattcgagtagaattagctcgtgagttgaaagcaaataatgaacaacgaaaaaaagctacttcggatattaataccgcaactaccgaacacgaaagaattagaaaattattgcattccgaatttaatatacctagagtaactagaaacgatattattagatacaaactttggctagaaactggaggaatttctttatatacaggaaatccaattaaagcgtctgatttattttccaaaaattatgacatcgaacatattattccaaaatccagattatttgatgatagtttttcgaacaaaacgctatgcgaaagacagctaaatattgacaaaagtaacaaaacagcttattcctttttacaagaaaagctttcagaaaatgattttgctgcatatgaaaatagagtaaaagatttatttaaaacaggaaaaataaaaagctatacaaagtacaaaaaactcttaatggcagataacgaaattccagaaggattcattgaccgtcaattacgagaaacacaatacatagcaaaaaaagccaaagaaattttattggaagtttccagaaatgtaaccgcgactattggaagcgtaaccgataaattacgtcaagattgggaattggtcgatgtgatgaaagaactcaactgggagaaatacgacaaattaggtttgacccatattgaagaaggcaaaaacggagaacgattgtctaaaataaaagattggacaaaacgtaacgaccaccgccatcacgcaatggacgcgataacggttgcctttacaaaacctgcatacattcagtatttaaacaatttgaatgctaaaacacaaggtgaaaataaagctaattcaattattggtatagagaacaagcatttatatcgagataaaaacaacaaattacgtttcatttctcctatgaaaaactttagagaagaagccaaaaagcaactcgaaagtattttgatttcgtataaagccaaaaacaaagtagttaccaaaaataaaaacaccactaaaaaaagcggtggaaccaatcagaaaattcaactaacacctcgtggacgattacataaagaaacggtttatggaaaattgcagcaatatgctactaaagaggaaaaagtaaatgcgagttttactgaagactatattcaaaaagttgccaaaaaagaataccgtgaagctttgttaaaaagattggaagaaaatgacaacgaccctaaaaaagcatttacaggtaaaaatgctttaaacaaaactcccatttatattagtttaaaggacaatattatagttccagaaaaagtaaagacagtttggttagaaaccgattataccattagaaaagatattacacccgatttaaaaattgataaagtaatcgatgttggtataaaaagaatactccaaaatcgtttgaacgaatttaatggagatcctaaaaaagcatttgttaatctgggcgaaagcccaatttggctcaacaaagaaaaagggattgctataaaacgtgtgactataagtggtgttagcaatgcacaagctttacacaccaaaaaagaccatttgggaaatgaaattttagacaaaaacggaaacccaattccagtagatttcataagtaccggaaacaaccatcacgtagccatttacagagatgaaaaagggaatttacaagaagaagtggtttcattttatgacgctgtcattaggcgaaatcttggattatcagtaataaataaaaaccatgaaaaagggtgggaattcttattttctatgaaacaaaatgagttttttatatttccatcggatggttttaatcctcacgaaatagatttattaaatcctaataattatcatttgattagtcctaatatttttagggtacagaaaatttcaacaaaaaattatatgtttaatcatcatctagaaactaaagctgttgatggagaaatgttaaaatcaaaaaaagaattatctaaaacaagttatcatttcatccaaactccaacaaatttgaatggaattataaaagtccgcatcaatcatttaggtaaaattgttcatttaggagaatattaatttctagattataaattaaataggattgggctttagcctattcaacaaaaaaataggaataaacaaaaaggctttagccaaaatatttcggctaaagcctttcttaaatcaattattatccgcctccatttaaaaatggaggcaattgaaaaaggagtatagagttctaaaatcataatcgatacaattgataaaaaattaagataaattcaaattcatagaaatgggttttaaccaatttaacaatataaataatcgagatttactttagccaaaatatttcataaaccatttttaaatcgcaaaatatgataaaacgcacccttttttttggcaatcccgcttatttaagcaccaaaaacgagcaaattgtaatttcttatcccaacaaggagcaagaaaccaaaactgtggctattgaagatattggcgtaatcgttttagaaaaccaacaaataaccattaccaatggtttgttagaaaaactaaccaacaacaacgtggcgttaattaattgcgaccaacagcatttgcctattgggttgttaatgccgctcaacggacatacagaacaatcggaacggtttaaaaaccaaattaacgcttctgttccacttaaaaaaaacttatggcaacaaaccattagtgccaaaatcatgaaccaagcaggattgcttaaagaaaaaggaatcccgtgccgaaaaatggagctttgggcaaaagaggttacatcaggagatgcgcttaatcacgaatctagagcagctgtattttattggcaaagcctgattacggtaccaaattttaccagaggacaaaaaggaattccgcccaataatttattaaactatgggtatgcaatactgcgagccattactgcaagagccattgttagttcgggcatgttacccactttaggcatctttcatcgcaacaaatacaatgcctattgtttggctgatgatattatggaaccctatcgcccatatgtagatttgatcgtgtgtcatattatagatacagaggattcatacgatgagctgaccatcgaaatcaaaaaacatttactcagcattgccacaattgatgtatgtatagacggaaaaaatagccccttgatggttgccatgagcagaacaacacattccttacaggaatgctttgcgggagccgcaagaaaaattttataccctatttatgtatgacgaacattacacccgtttaaaccagtatagaagtttgtggatattagttttttttgacttacctaccgaaacgcggaaagagcgtaaaattgccagtgaatttcgcaagaaattattggacgatggtttttctatgtttcagttttcgatctatatacgattttgtgccagcagagaaaatgccgaagtacataccaaaagaataagaaatagtttgcccgaacacggcaaaattggagtaatgcaaataaccgataaacaatttggtatgatggagcttttttatggaaaaaaacctgtagaaacagacaaaccttcgcaacaattagaacttttttgaaaaataggatttagaaatattagacctaccagaatatcaacacacaaacagaactgttttttaatttcaaaataagcatataaccaccaacatatcaaacgattaactcgcggtatgttggtaattataagctaaaatacaattttgaaagcaattcacaactgccaatgagtggtgtagtgtacttttgaagttggtaattataagctaaaatacaattttgaaagcaattcacaactaagtagattatatttttttgtgccgttggttggtaattataagctaaaatacaattttgaaagcaattcacaacgctaaatatttcttttattttattttgcttgttggtaattataagctaaaatacaattttgaaagcaattcacaactattgaacagcaattttcatcagatgatgagttggtaattataagctaaaatacaattttgaaagcaattcacaactacggcattcaaaccccccatctattactgttggtaattataagctaaaatacaattttgaaagcaattcacaacaaagacttatttaagtctaaagaagtgcctgttggtaattataagctgaaatacaattttgaaagcaattcacaacgaatgcgtgcgctgtatgtatttcgttttgttggtaattataagctaaaatacaattttgaaagcaattcacaacaatgtgtctattgtgaatacattacctactgttggtaattataagctaaaatacaattttgaaagcaattcacaacacggaataaacggaaacgagcaacttattagttggtaattataagctaaaatacaattttgaaagcaattcacaacattacagttgctttaaataaaaagtaaagttggtaattataagctaaaatacaattttgaaagcaattcacaacaaaacaatcatctatgttgctaaatcttttgttggtaattataagctaaaatacaattttgaaagcaattcacaacgaacacataacaggacacaaggcattggctgttggtaattataagctaaaatacaattttgaaagcaattcacaacactttgatatacgacatctcgcttactggagttggtaattataagctaaaatacaattttgaaagcaattcacaactaagttttcctacttaaccattttttaaaagttggtaattataagctaaaatacaattttgaaagcaattcacaacatagtactttgatttcacgtgcgaaaacggttggtaattataagctaaaatacaattttgaaagcaattcacaacggtggcaatgtgtattcaaacacggatatagttggtaattataagctaaaatacaattttgaaagcaattcacaacggagctggttcgggtacaattacattaaatgttggtaattataagctaaaatacaattttgaaagcaattcacaacattctctttcagtttttcgatattgtttttgttggtaattataagctaaaatacaattttgaaagcaattcacaacctgtcgtacgctctagtattagatatatctgttggtaattataagctaaaatacaattttgaaagcaattcacaacagcgtaagctcgtgcgcattttccatcgctgttggtaattataagctaaaatacaattttgaaagcaattcacaactaatatttagcataaatttataatcgtcctgttggtaattataagctaaaatacaattttgaaagcaattcacaacagtgctaccttcgataattagcgcattaatgttggtaattataagctaaaatacaattttgaaagcaattcacaaccacaaatggggaatttgacgaaaacaaaagttggtaattataagctaaaataacccgttgggtgtaattaaattatttgatgacactatcccgcaaagtgtgtaagttaaaaagttaggcttggattttataatctgagccttttgtcaaatataagattaaattgatttaaaacaataccccaattttgtattggcattgaccatttttttgttgcttcttttaaagctaaataaactgattttagaaccgcatcatcagtagggaatgacattttatttttagtgtattttctaatttttccatttaaattttctattaaatttgtagtatagattatttttcgaatttctagcgggaagtcgaaaaacacggttaattcgtcccagttttctctccaggatttgatggcataaccatatttggattcccatttttgagcaaaatcttccaaagctaatgcggcagcttgttttgttggtgctgtataaacaagtttcatatcggttgtaaattgttttttgtctttccataccacatatctacaagcgtttctaatttgatgtaccacgcaaatttgtgtttgtgattcagggaaaacagcacggattgtttgggtaaatccgtttaagttatcagtagctgttatcaaaatatcctccactccacgagcctttaaatcagttaaaacattcatccaaaagctagaactttcattttttcctagccacataccaagaacttctttgcgtccttcacgattaagtccaacagccaaatagatggttttattgatgactttagagttctctcttactttgaaaacaataccatccatccaaacaattaaataaagatcatctaatggtctgttttgccaagttacaacttcgctcgatactgcattggtaattcttgatatcgtggatgtcgaaatatcaaaatcatacatttcttttatctgttcttctatatcactaacgctcattccttttattttagccccttaataaatcggagtgatattttaaatttcaaatagtacatttgagatatgaaatacaagaaatggagcttagaagaaaagctagaaatcctatcctcttcagaagaattaggagttgttgaaacctgccgcaaatacagcgttagcactggcactttgtatagctggaagaagaaacatgagaagcagggagaagctggtttaaaagtaacttatgatactagtagtaaagagctaaagcaagctgaggaagaaaacagaattctacgcaaattattagctaacaaggaaatcgaattagaaataagtcgtgaacttttaaaaaaaaagtttggaacatccgatccaagaaagatttagtagacaatatttatagtaaacataagattagtaaaaccaaaattatcactatgttaggcatggttccaagtagttattatcgaagaccaggctcaggtaagaaaggtaataaacctagtgaatttacttttaatgaatctaaaggatatgtaagtcaagatgttgttattgaatctgttaaatccattttaagtaatgaatttattgactgcggttaccgtttaatgagttgttatttaaaacgagaaggttacttaattaatcataaaaagctgtaccgaattatgaaagaggaaggtttattgaaactagaaaaccgaataaacaagagtggttctggtcgtaaatttgtaaaatatagaaaagtaaacaccactaaaccttttgaatgtttagaaatggatattaagatggtttggattccaaacgtaggtaaaaatgcttatttactatccataatagacgtacatactcgcagaatattaaaagattttttctctttcaatatcaaacaagacaaagtaattgcttttctttcggatttatttttagaataccaataccctgaaaatgttgtgataagaagtgataatggaagccagtttattgccaaaagtgttcgggaataccttggatttattggagttcagcaagaatttacccatgtagcaacaccagaagaaaatgcgcatattgaagcctatcatggaatactaaaaaaagaagtgttccaaagagttgattatagaacttttggagaaattgaactaatactaaaaagatatgtgattttttataataataccaggctacatggccttttaggacgcattaccccaatagagaaatggaaccaagataaacatctaattttaatgaaaaaattaaccgcataaataataatcgaaatttagaataatactcttgttttataggggtcaaaacaccatttacttttatgatgttttacgtcgacctcaattgcgatttcctgtgtttgtggttgaattattttaatttcaattccttttgatctaaatatttgtttaacatttgaatatattaataatccattataatcccaatcacaaaaataatatattggtagttttaatttgtcttgagaaatatcttctaatggtttggtattattacctccaacataccataactctatattatgatttttatattctagtggaacttttagacaatcaagattctcacaaagcacaatgacttttggattaaggcaatcaactacaaatctccattgattattttttgggtctttttctggaaattcagcaagttctaatatttttaaaattgcatttttaacacttaatttattagataagcatttagaattttgatttttataaattaaagcagataactttttctctgtagttacattcttttttaattcctctttgttataaaaaacaaacattaatgcttttatatcttcatcattaaaagattttttagcatcattttctattccagatttttcaaaaaaattattataatattcataggtttctaaaaattcctgctggtaatactcattaaatcttgatgatgcttcgataatagaatgatttccaaccttatattttattagtttcttttgtttaaaaatgacctgattaataaaatcattgttggttatttttaatcttgtttgctttgatttataaagttgatgcaatccttttatatgtttccattcaattttcttcatattttaattgtttgatgatccaaaaattggcactggagtgtagtttatattttcatcttctaaactattgtgcaacaaataaatattttgattttctgcatcaattttattgggatttatcgataaagataaaatttggtaatcatttgcttttgcaatattataaagcatatcaaaattacttccaagaccttctgcctcatcaatagccatataacgaattccttttcttattttcgatttcgaagttttatcgattaaagataattttgccatacataaaagtgctattgctgaatatgtttgacttgtactaccagcagttttgttcccttgtgctgatttaatagaaaatttcaacccataatatgattttggattcaataaatccctaacttctagtttgttcgctcttgttccaccagttcgataaaatgcttcttttaatttttcttccaaagttggaaaactttctaattctgttgaaaatgttttaagtgtttcaaataatgattcatccataccgtattgaatatctttatttatttcttcggtaaaattattcatccattcttttttgaaaacattatcatatataacatctaaatcaactttgtgacctccagttattttcttttcttctgaattcaaaaaattacttattattcttatatccattaattgactacttacttcatttgaaacatcgtcgataatctcacttaatttttgaagctttcggctatttagctttctatttttaatatttatatttcgtaaataattagaaatattttcaattatatctgcgtctaataaatctttttcatcaaatatttcttgaggtagaatttctctgcataaaggactaaaatcgccagtgtctttatattgattattcttctgtttaagaaaagtatagactacaaagttgtagtttgaaatataatcattattagcattattagactttttttctaattcattaatttcaatatcttcataaatatccattactatttcttctgtaaatagattagggttttgactataaatctcatttttcttatgtttaatatttgaaatttttaaatctatttcctttagagattctgtttgattattattacttatttgagtattgtaagcttttttcaattctatataataatcttcggcttcgtttaattctttatttaagctgtctaaatcaagatttttagttgatataaaattatatttatttttataatcatctatttcatcaataattattggtgttaaaaatgattctaattcacgttctagattgatatttagattgtctaattttcgcttttcgacttctaattttctgaaatttgttctcgcatttgtaaactgttcattaatttctttttctcttgaaaaagcatcaaaataatcatcaaagaagatatttgaaacttcatacatttcgtgattttcaagttgttcttctagtccaatatctgaattaaaagcaagtatataatcatcaggactttctaattgttctaaaacttctatgagcaattcaatgtttgctaattttctctccaaatttaaaatgtcttcttcaatcgtaaaagtttgtttttgaaaatattccttaatttcttctttatcctccttgtcaaaaattggtgattcaattaaagatatgtgttccattaagccatttagatcaatccaaaaacctttgtcatttttatttgatattttaagattttctattaattgatttggttccggaatatatcttaataaatcatctaatggagcatctacttttatattttcattgtggtatttatgaattatactttcctggaataaatctaattttttagtttgatttaaagcccaatgtgctaatgattttttatcttcaatattatttaaagcttttaatttatttttaatttctagctcttttttgtaaacttctgtttttgaattaatttgtacaagtacatttttaccctttaaattttcatttgtaaaaaaagtcaaaatgttttttgattttaacttttcagtcaattctcttaattgtgttatttgaagtttattttgatggtatttattatatttttcttttaaaatttctttttcagaacaattaaaatcctgtaaccaagagaaaaacttttttaatttcttttcactttcttcccatttatttttttctataaatgcagtttcccattttggatctattatttcaatttcttcttttgttgaaattattttttcttggacaattgtttttaattggatgagtattttggaactatcttcataaagattaattttctctcttatttcattttctgaattagtaatttcctttgaatagtggttaaaagaggctaataagtaaatctgttcgtttttatctttttcatttttcaatttcaacaattcacttaacgcattttgcttatcggtgagtaattctatttcatttaagtttttatcaaattctttggtgtcaccattcaattctttgacggtttgattaaatttttcaagtaattctttttctttttcttcaccaaataaaaaactttgtaatttttcactcttattcatatccaaagattctctagaaaatgcttgaataattttggcataattgtctaaagttttattactgatagacaaatcaataggcaatatctcatttttgaaaagaattttatgataatttgaagtcttatgccaagattcacaagttagttgcaaagtattactgatgtgttctttcaaattttgaattggtaatatttgattgtttttgagaaaatcggaataccctaaaacagtttcaaaaggaatcaattgagtatcgtcatcaaaattattaccctcttgaataataaacatatttgaagtaccagcactttctaaataaataccaataactataaatttatttttctctacctcaacatttataaaagcataacccatatcagttccattaccatcagttcttaaaaccatagttttaggttctctcgtacttgtaccttttgtaggagaatgaaaagccgaagtaccaacacaaattaattgtaaaatatcagaaatcatacttttaccagcgccaccttcgccaacaaaatcagttctgaacggattaaaatcataatcaaatccttgatggtgtactattcctaaagttgatagtcttttaattattggatagtctttcatttcaattcgtttagtgtttcctctatgtttatgatgtactcttcatatacttttagcaatctgtcgaatgcaggtaatgtatgaaactcatctttatctaatgttatccaaccaatttttttaaattcttcaagagccgattgaatcgttttatcaattatttcatcattgtaattaccaggagttgtattctttgatttagcaattaaagtataaataccttgcttgtagtcttcacattcaagacggattttttcttttaattttt

SEQ ID NO: 1552 - DNA, 23594 bp, synthetic construct
  misc_feature 1..23594: note = Synthetic
  source 1..23594: mol_type = other DNA
tattgccattttaattgaacataccgctggaaaattcccgctttggctgatgccagaacaagctataatattgtctttgagcgagaaatatgaaatatatgcaaaaaagttttaagtctgctagaaaatcacgaaattcgcgccctgattgacaatagaaacgagaccatcgggaagaaaattagagaggctgaaatgcaaaaagtcccgtttatgctgattgtaggcgaagaagaagaaaaaaacgaaaccctatctatacgtcgtcatggacaagaaggaaaaggaaacattaccgttacaattgaggagtttgctgcaattgtaaacgaagaaataagcaaaacattaaaagtatttaccgtttaacttaaattataaagtcatagcaataagaagcaatagaggttaccaacctcgagtagaaaaaaagatgcccacagaataaataaccttattcgtggcgtgcaagaagtaaggcttgtaggcgaaaatattgagcctggagtttttaaactttctgaggccttacgattagctgacgaatttgaactagatttagttgagatttctcctaatgcagagccgcctgtttgcaaaataatggactataaaaagttcgtttacatgcaaaagaaacgtgaaaaagaactcaaagcaaaatctactcaaattgtagtgaaagaaattcgttttggtccacaaaccgatgaacacgattatgagtttaaacgaaagaatgctgaaaaattcttgaaagaaggttcaaaattgaaagcatttgttttctttaaaggacgttctatcatctataaagatcaaggtcaaatcttattattaaggttagccacagatcttgaagaatttggaaaagtagaagccatgcctgttctcgaaggaaagagaatgattatgtttattgctccaaagaagaaaaaatagttaaaataggcataagtcataaggcaaaagttgcaaaactaatggctaatggctaatggctaattactcaaaataagtaagtaagaataaattaaaacactaggaaaaaatgcctaaaatgaaaaccaaatctagcgccaagaaacgttttaaagttactggttctggaaagattaaaagaaagcatgctttcaaaagtcatattttgactaaaaaatctaaaaaacgtaaattagctttgacacattcagcgctagttcacaaaacagatgagaaaagcatcaaacaacaattaagaattatctaataagccattagtaaaaagccactagccactagttttaaaacttttgcctattgcctaatcactattgcctagatgtctttaggttaaaaattatttaaataaccttggagtacggccttaagttctcttgattcaattcgggacgcctgctacaaaaaaaacagaaaaattatgccaagatcagtaaattcagttgctaaaagagcaagaagaaaaaagataatgaagcaagccaaaggtttctttggtcgtcgtaaaaacgtttggacggttgctaaaaatgcggtggagaaagccatgtgctatgcttaccgtgacagaaaagtgaacaagagaaatttccgttcattatggattcaacgtatcaacgctggagccagattagaaggaatgtcttattcagaactaatgggaaaaataaaaaagaacaatatcgaattgaaccgtaaagttcttgccgatttagcaatgaatcacccagtagctttcaaagcaatacttaataaagtaaaataaacgttttatcaactcgatttaagattacttacttataaaaaaatctcgctttttgcgggattttttgtttaatgtctagactcaatctttgaattgtcgataaaaacaccccgtttctttttgaactattaaaaaccaaactaggtcttctgtttcttttttctcgctgcaggaaacaaaacgttattcagaatcaatcgatacccaggcgaattaggatgcaaatcgagtactgttacgggatctcctactctatgctgataatcttcgggatcatgaccgccataaaaagtaaacattcccttgcctttctcgccatgaagataacgtgcttctccattaagttcacaggttcccataattaacacattcgattttataagtgcttgatcaaaagcggttgtttgccccataaaccctttgattaattgggtgtgattttgacataacatactaggaataggatcccattttgccgagaattccatcaaagtgaaataatctttctcctttgagattttacgtttatccgtcatgtcaatgtccgagaactcatatctttctgggtttctttccaaaataaaatccttgaatgcaaaagcattggcataatttatcttggtttgatagttcgcctcgcttgcatctccgtcaaacatagactcacaaatatcgactccttctgcagtcatcgcaatatcaaaactatctgttgctgaacacatggcaaacataaatcctccaccaataacaaaatctctaatttttttggctacggctaatttttcctccgaaactttcttatagcctaatttttcagataaaacttctgcttctcttttttgttcgatgtaccaaggcgaatttctattggatccaaaaaattttccatattgtcccgtaaaatcctcatgatgcaaatgcaaccaatcataaagcaagagttggtctcttaaaacttcttcatcataaatggatgtaaaaggaatttcggcataagtcaaaaccagtgtcacggcgtcatcccacggttgctttcctttgggcgtataaactgctattttgggggctttttcgagtgctaccgcctccatattttgggagggacttgctattaattccaaaatttgattcgtttcggcatcactcaagacttcaaaactaacccctcgaatttgacattccttcctaatttcgggtgcatcgaccaataaaaaagaaccgccacggtaattgagtaaccaacttgttttgtattttttttcgatacaccaataagttataccataagctttcaaatggttttgttgtgtggtttcatccattggtaacaaaataaaagaggccttcgccgaaaaggaaatcaggattaaaattattagaaatgtcttttttgaaaccatttttatatttatttgtgccaaatatactagtttttatttgacctaaaggacaaaaaaaatcgcctgaaatggcgaattttaatttattttctagaatggcatatcgtcatcgtcttcttcatttaaattgcttccaaaagcttcgttaggagatggaagatttttagtttgaaaaggattgtcgtcgtgattcattttagacggcaaatcatcaaaacttccgctataatcttccaaattatcgaattttcctaggtgtccaacaaatttcaaccgaacgttttcaagagaaccgttacggtgttttgcaataataaattcagcttgacctgctgatggcgactgctcatcatcgtcccattcgtcaattttataatattctggtcgataaataaacgaaacgatatctgcatcttgctcaatcgctcccgattcccgaaggtcagaaagcaaaggtcttttgctagatccacgtgtttcaaccgcacgagataattgagataaggcaatcacaggaacacttaattcctttgccaatgcttttaaattcctcgaaatcgtcgaaatttcttgctctcgatttcctccgccttttccgtttccgccagcagtcatcaattgcaaataatcgacaataataatttttattccgtgttgcgaggctaatcgtctcgctttggctcttaaatcaaaaatagaaagcgatggcgaatcatcaataaaaagaggtgctttttctaggtttttaacttttacactcaattgttcccattcgtgcttttctaacttacccgttcttaacttttcagaggataaacccgtttccgaagaaattaatcgagtaattaactgaacagaagacatctctaatgaaaataacgccacaggatgtccaaaatctatagcgatatttcgagccatcgaaagtacaaaagccgtttttcccatccctggtcgagcggcaataataattaaatcactttgttgccatccagaagtgacggcgtcgagttttgtaaaacctgtttctacaccacttaatcctttttgatttgcaatttcttcaattctttttttagcttgcaaaaccaaactttgagccgtttcagaactgcgttttatatttccttgggtaacttcatagagtttagattcggccttgtctaataaatcaaaaacatcggtagtttcatcataagattcctcgataatatcggtagaaattcgtatcaaactccgctgaatatacttttgaagaataattctggagtgaaattcaatgtgtgccgatgaggaaattttttgggtaagctgaatcagataaaaatcgcctccagccaattctaattttgcattttttcgcaactgagctgaaacggttaataagtcaattggctgcgtgtctgtaaacaactgaacgatggcttcaaaaatatatttgtgtgcttctttgtaaaaagcatcgggttgcaaaatgtctattacctcatcgactccttttttgtcgatcatcatcgcgccaagcacagcctcctctaagtctaaaacttgtggtggcaacttgcctttttcgaggttaatgatggtcgatttatctattcggattgggtttatatttttgacgttttccatagagcgaatgtagcaaaaattaaaaaaacattactattgacttattacaaataattgtttataaccaatcgttttttgttaataaaccaaaaaaaatccgaagtgataaggcttcggattaaataatttattgtaagattttactctttataatcacccattttactgtatttgtccatcctctgagcgactaattcctgtgttgataagtcttttaattccttgtatcctttcatgatatattcctctacagttttaaaggcagtttctctgtcaaaatgggctcctccaagaggttctggaataatatcgtcaatcaattcttgttttttcatatcagacgaagtcagttttaaggcttcggctgcttgttccttataatcccaacttttccacagaatggaagaacaagattctggagaaattacagaataccaagtgttttccatcatatacactctatctccaacacctattcctaatgcgccaccagaagcaccttcgccaactacaacaacaataattggcacttttagccgaaccatttcaaagatatttctagcaattgcttcgccttgtccgcgttcttcggcttcaattcctgggaatgcccccggagtgtctatcaatgataaaacaggaataccaaatttctcggccattttcatcaatcgcaaagcttttcgatagccttctggatttgccattccaaaatttctatattgacgtgttttggtattatatcctttttgttgaccaataatcataaatgattgtccgcctattttgcctaaaccacctatcatcgctttatcgtccttaaagcccctatctccgtgaagttcaaggaaagtgtcgccacaaagtgcattaatatggtctaaagtatatggtcttctaggatgtctagacaattgtacacgttgccaagccgtaaggtttttgtatatatgttttttagtttcttccagttttttgttgatttgtttgcacgtatttgttacatcaacatctgattcctgaccaattacaagacatttgtctaactgatcttcaagctcttttatgggaagctcaaaatctaaatattccatgagatatgtatgtgtttgtttttgatttgaaatgcaaatataaaatttaaaattatcaaaactgtttattcagcatctaaatgcaattgaattcttaaaaaaaatccttgaaaataactattcttcatccgtgtaatagtgtttaataacgccatttaggataaccgtaatcacgattagaatggctccaatgtaaaactcagcactcattttttcttttcctccaatgataaaataggccaaaataataccataaactggctctaaactagttgttaacattacggtataaggcgataattgctgcatcacttttaccgaagccgtaaaagcataagcggtacaaatcgaggctaaaattaaaattaatacccaatcgttaggactcaacacaaagaaatcagcaacgaatttatgttcgaataaaaaataaatagagataaaaactacccccgacataaattcataaaatgtaattactgatgattcatgctgatgaattaatttcccattcataagagtaaacaaaacaccaataattatcgacgccaaggcgtatactataccttcaaaataattcatttcggcctgcaaaataatgcctagccccgcaataatgatgagcccaaaaaagacttcgtaccaaaggatttttctaccataaaaaataggctccaatattgaagtaaaaaaggctcccaacgaaaaaatagacaaggtaacggatacattagaaacatgaattgccttgaaaaaaaatatccaatgaacggctattagtagtccagcaaaaatcaatttaaaaaattctcgaacaggaataacaaatgatttcttttttagaacaataaagaaaaataaaaaaacaccagcaaaaagcattcgataccaaactaaagcttcggctgagattgaaatcaaggcccctaatattgccgtgaacccccaaataaaaacaattaaatgaagattaaaataggttcgcaatttatcgtttcgcatttcgtaataaaaaaattgccaaaattccgaaaacaaggttcggaaaccaaacagctaataaaggtggaaaacttgatttttcggctaaggttccaaatatcttatcaaaaacacaaaagcaaaggctaatgcaatgccaatggccaaactcaatcccattccgcctctccgtttcattgacgaaactgccacagcaatagtggtaagaataaatgccgaaacaggaatgctatattttttatataaaaccaccaagtatacatttatatttgacgagccccgccctctttccttatcgataaatcggtttaattttcctaaatttaatgtttcggcgatataaaccacaggcgttaaatcctcaaggtcaaaactaaacttagcatctcttttttcggctttttcaatcttatcggcaaattccccaaccgttcttttagtataatcaaacatggtgtagtttttggttttaggattccattgtatcctactcgccgtgattttatattctaatttatcttttaaaaatttctcataacaaaaactgtaagctgtttttgaaaccgtattaaaactattaacatagataaattcattcttacttatttgtcgatatacatccgtattatcgccgcgcatcagctcttttcctccagttctgagataagtatagcgaaaattattaaatccctcactagattttggaacaacaaaaaagcccatcaacaaaacaaaaatcgaaataatggtagcaccaatgataaagggtctcaaaaacctcgtgaatgaaattccagaacttaatatggcaataatttcggtattattagccaattttgaagtaaaccaaatgaccgataaaaacaaaaaaatgggaaataacaaattggtaaaataaatcgtaaaatgataataatatacggcaatatcaagaaagggaattttattttcgatcataaaattgattttttccgaaacatcaataataattccgataggcgcaaacaaagccaacattaccacaaaagtcgataagtatttttttaggatgtatttgtctaatatattcatattctttgtttaaggtttaaagtttaaggtttaaagtttgctataaataccaactttaaaccttaaactttaaactaaaaaattacaatctctggctcatattacgaaccatcatctctttccaagttctaaaatctccagctaagatatgctttctggcttcacgaaccaaccacatataaaaaccgagattgtgtatggttgctatttgttttccaaggtattcgttggcggcaaaaaggtggcgcaaatacgcttttgtatattccgtatccacaaaagtatgccccatttcgtctattggagaaaaatcatcttcccactttttgttctttatattaatagttccaaaggcggtaaacaacatcccatttctagcgttacgcgtaggcatcacacaatcaaacatatcgattcccagggcaatattttcaagaatatttataggagttcctacccccattaaataacgtggtttgtcttcgggaagaatttcgcaaaccacttcggtcatggcatacatttcctcagcgggttcccctacagaaaggcctccaatggcatttccttgttgcccagaatttgcaatatattctgctgattgttgacgtaaatctttataagtacttccttgaactatcgggaaaaaagtttggtcgtaaccgtattttgttggcactttttctaaatgagtaatgcatcgatctaaccagcggtgggtcatgtgcatcgaacgctgcgcgtagcgataatcgcaaggataaggtgtgcattcgtcgaaagccataataatatcggcaccaatggttcgctgaatttccatcacgttttcgggtgtaaaaacatgataagagccatcaatatgcgatttaaactttactccttcctcctttatttttcggtttgccgaaagcgaatacacttggtaaccgccagaatctgtcaaaatattacgatcccaattcataaatttatgcaagccacccgctttttctaaaatttgagtttgcggacgcaggtacaaatgatacgtatttcctaagataatatcaggatttatttcctctttcaactcgcgttgatgcactccttttaccgaggcaactgtccccacgggcataaaaataggggtttcaataaggccgtgatcagtagtaatacttcctgctctggctttagtatgtgggtctttttgtaataaatcaaacttcataaggtcttttttcagtgtgcaaagataatttatttaagaattggaattgatatttagaattttatttagagttcttgttagaaagggaaaaaagcctctcttgaggttcatttaaatgtttttgttcactccttttatcttgcattttttagcattcgtaaaacatttaactaaaatccatagaaaaaggcgagtctccccgccttagatgttttcacaacggaataatccttattgtgaattgcttcaaaattgtattgcaataatacggaaaaatatcttacacatttattttatttgacaatcctatttaattattttttcgtaagtttcgggctacttaaaattgaatacaaatgaaaaaaatattagggttggatttgggaacgacatctattggctgggcatttatcaaagaagcagaaaatgagaatgaaacttcatctattatcaatacaggggttcgtattgtgccacttactactgatgaagaagccgatttcaagaaaggcaatacaatttctataaactccgatagaacattaaaacgcggagcaagacgtagtttgcaacgttttaaacaaagaaggagtgctttaatagaaatttttaacaaaataaaattcattccaacccattttgtttatgcagaaacaggttccgcaacgactttttcatcgtatcaattaagagcaaaatcggcttccgaagctgtaactaaagaagaattggttcaagttctattgatgttgaacaaaaaagaggttataaaagcagtcgaaaagcgaaaactgccgatgaaggcgatgcgattgacgggatgaaaattgccaaagaaattttcgaaaacaatttaacgcctggacaatggatttataattcgttatcaaaaggcgggaaatttattcctgatttttatcgttcggatttacagaaggaattagaaaagattgtgagttttcagaatcaatttcatccagagcaaatgaatgatgaattattagaaggcattcaaggcaaagcacgaacagtaacttctcactatttttcaaaaatattgaatattcctcttgctgaaaataaaggaactagagaagaaaccaaattgcaacattacaaatggagaaatgaagctttgacaaatgaactcgatttaaaaattttggcattcattattacagaaatcaacaatcaaatcaatcaatctagtggttatttaggtgccattagtgaccgaagtaaagaattatatttcaaccaagaaacggttgggcaatttcaatacaaacaactacaagaaaatgcacacgccaaactaaaaaaccaagtgttttatcgtcaggattatttagatgaatttgaaaaaatatgggaaacacaatcaaaatttcatcctgaattagatgaaaaactaaaatcagaagtccgagacattaccattttctaccaaagaaaattgaaatctcaaaaacatttagtgagtttttgtgaatttgaaaaaggacataaagccattccaaaatcgtctcctttatttcaagaattcaggatttggcagaatttgaataacattattatcaaaaatgaaactaccaaagaaccttttgtattaaacgaagaattaaaaaacgtgattgcacaagagttgctttttaaggatagtatgaccgatgcacaaatgatggctttttgtgacgtgaaaaaaggaaaccatactgctaatttcaaaaaaattgaaggcaacagaaccaatactgaaatttttaaggcttttgagaaaattttaatcttagaaggttatgacgaattggatttttctaaattggattcaatagacatcaaacaaattttcaaatcggcttttaaaaatttggaaatcaatacggctattcttgattttgccccaactattcaaggcaatgattttgacaaacaagcctattaccaattttggcatttgctctattcatcagaggaagacgaacctttgaaaaaaaccttaatgacaaaatttggcttcaaagaaaatcacgttccatttcttttaagtataaaactgcaagccgattacggcagtttaagtgccaaagcaataaaaaaagtattgcctcatttgatggacgggcatatttatgacaaggcttgtttgatggtgggctacaatcactcatcttcattgaccaaagaacaaaataatgatagagttttaaaagaaactttagatttactcaagaaaaatagtttacgaaatccggtggtggagaaaattctcaatcagatgattaatgtgataaatgctattatgaaagacccaacaatgggaaaacctgatgaaattcgggtagaactagctcgtgagttgaaaaacaataacgaacagcgtagcgaaatgacgaaagccattaacaaaagtacagccgaacatgacaaaataagacaattgctccgcaccgaatttggaatacccagagtgacccgaaacgacattataagatacaaactttggaaagaaacagaagggatttcaatttataccggaaaaacaattgaagcttcaaaactttttaccaaagaatatgatattgaacatatcataccaaaatcgcgtttgtttgatgatagttttgccaataaaacaatttgcgaacgccaattaaatattgataaaagtaacaaaacagcttattcctttttacaagaaaaattaacttctgaagagtttgaccaattcgaaaaaagagtaaaaagtttgttcggaaaaattagccgaacaaaacaaaacaagctcttaatggcagataatgaaattcctgaagattttatcgctcgtcaattaagagaaacccaatacattgccaagaaagccaaagaaattttattggaagtttcccgaaatgtcacagcgacaataggaagcgtaaccgataaattgcgtgacgattgggaattggttgatgtaatgaaagaactcaactgggaaaaatatgaaaaattaggcttgactcatattgaagaaggtaaaaacggagagcgtttgtacaaaattaaggattggacgaaacgaaacgaccatcgtcatcacgcaatggatgcgataactgttgcttttactaaacctgcatacattcaatatttgaataacctaaatacaaaaactcaaggcgataaaaaagcaaatgctattacaggaatagaaaacaagcatttatatcgagataaaaataacaagttgcgtttcaaatctcccatggaaaactttagagaagaagccaaaaaacaactcgacagcattttgatttcctataaagccaaaaacaaagtggttaccaaaaataaaaatgttactaaaaaagttggcggaaccaatcagaaaattcaattgaccccaagagggcaattgcacaaagaaacggtttatggaaaactacaacaatatgcaaccaaagaggaaaaagtaaacgctagttttacccaagaatacattcaaaaagttgcaaaaaaagaatatcgagaagcacttttgaaacgactagaagaaaacgataacgaccctaaaaaagcttttacagggaaaaatattttaagtaaaacaccaatttacattagtttaaaagacaatattgtagttcccgaaaaagtcaaaatagtttggtttgaagataattatacaattagaaaagacatcacacccgatttaaaaattgacaaagtaattgatgttggtttgaaaactattcttaaaaatcgtctagcagaatttggcaacgaccctaaaaaagcttttatcaatttggatgaaaaccccatttggcagaacagagaaaaaggaattgcgataaaacgagtaacgattagcggagtaagcaatgcgcaagctttgcactctaaaaaagaccattttggcaatgaaattcttgatgaaaaaggaaaaacaatccctgttgattttgtaagtactggtaacaaccatcatgtggcgatttacaaagatgagaaagggaatttacaagaagaagtagtttcgttttacgatgccgttattctggcaaaagaaggattacccgttgttaataaaaatcacgaaaaaggctgggaattcttgttttctatgaaacaaaatgagttttttatatttccatcggatagttttaatccacatgaaatcgacttattgaatccgaataattatcatttgattagtcccaatatttttagagttcagaagatttcaactaaaaactatatgtttaatcatcatttagaaactaaagctgttgatggtgaaatgttaaaatcaaaaaaggagttgtcgaaaataagttatcattttattcaaactccaacaaatttggatagtattataaaagtccgcattaatcatttgggtcagattgttcaattaggagaatattgattttgattcgaaattaatagggttgggctttagaccaataaaattaacaataaatacaattgactaaaaatcatttcggctaaagccttttcagaacaaattattagaatccctccagctaaagctggaggcaattcaaaaattggaatagattcaaatactacatgaattttaatgatataataggaattgaagattatgctaaaatcaataggaatgggttttaacccattcgaaaatatataaaagcagggttttttaaataatttaggaattgaaaattatgctaaatcaataggaatggttttaacccattcggaaatatatgaaatcaggaatttttaaataatttaggaattgaaaattatactaaaatcaataggaattgggtttaacccattcgaaaatatataaaagcagggttttttaaataatttaggaattgaaaattatgctaaaatcaataggaatggttttaacccattcggaaatatatgaaatcaggattttttaaataatttaggaattgaaaattatactaaaatcaataggaattgggtttaacccattcggaaatatataaaaacacatgatttttttcaactatttaggaattgaaaattatgctaaaatcaataggaatgggttttaacccattcggaaatatataaaacaatcgagatggctttagccaaataacacaacctaaacaccacaattatgccttacattaaaacctatattcattttgtttggagcacaaaaacagaattccttttttggacagcaaagaattaagacaaaaagtgtggcgtcatatcaaagaaaatgcaaaagaaaaagacatttttgtagattttgttaatggttattcagatcattgtcattgtttaatttcattaggtagcaatcaaacgattcaaaaagtaatgcaactcataaaaggagagtcttcgttttggattaacaagaacaaattatgtttacaaaaatttgaatggcaagaggaatattttgctgtttccgtttcagaatccatgctcgataaagttcgcaattacatcaaaatcaagaagaacatcatagtaagataacttttcaagaagaatatgaaacctttattgcaaaatatcaatttgaaaaagaataggatttggctaaagctggaggcaattcaaaagctggcaatctaaaaatattaggatttaactaaaattggctttaacccattcaacaaaaaattaaatttgaaagaatttagcccaaaataagggagtttaaaaaatgtttaaataaattaaaaaaatgataaagcgaacccttttctttggcaatcccgcctatttaagcacgaaaaatgagcaaatagtaattacttatcccaataaagaacaagaaactaagactgtggctatcgaagatattggagttattgtgttggaaaaccaacaattactataactaatggattattagaaaaactaacaaataacaatgtggcactaattaattgtgaccaacagcacttgcctattggcttattaatgcccttgaacggacacaccgaacaatcagaacgatttaaaaatcaaattaatgcctccgaacctttgaaaaagaatttatggcaacaaaccataagtgccaagataagaaaccaagcgggattactcaaagaaaaagggattccgtgccgaaaaatggagctttgggctaaagaagtcacatcaggagatacactcaatcacgagtcgagagcggcggtatattattggcaaaacctcatcacagtagaaaatttcactagagaacaaaaaggaatcccaccaaacaatttattaaactatggttacgccattttacgagccattacagcaagagccattgtaagttctggaatgttgcccactctaggaatttttcatcgcaacaagtacaacgcctattgccttgccgatgatattatggaaccctatcgcccgtatgtagacttaattgtgtgccacattatggaaacagaggacacctatgaggaattgaccattgatataaaaaaacaactattaaacattgccagtatcgatgttcttattgatggaaaaagcagcccattgatggttgcaatgagtcgtaccactcattctttgcatcaatgttttgaagggtcggcaaggaaaattttatatcctatttatgtatgacgaacattacacccgcttaaaccagtatagaagtttgtggatcttagtattttttgacctgcccacggaaactcgaaaagagagaaaaattgccagtacgtttcgaaagaaactattggacgatggtttttcgatgtttcaattctcgatttacatgcgattttgcgccagtagagaaaatgcagaagtgcatactaaacgaataaaaaataacctgcccgaacacggcaaaattggagtgatgcagataaccgataaacaatttgggatgatggaacttttttacggtaaaaaaccagtagaaactgacaaaccttcccagcaattagaattattttaatcgtaacaggactagaaaaaaacattactcgccgtaatacaacaagaagagactccttcttttcgatttcaaagtaagcctataacttccaacatatcaaacgattaaatcgcggtatgttgggaattataagctaaaatacaattttgaaagcaattcacaactattcctgacattttcactttctgaccatagttgggaattataagctaaaatacaattttgaaagcaattcacaacgtctaaatcaaagtgaatactaattccaaggttgggaattataagctaaaatacaattttgaaagcaattcacaacgtgtcgctttttataaggctggcggtacttgttgggaattataagctaaaatacaattttgaaagcaattcacaacgacgacgctatttgtaacgaaatagacgtagttgggaattataagctaaaatacaattttgaaagcaattcacaacccatatcccgtcaactctttttgtttctgtgttgggaattataagctaaaatacaattttgaaagcaattcacaacagtaaaacaaaaagcttttaaaaaaagcagttgggaattataagctaaaatacaattttgaaagcaattcacaacggacatctacaaaaactactacgcaaatagttgggaattataagctaaaatacaattttgaaagcaattcacaacgagttgtagcttgttaaagtagtcaaaaagttgggaattataagctaaaatacaattttgaaagcaattcacaacacgaagcgtatcaaagagctacttcggtgtgttgggaattataagctaaaatacaattttgaaagcaattcacaaccaggactgaatagtaaaccttgaggaaagagttgggaattataagctaaaatacaattttgaaagcaattcacaacacacttgttatttcacttattccatttgttgttgggaattataagctaaaatacaattttgaaagcaattcacaacatcattttcgccaccaaaaagactaaaacagttgggaattataagctaaaatacaattttgaaagcaattcacaacgcgaatgaagtattgccagaaacatctcgtgttgggaattataagctaaaatacaattttgaaagcaattcacaacgggtaaaagtaaagcataaaggggttttaggttgggaattataagctaaaatacaattttgaaagcaattcacaacgcttcctccgtttgagcttggtacttcgaagttgggaattataagctaaaatacaattttgaaagcaattcacaacgtaacagaaaataaatttttagacaaacaagttgggaattataagctaaaatacaattttgaaagcaattcacaaccctggtaatgccacttcactcataaatggtgttgggaattataagctaaaatacaattttgaaagcaattcacaacttactttgccagtgtgtttcaactctttgtgttgggaattataagctaaaatacaattttgaaagcaattcacaacctatcagtatttgtctagcatcagtatctagttgggaattataagctaaaatacaattttgaaagcaattcacaacaacaactaatgatgtttacgctactgtttagttgggaattataagctaaaatacaattttgaaagcaattcacaacttatttgctagttttaaaaatagctttacagttgggaattataagctaaaatacaattttgaaagcaattcacaactagtcctcttatgtttaaatagctaaatatgttgggaattataagctaaaatacaattttgaaagcaattcacaactgctcctgtaagttcataaacgccatcagtgttgggaattataagctaaaatacaattttgaaagcaattcacaacggattgattcctaatttcgaggaaatgtcgttgggaattataagctaaaatacaattttgaaagcaattcacaactttcggttccgggagataaattcccaattcgttgggaattataagctaaaatacaattttgaaagcaattcacaacagcatttgctttatggcgttttagaaaatgttgggaattataagctaaaatacaattttgaaagcaattcacaactatactttattacttagatttagcgtatctgttgggaattataagctaaaatacaattttgaaagcaattcacaacaagacgtctaattgtattttataacttccagttgggaattataagctaaaatacaattttgaaagcaattcacaacatggcgatgtaatcacttgcataccgttcagttgggaattataagctaaaatacaattttgaaagcaattcacaactatgtatttcattgatttatttgtttcagggttgggaattataagctaaaatacaattttgaaagcaattcacaacccagccgttcgccttgggcgtttcattcgagttgggaattataagctaaaatacaattttgaaagcaattcacaactgataacactttcaaagtttaagagcgcaagttgggaattataagctaaaatacaattttgaaagcaattcacaacttgacggtgcaaagaaaataaaagcattagttgggaattataagctaaaatacaattttgaaagcaattcacaaccgtatactctgaagtctgtgattgaattctgttgggaattataagctaaaatacaattttgaaagcaattcacaactattttgtaacttccaaacaatggtcctagttgggaattataagctaaaatacaattttgaaagcaattcacaactttgtttttttctctataaaattcaagtgtgttgggaattataagctaaatataatcggcaaaaccaaatatacacttttttacccctatgaattcccctttttaatcgaaaatcttgttgttttttcacacaaatttaaacctcatttaaagcaatttaaatgaggtttttcattgccttattttaagtaacatttagattaaacttagagtcattcccttcaagcaatgctttcgtgttttctatattattctcatacacgtgtacattgcctaagaataaagtaatacttttcaatggcaaatcaatttgtttacttatcaagtacaagtgataaatatccgctggtaagcctagattagcatcagagctacgctggtaagccgtaacagcaagtttaccgttctcaatctgaaattggataagacttagacatggctgttgattactctcagtattgttagaacctagaaataacacataattcttagaggtgcgtttctctttgttgattttctctaaaagctttggcagttgctcaaagtatgttggatagctgtttactagtattggcccacaataatcccaccaagtaacaccgatgtctctatacgcttctgttgaacgttctcctgccatgaacaaacctaattcatctcttaacttctttttggccacagcgtgactttcaaataaaactaataaatccaagggttttaattctaatgcttggtttagaagataagtaattgaaccctttttattggtttgatttctacctttttcaaggattttgctaaggatttgatgatatttattcatttttgtaaagcattatgtccgtataactggcgttgtaatttacagttgcattcattgtggccgttgtagaacccgcaaaaggattggacattggtgtctttgtttctatccactcacaaagttctatgatagaagacttatttgatgtaaaataaaaatacttcgtaccgtcaagaacctgtagcacatctaaataatcctttaacttccaataacttttataagtccctgcatccgttgacaaatacggtgggtcaactagaaaaaccacattcggcaaatccttgtattccgcaaacaattctttatagcactggctcacaacttccaaaccgtccaagtatccagtagcgtcataagccgattgacggatgcagttgtaaagtgtttccttttccaattgctcaaatgaaagcgcgtatttcattgagaataataccgaacttgaaagggtaatataatcaacgtagccgttattatcttccaatcggattcgttccattacctggtcccgaataacacctagtattcgtttgtcttttggataatcctttaaaattgttcttaaatcaccgataagtagattagtcttatcaatgttttcaagtcttagtctgtaattatcaaaatcattatagactacttttgcatcagggtaaattgatttgaccgtatggcttaacaaaccgctgccaccaaataaatctacataagtagctgtaggtgaatacccttttaaagcaggttttaaactgttttaaaaacttccttttttgtcccataaacggcaaaggagccgttgtgaaaattttcttttttaattccattcgttttttgattaatgattgataattgtatatttgtacttctcacagtatttttaaaaatagcaaagccacaacagaagacttatgtcctccgatgtggctttgcggctaaattaaatactgtgagaggtttttaatttcggaggactatttttacttcccgtcctccttaggaattattaattatcccaaactctttttccaaaacatcgaaccgcccaaaagcgcaaataattatctatgtttttgaatgaccattttagggttccattgactgccctttcccatttgagcatttcatgatctgcgaatcgttggcttacaattttatttacgtacaaatagtcgtgaatcaaaaaggctatttcagcatcagaatcgggttttataattccttgcaaaaatgacggcacacttgctaaatcccacttaaaaccatttgaaatggtatgtgtttcgccgtttgaaagttcaatactcacattttttaacaaacggtattcattctttctatttgaaccatagacacggcttttttcaattggattttcgccgctaattaaaatttccttaatgtttaataatgttattgtttgcatatttttttttaaaaattaaaccttccgtctttgtcctcttctgcgatgtatgccgatatgattgctttcataggcatattcatatcaagcattagcattttgatgtaatcaaaggcaggcatggtaacaaacctttcgaattcgttgatgataatcccgttttcgtccttttgttccttaaaatcggggtttggaatgggagcgaaattttcatctcgacatctcattagttgggaattatcgatataccaatcgggtacttgagggttaaacaaatgacttacatcttgaccgtctttgctatatgaaatacgatagtagagattgaaagtagctgaatcagaattcatattgatccctacgatattgacagatcggttacttccgtgaagtttttacagtttgaaattggctgtgtgattaacatatttataaagattgagataatggcacaaagaagttaacagcttgtgcctgattaaatattatattattggtatctgtattattattgactagcagcattcgacaatcagccttatcccaactataaaaattagcagttgtgtaaacataggttccatttataagaagaacataagaaattagatagccataagcccctaaatcacttcttttggtcaatattatttttatggatattgctggaaaagctacagtatcccaagcataattataagtactttgtacagcggggacgcctcctgaatcagcagttttccaaaactcaattcgaaaaatataatcagccgtggcaggtgcacctgatctgaaaataacaaaggaactttcaataatatccccattattcattcctgtacttgaatttaggcttgaaggataaattttgccagatcctccaacagttcctgctggaataatatctcccatattgctattatattaagaaaaaaattacttccagcacctggatcaacattcttactgaatctagttgctactatttgacttcttataccattatgagtttcccacaaaataccgtttgaatcccgctctattgctccgttttgtggagtggttgtcaatacaccgtttggtagtattaaaggaggtgttgtagctgtaccagtaggcaatgttaccttgtggacaatttgtactccactactgtctattaatattgaatcgctacctaacccttcaacacctaaataaagccgctttcccgtaagtgctctaatataaaatcgaagtgaatccgaggtaaaatatcctgaaaacccaaaatttaatgacccatcaaaacgccagtttccactaatcatttgggattgtgtttttatccaagcccaccaattaaacaactttgagcgactgacaactttattatcttctggagctgcagctgttatttgcgtttccccatccgtggcaatagtccctgttagtttggtgttttgtaaaaccttacccatttccgcggtcaaagcctttgtaaccccacccgtggtaaggtcatttaccaatatggtagctaaatatgattcgacattttctatagcatccactatctcctgaatagtatcaagattaatattgtcagaagctaaaagcgtattaataccgtctatctggttttgtattggtagaattaatccttcagcataggctttcccaaactccaacatgtaataccattgatttttataaaatagtccaaaaacactcgaaacattttttttattcacattggactaaaatataaaaatcgtatatttggcttaagaaagaaaatatatgtcgtcaccaaaaatatttacaataaaggagagcttgtcggagctcaaaaaattcaaaaaaagagcaaccccatgattgcaaagagagtacatgctttacttgtttttaaagaaaatgaactgaatggaatttctaaaagagaggttgctcaagccataggggttaatcataatagtattcagtcgtggcgcgacctctatattaatggagggattgaactactgacaagacattctaaaaaaggatacaagcccagtgttataactttggaagaagagcaagctttaagagaacagatgtttaatcctgaaaacgggtttgttggatacgtcgaactgttagcttggtttgatgaaaagtttgggaaacaaactaattacagcactttcaaagggtacgtttatagaaaattcaaggcaaaaataaagaccgcaagaaaaattcatgttaagaaagaccaaattaaggttgaggattttaaaaaaatttcagtaaagaatgtgaaaacatctacaacgaaaaaggatggggatttaaaacaataaacttgtattgtcaagatgaaagtcggttcgggatgtttactagaaacggaaaagccttaacgg

SEQ ID NO: 1553 - DNA, 22505 bp, synthetic construct
  misc_feature 1..22505: note = Synthetic
  source 1..22505: mol_type = other DNA
aataaagcttgcttataaatttctaactgctgttttgtattttgcaatactttttcagcctgataaagttcgctaaaaagttcttcaattttttctacaataaggttttgctcgtttaatggtgccatcaaaaaagttaattttccaaatttgcttttatttaaaataggaacagttgtcgcagaggagttttccttaattaatttttgaaaatttgaacttataatttgatagtaaaaaaaaagaggattacttatgattggtaacacaccgtttatctgttgattaaatgctccttcttttaaaataattcctgatttcccaatcgttgaaccaatacacgtaactagaatactacctttaggaagcgtcctagaaaattccttccctaaaacagataatttatctttagaatcattgacataacctaagtttaaatctgaaggcttaaaaaatggcacatccccattgaaataagatttattgttagttggaggagtatttccagttactatgattgctacctctcctagtttaacaatttcccaacctttcggcaattgatatgtcattccgtttttcattttaaatcttctccaacaattctgtttttacaaattcgtatgcattttgaatgtcatacataaggccaggttttaataaaccttccatatcgcctaaaaaatcttgatctacaattttcttttccatattttctaaaaactctttttgcgtcacactgttatcttcttctttcatataaaagttccatgcttcaataattgtgtgagggttaacattgctttgtgttattgcataccacatatcaaacaaatcccttccttttcttctctggtaaagggctcgcatttttgttcccaataactcggttaactcatatgatggtattgatacttctcctgtaaaccattcagattgcatttcgtgtttcacgtcctgtataccaaaaatagtatgatgttcccggcaattaacttctacttttagccttaatggtattccatcttctgaatcaaaacgatacaccaatgtgttattatgctgtttttgtttgcgtattggcttgtctcccaaaaaagataatacctctcgaagtttatccataattggcccaaaaggctctgctgttatttgtactaaatcgatgtcttcagaatatcttgcggcgggtgacagatacaatttatgtagagcagttcctcctctaaaagctaatttttcttttaaatattcatcgctatatatggccattaacgctcgttcaattaccaaatcttgttctacctgaaaatcctcttgccaaggtgcttttttacgccatgcggttatatatgcttttggaatcataaatctgtttctatttctaaattttgtacaaccttccagtcattacctgttatcatctcaggtttttccttttgtggtcttagtaataccggaaaataattcactgtttttaagtagtctttaattggatcgcttaaatcccgcatatctaaaatctcttcaagtaaaaagcctaggcgctgtaccgcagttataggagaataacgttttgagagatcaagcaatttattagcatcaatgctttcacagagttcttctaatactgttgcaaccctattaagacctcccgcttgatcaaaataacacaccaaatccaatgcagttaattccggtgacgaaacatttatatatcccgtatcaactttcttttgaacaatatcactttttgaccattcctttttaatgtaaaagttcattttcaggttgtcattattaatatttcttaaacttggtttcattgtgattacagaaaaagattgaggttgttgatgtgccgctccataataagccgcagcatttagtaatcctacataataatctttttccaaaaatttcattagctctgaaataaataaggaaggaggaagaatccctttactcctgtactctggtgtaattactacgtagaattcatttctaattaaagcaatttctttcttctttttaagtctttgcagtgccttcttaatcgcttcatcagactgttcaaattggtttcttacttccggcaatgaaaacgcataccttccgttggaacgtaattcgttaataaagtcttctaaataagcgtaattacccctcattttaagtttttgtttgcaaaaagggatgaacttcatacctttttgcagatgtaaacttaattattattttggttctaacaaatttttatggcttcttttttaatccctttcgtcaagttttccaactaccattataacgcttatccctcaaccactcataaaactttcctctaagccataacccagcaacccaaaccacaacaagccctattatctcataccattccatctctcaaagataaaacggcaatcacatacgcaagaaacatcaaatgcagtttctcccaaattgacaagttatactcccaaattgacaagttgttgaaataaaaaaagatgcctaggcatcttacttatctattagcttaaaaaactctgaaagctttatatttcttgcctcacaaattttattaagagtatttacaggtatattataatttgatccttcgacttttagtgcagtatttttaatttttctcactatactctcctcaatgttatgatctaatgcaaaagaacgttgagatttataagattcaatccaacttctataaatatatttacaaataatattgtttgcttcaatcatactaacaaaggaaagtcaatcaacaaaaaataatgcgcactaaagcacgcatattgaaatattttgttatatttgtttccaattacatacatttgcgattcttcatataaaaaataattgaagcattcgctttgaatttcgtcttagaaaactggtaattttaaaaggaacgaaatgataagtacgatgctcacgtcccatggcgtgggctcacttattcgtgtgcgggtataccagtaccttgatagcgtttaagatgagttccatgccatttttttattatctaggcacaaaatactcttcttatattcttagcgtcgtttcttcatttttcatagtctcgcaataccattaatttattgaattagttgggaaaggcactgcctgcgcttggctgcaacaagtaacggcagcgctcttttcttaaaaaaaccttaaaaaccaaaagcccatgaaataaaaccaaaaaatctgtgtaatccgtggcaaaaaaacaagcgaagcgaaacacaaaaagcgaagcacaaaaaaaggccctctaactcttcttggcggacgaatagaggaccaaagcaaacaaaaccgaagtttcatttaaccaatccaaaagtatgaataaaaattcaatcttaaatcgttgggctacaatacaactgcccaaactatactatatattgccactattgttcactatggcagtccaagcccaaaaccaaaccatcaaagggacaataaccgatgtcagtggtactctgcaaggtgtaaccataaaggtaaaagacaaaccaacagcaacacttacagacgaaaaaggcaattacactattgaggtagtaccaacagacatgctagttttttctttcataggctacaaaatcgttgaaatccctgttacaaaccgttcaacaatcaatgtgcagttacaagaagatactaccacactcaaagaggttgtaatcaatgcaggctactattccgtaaaagacaaagaacgaacgggaagcatttcaaaagtcagttccaaagaaatcgaaaaacaaccagtaacgaacgttcttgcagctcttcaaggcaggatggctggagtaaatataacacaaacaacgggtgttcctggtggtggttttaacatccaaataagaggtagaaacagtatcagaaccgaaggaaatcagccactatacattgttgacggcttacctttttcatcagaaaatttaggtaacacagcaatttcaggcggaatattgccaggtgcaggaatcaatcctttaaacaacattaacccttccgatattgatagtatcgaaatcctaaaagatgccgatgcgactgctatttatggttcgcgtggtgcaaacggtgtcgtcctagttacaactaaaaaaggtaaaaaaggcaaaacacaattctctttcaacacctacacaggtgcaggaacaataacaagaagattaaaactattaaacacacaacaatacttagaaatgcgagaagaagcatttgcaaatgacggtataactacattaccatcttgggcttatgatgtaaacggaacttgggacagaaaccgctacaccgattggcaaaaagaacttattggtggtacagctatttcaagaaatgtagaagttggagtttcaggcggaacaggaacaacgcagtttttaattagaggaactaattttaatgaaactacggtctttccgggagatttcagttatggtaaatcagcgcttcacttcaatatcaaccacacatccgaagacaatcgctttgcaataaatctttcaggaaattatgtagcggataaaaacaatcttttaagcaccgatttaacgagaaacgccacaactcttgctccaaatgctcccgcactgtacgatgaagatggaaatctaaactgggaaaacggtacttgggaaaatccattgcgcttattacaagggaaatacttagccaaaactaaagggttatatctaggaggagcactaggatataaagtactttcaaatttagaattcaaatcatcatttgggtacaacgatacaagggttgaagaatcaagcacaacaccgcacacaatttacaatccagctttcggattaaccagtgcagcatcatcaagtatggcaagcaattctaatcagcaatcgtggagtgttgaaccgcaactaaattatcaaaagtcctttgcaaaatcaaaattaaaactgttagtaggtagtacatttcaagagcgttcagcagcccaattggcagtttttgcttctggttttacaagcaacagtttaattgcaaatagcgctgcagcttcatttacccaaataatgaacaacgctacttcaatgtaccgctatactgctgtttttggcagagccaattacagtattaacgataaatactttttcaatcttacaggtcgtcgtgatggatcaagccgcttcggttcaggaaatcgctttgcgaattttgctgctttaggtacagcatggatatttagtaacgaatcagtagtaaataaagcactaccatatttaagttttggaaaactaagagccagttacggaaccacaggaagtgaccaaattggcgattatcaatttttaaatacctacacaccaacaggaattccctacaacggaacaataggtttagaaccttcacggctattcaatccaaattttagttgggaagtaaacaaaaaactagaaatggctttagacttaggtttcgtcaacgatagaattttcttaactactgcatttttcaagaatcgttcttccaatcaattagtaggcattcctttacccggaactacaggattcaattctattcaagccaacttagaggcaacggttgaaaatagtggtttagaaatagaattgagaactagtaattttaatagaaataattttaaatggactacttcttggaatctaacactacccaaaaataaattactggcttttccaaatttagaaggttcggtctatgccaaacaatatgtaattggtcaatcacttagcatcagaaaagtgtatgaatttacaggagtaaatccaaacacaggaatttatgaatttacagatttcaacggtgacggtttgcttacagcgacagaagacagacaaaaaatagtagatacagctccaaagttttttggcggtgtacaaaatagtttggcttataaaaattggcaattggatttcctattgcagttcgttaaacaagtcggaataaacaacaatgcagtagctgatttacctggatctgcaagcaatatgactacagatgttttagaccattggcaacaaattggcgataccaatcccacacaagtatacacagcaggttttaatggggatgcagtaaatgctttttacacctattatgcttcaagcgatgcagcattcagtgatgcctcatacatacgtttaaagaacctctcattttcttatacagtaccaaatacgatgctgaaaaaagtgaattgtaaattatattttcaagcgcagaaccttttaacatttacaaaatttaaaggtgcagatccagaaaatcaatcacaaggacgacttcctatactaagagttttaacaataggaacgcaactgaatttttaatcatttaaatataaaaacatgaatgtatatataacaaatacaacaagaagtattgggttttggttagcaatctcaatactaagctgtctactgaatagttgtgagagctttgttgaaatagctttgccagcaacacaacttacaggagaagcagtatttcaagatgtagcaaccgctgatgcggccttaacccatatttattccaaaatgcgaaatgaggttttagttcaaggaacgtccattggtttgagcgcattgttaagcaactacgctgatgaaatggattattacagtacgagtggtttacctgctcaagaattttatcaaaacagtttaattccatccaacaatacagttacgtcaacttggaacggaacgtacaatttaatttatgctgccaattctataatagaagacgttacagtatctaccggaattagtacagaaaataaacaacgattactaggtgaagcatattttatcagagcctatttacatttctacttagtgaatctatttggcgatgtaccttatgttaatactactgattatgaaataaataaaagcatccataaattaagtactccgttagtttacaataatataaataccgatttactacaagcgattgcattattgcctataaattattttggaacaggacgaactagacccaatcaaagtacagcacatgcattattagcaagaaccatgttatacactgaaaaatggtcagaagcaatcacctattcagatttagtaattaacgccacaacaatgtacaattgggtagctaatttgaataatgtttttcttaataccagtacaggtacaatttggcaattagcaccacagttcagtggcaacaatactttagaagctcagacctttcaatttacaacagctccgccgccaacatttgcattgcgtaacgatttggttgacgaatttgaaacaggcgatttacgaagaaccaattggattggaacagtaaccgacggaactcaaaattggtatttcccaaataagtacaaagaaaacgcaagtacaagcgcatcattggaatactcaattctttttagattagaagaacaatttctaattcgtgcagaagctaaagcacagttgaacgatttaggaaatgcaaaattagatttaaataaaattagaaacagagccggacttacaaacactactgcaatatctcaaacagaattattgactgcaataatcgaggagagaagaaaagagttttttaccgaattaggacaccgatggtttgatctaaaaagaactggaactgcaagcagcgttttaagtagcaaaaaacccggatgggatgccaaagatttactttggccattaccagaatcagaactactactaaacggaaacttaacaccacaaaacccaggatattaaaaaattgaaagtccaaccaatagtttatattctttggttggacttaactttaatcataactaatatgaaatcatttaagttaattttagttactttttatgggatactatttttaaatcaaactacttccatacaagcacaacaaaagaaatatttaatgcgagaagactataaattatggagtgattttggtgcttctaatttaagtgatgatggcaaatgggtatattataatttattttataaagatactgacacactatttttagttgacaaaacaaagaatataacacattcatttattaaatcttacaacgcctcatttacaccaaatagcaaatggtttggattcattaaaaaagatagtttgcatatactaaatctaaccacaggcaaagaacaacttgtgagtacagaggtcaaggaatactctttttcttttgatggtagttatattattgctttggtgcaaaccaaagaaaccaaaagtttaaaaatagtagatttaaaaacatttaaaacaaatagtgtaagcaacgtaatagaatatgaatacagtccaaataaaaccaaaatggcaatcagtactaagcaagaggacataaataaagttagtttgtatgatctcaattcatttaatcttggaaaagtaattataacgaatagtgaatcagaattcaagggtttacagtgggacgattcaagtacaaaattagcctttttcaaagaaataaaagattcaaatttgtcatacaaaaatcatttaatttactggtgtaatgattttggagataaatttattctaaaagaaacccgttgggtgtcatattaaaggcagtataacacaaagtgtgtaagttaaaaagttattctgaaaatttgagctaattcaaaaagctcaaaaattttcggaaataactttttaacattttatatatttacatagttatgatagacaaagacaacttattaaacaacaaggaattctacaaatcctttaaaaatggagaagatttaacttcattttttaaacaaatgcacaaacgagcagtagaacatatgcttgaagcagaacttgatgcacatttagacaatgaaaaacatcaaaaaaccttcaatggtaattaccgtaatggacacggaaccaagaaaataaaaacttcctttggtgaagatgaaattaaagttccaagagatcgagacggtagtttcgaacctgctttagtgcctaaaagacacaatattattgatggtctagaaaatatcattatttccttttatgcaaaaggaatgagtgttagtgatatagaagaacagataaaagaaatgtatgattttgatatttcaacctctaccatatcaagaattaccaatgcagtatcgagcgaagttgtaacttggcaaaacagaccattagatgatctctatttaattgtttggatggatggtattgttttcaaagtaagagagaactctaaagtcatcaataaaaccatctatttggctgttggacttaatcgcgaaggacgcaaagaagttcttggaatgtggctaggaaaaaatgaaagttcaagcttttggatgagtgttttaactgatttaaaggctcgtggagtggaggatattttgataacagctaccgacaatttaaacggatttacccaaaaaatccgtgctgttttccctgaatcacaaacacaaatttgcgtggtacatcaaattagaaacgcttgcagatacgtggtatggaaagataaaaaacaatttacatccgatatgaaacttgtttataccgcaccaacaaaacaagctgctgcattagctttggaagattttgctcaaaaatgggaatcaaaatatggttatgccatcaaatcctggagagaaaactgggacgaattaaccgtgtttttcgacttcccgctagaaattcgaaaaataatctatactacaaatttaatagaaaatttaaatggaaaaattagaaaatacactaaaaataaaatgtcattccctactgatgatgcggttctaaaatcagtttatttagctttaaaagaagcaacaaaaaaatggtcaatgccaatacaaaattggggtattgttttaaatcaatttaatcttatatttgacaaaaggctcagattataaaatccaagcctaactttttaacttacacactttgcgggatagtgtcgaagatagttcgttttcaaaatcaatttcattccgaacaaataaatgataaattattagcagacattcaaggaaaatcaagaacgcagacttctcaacatttttcaaaaacattgaatatttctcttgccgaaaataaaggaactagagaagaaaccaaattgcaacattaccaatggagaaatgaagctttggcaaatgaactcgatatgaaaattttggcatttattattactgaaatcaacaatcaaatcaatcaatccagcggttatcttggcgatattagcgatagaagtaaggaattgtattttaatcaggaaacggttgggcagtatcaatacaaacaacttcaagaaaatgtacacgctaaacttaaaaatcaagttttttaccgtcaggattatttagatgaatttgaaaaaatttgggaaacgcaagcgaaatttcatcccgaattaaatgacaacctcaaatcagaagttcgagatattacgattttctaccaacgaaaattaaaatctcaaaaacatttggtaagcttttgcgaatttgaaaaaggacataaagccattccaaaatcgtcccctttgtttcaagaatttaggatttggcagaatttaaacaatgttgttgttaaaaacgaaactacaaaagaggtatttgaattgagtgaagagttgaagcaattaatcgccgaagaattgcagtttaaagaaagtatgaccgatgttcagatgttaactttttgcgaactaaagaaaggaactcataccgttaatttcaaaaaaattgaaggtaatagaaccaatacttctatttataaagcttttgaaaaaatattggaagtagaaggatatgaaatggatttttctaaaatgaaacctttagaaataaaagaaactgttgctccaatcttcgaaactttaaatatcaatactgttattttagattttgacccaagtattcaaggtaatgattttgacaaacaaccttattatcaattgtggcatttattatattcggcagaagatgatgataaattaaaagaaactttaaaaaccaaatttggtttcaaagaaaatcaccttccgtttcttttgaatattaatcttcaagccgattacggaagtttgagtgctaaggctatcaaaaaaatattaccgcatttgatggatgggcatatttatgacaaagcttgtttaatggtaggttataatcattcctcatcattaactacagcacaaaataacgatagagttttaaaggataccttagaattactcaagaaaaacagtttgcgaaatcctgtggtggagaaaatccttaatcaaatgattaatgtgattaatgctattatgaaagatcccgcaatgggaaaaccagatgaaattcgagtagaattagctcgtgagttgaaagcaaataatgaacaacgaaaaaaagctacttcggatattaataccgcaactaccgaacacgaaagaattagaaaattattgcattccgaatttaatatacctagagtaactagaaacgatattattagatacaaactttggctagaaactggaggaatttctttatatacaggaaatccaattaaagcgtctgatttattttccaaaaattatgacatcgaacatattattccaaaatccagattatttgatgatagtttttcgaacaaaacgctatgcgaaagacagctaaatattgacaaaagtaacaaaacagcttattcctttttacaagaaaagctttcagaaaatgattttgctgcatatgaaaatagagtaaaagatttatttaaaacaggaaaaataaaaagctatacaaagtacaaaaaactcttaatggcagataacgaaattccagaaggattcattgaccgtcaattacgagaaacacaatacatagcaaaaaaagccaaagaaattttattggaagtttccagaaatgtaaccgcgactattggaagcgtaaccgataaattgcgtgaggattgggaattggtcgatgtgatgaaagaactcaactgggagaaatacgacaaattaggtttgacccatattgaagaaggcaaaaacggagaacgattgtctaaaataaaagattggacaaaacgtaacgaccaccgccatcacgcaatggacgcgataacggttgcctttacaaaacctgcatacattcagtatttaaacaatttgaatgctaaaacacaaggtgaaaataaagctaattcaattattggtatagagaacaagcatttatatcgagataaaaacaacaaattacgtttcatttctcctatgaaaaactttagagaagaagccaaaaagcaactcgaaagtattttgatttcgtataaagccaaaaacaaagtagttaccaaaaataaaaacaccactaaaaaaagcggtggaaccaatcagaaaattcaactaacacctcgtggacgattacagacactatcccgcaaagtgtgtaagttaaaaagttaggcttggattttataatctgagccttttgtcaaatataagattaaattgatttaaaacaataccccaattttgtattggcattgaccattttttggttgcttcttttaaagctaaataaactgattttagaaccgcatcatcagtagggaatgacattttatttttagtgtattttctaatttttccatttaaattttctattaaatttgtagtatagattatttttcgaatttctagcgggaagtcgaaaaatacggttaattcgtcccagttttctctccaggatttgatggcataaccatatttggattcccatttttgagcaaaatcttccaaagctaatgcggcagcttgttttgttggtgcggtataaacaagtttcatatcggatgtaaattgttttttatctttccataccacgtatctgcaagcgtttctaatttgatgtaccacgcaaatttgtgtttgtgattcagggaaaacagcaaggattgtttggataaatccgtttaaattgtcggtagctgttatcaaaatatcttccactccacgagcctttaaatcagttaaaacactcatccaaaagcttgaactttcattttttcctagccacattccaagaacttcttttcgtccttcgcgattaagtccaacagccaaatagatggttttattgatgacttttgagttttctcttactttgaaaacaataccatccatccaaacaattaaataaagatcatctaatggtctgttttgccaagttacaacttcgctcgatactgcattggtaattcttgatatggtagaggttgaaatatcaaaatcatacatttcttttatctgttcttctatatcactaacgctcattcctttggcataaaaggaaataatgatattttctaaaccatcaataatattatgccttttagacactaaagcaggttcaaaactaccgtctcgatctcttgggactttaatttcatcttcaccaaaggaagtttttattttcttggttccgtgtccattacggtaattaccattgaaggttttttgatgtttttcattgtctaaatgtgcatcaagttctgcttcaagcatatgttcaactgctcgtttgtgcatttgtttaaaaaatgaagttaaatcttctccatttttaaaggatttgtagaattccttgttgtttaataagtcgtctctttcaatcataactatgtaaatatataaaatgttaaaaagttatttccgaaaatttttgagctttttgaattagctcaaattttcagaataactttttaacttacacactttgtgttatactgccctatcttctctaattccttctgcaaatcggaatgataaaaatcaggaataaatttgccacctttcgataaagaattatatacccattgtcctggagttaaattgttttcaaaaatttctttggcaattttcattccgtcaatcgcattgccttcttcggcagtttttgcttttcggctacttttataccccctttttttgttaagcattaataaaactttaactaattcttcttttgtaacggcttcaacagccgatttagctctcaattgatacgaagaaaaagttgtcgatgcaccagtttctgcataaacaaaatcagtcgcaatgaattttattctgctgaatatttctaataaagcttctcttctttgtttgaatcgttgcaaacctcttcttgcgccacgttttaaagttctatctgcgtttatagaaattgtattgccttttttgaaatcagattcttcatctgtagtaagtggaacaatgcgaacgcctgtatttacaattgaagacacttcaatctcgttttctgcctcatttataaacgcccatccaatagatgttgttcctaaatctaatcctaatatttttttcattgtacttgcttatattttaattattctagttgtctagatttatttttaactataaatgtaagataattaatattatttagatacatttttattatatataaaaaaaaagttgtagtattgtactacaattttgaagcaattcacaataaggattattccgttgtgaaaacatttaaagcggcctctaaagggtcgcttttttatttaggtattttgtgaaaatgttgttttattaccgcaatgccctagccccgatagtagtgaaaatcctttttgaggcttttcgccgaaaaaagattgcaacggatagcgggattggctcctaaaaaaactacttttgcagcgcagaccgccttatcgtcgccaatttattgggggaggaaagtccggacaccagagagaagcatagcgggtaacacccgtcggctccaatttattggggttaggacaagtgcaacagaaagtatgtacaggtaatgctgtagtgaaaccaggtaaactctatgcggtgaaatttcaagtatatcggtagttaagggcttctcgtccgttgctgaagggtagaaagatggagcttgtgagtaattgcaagcctagataaatgataaggtatcgttagtaatatcgagaacagaatccggcttataggtctgcttttttttaggttataatcttaaattctaaacctacattgcgaatactttcaatagtaattcggttgtcgctagagaaatattttctaattcgacttataaaaacatccatacttcttcctgaaaagaaatcgtcatttccccaaatatgttgcaaaatatcatttcgttttatgcgtttgtttttattttttagaaaaaacaaaataacagcaacttcctttgctgtaagcctttgtgtatgattacctaactttaattctaacctattcggatcaaaaatataattaccaattgttatttcatcgcctgaaaaagttgtttgatttttttgctcgcctcttttcaaaatattgtttaatcgcaagaccaattcgtcggcttcaaaaggttttacaatataatcatcggcacccaattgcaatccttttagtttgtcttctttgagttttctggcagttaagaaaacaaatggtgtttcaggattcatatcaattattttttgggctagtgtaaaaccgtccatttttggcatcatgatatcaaacacgcaaatatcgaaagtttcattctcaaataggagtaaggcttcttccccgtctttagcccaagtaatatcgtaattatatagctccagatattgttttaaaacatcagcaaaatcaaaatcatcttcggcaagtagtacttttttcatttatcggcttttaaattcaattaataaatacgaaattaagaaacgcacaaggattaaatatttttttataagaaatcaatccaaaataacccactatcacttcagacaataacaacttcataaaatccacaaaataatcttgcctttctatctatttttaaacgacaaatatcctacttttaatatttccccacaagtttataaacttagatccccaaaccccataaaacaagtatcatatataaggtatgttttttattttttttgggcgtgccccgtcgtcgttcctcctcgggtcgggctatccgttacaagtcctcgcacctccttcgtcgggctgtgggctttccactactatccctcacgcgcagcatccaagaaacaacatttataaaaaagaatacaccattcaaaacagtatcatcgacataccaaaagactatactatataaagaaccaccacaaaacagctttagccaccgcaaacccccaacaattagcaatgcttcaaaaaaaaccaaagataaccaccacaaaaccaaaaccttaaaacaaaaaacaaaaaaacagtcaaaaaacagcttgcaaaaccaaaaagaagtattacttttgcacccgcattggcacacagttcttattacatattaaaaacgaatcgaaaaaaaataaaacaaaaattttattaaaaagattaggaaaatagcaaaaagaaactacctttgcaccccgcaagagattaagttcattcataaattggttaagaaaaagaaaagcaaacgagaataaatattttcaaaaaaaacttatcaaaaagcttgccagttaaaaaataaccactacttttgcacccgcttcgagaaacagataaagacacaaacgaggctaaaaaaaagcaagacaagttcctagacatattgaattgacagccgttttaaatagcgatatttaaaacaaaagaataaagagtaagagcgaatcgtaagatttgaaataaagctataacatcaaaaacagaagaaagcattaatgctaacttcaaacaatatacgatgaagagtttgatcctggctcaggatgaacgctagcggcaggcttaacacatgcaagtcgaggggtagaatagcaatatttgagaccggcgcacgggtgcgtaacgcgtatgcaatctaccttttacagagggatagcccagagaaatttggattaatacctcatagtatagtgagttggcatcaacacactattaaagtcacaacggtaaaagatgagcatgcgtcccattagctagttggtaaggtaacggcttaccaaggcaacgatgggtaggggttctgagagggagatcccccacactggtactgagacacggaccagactcctacgggaggcagcagtgaggaatattggtcaatgggcgcaagcctgaaccagccatgccgcgtgcaggatgacggtcctatggattgtaaactgcttttgcacaggaagaaacactacctcgtgaggtagcttgacggtactgtgagaataaggatcggctaactccgtgccagcagccgcggtaatacggaggatccaagcgttatccggaatcattgggtttaaagggtccgtaggcggccagataagtcagtggtgaaagcccatcgctcaacgatggaacggccattgatactgtttggcttgaattatttggaagtaactagaatatgtagtgtagcggtgaaatgcttagagattacatggaataccaattgcgaaggcaggttactacaaattgattgacgctgatggacgaaagcgtgggtagcgaacaggattagataccctggtagtccacgccgtaaacgatggatactagctgttgggagcaatctcagtggctaagcgaaagtgataagtatcccacctggggagtacgttcgcaagaatgaaactcaaaggaattgacgggggcccgcacaagcggtggagcatgtggtttaattcgatgatacgcgaggaaccttaccaaggcttaaatgtagattgaccggtttggaaacagacttttcgcaagacaatttacaaggtgctgcatggttgtcgtcagctcgtgccgtgaggtgtcaggttaagtcctataacgagcgcaacccctgttgttagttgccagcgagtcatgtcgggaactctagcaagactgccagtgtaaactgtgaggaaggtggggatgacgtcaaatcatcacggcccttacgccttgggctacacacgtgctacaatggccggtacagagagcagccactacgcaagtaggagcgaatctataaaaccggtctcagttcggatcggagtctgcaactcgactccgtgaagctggaatcgctagtaatcggatatcagccatgatccggtgaatacgttcccgggccttgtacacaccgcccgtcaagccatggaagctgggggtgcctgaagtcggtgaccgcaaggagctgcctagggtaaaactggtaactagggctaagtcgtaacaaggtagccgtaccggaaggtgcggctggaacacctcctttctagagcatgtttttagttttataaataagaaaattctcaattactctttgctgttagttcaaaataaaaaataattgataattattgattatcaattagaagagtgtctcgtagctcagctggttagagtactacactgataatgtaggggtcgacagttcgagtctgtccgagacaacaaattaatttaagattttagaattaagattttagattaaaaaaaggataaatacgttcattaaagtaaaggaaattttagaagttgaggattcaaccaaaagaaattagaactacaattcaaaatctaaaatctgaattcaaaaaatctaaaatctattagggggattagctcagctggctagagcgcctgccttgcacgcaggaggtcaacggttcgactccgttattctccacgagatagtatcaagatgatagtataagtattaagacaaaatcttaatacttaatacaaaacacttaatactttattaaagttcattgacatattgagataagaaaatatttaaaaagtagaaagaacactttttagtgattagacaaaaggcattaggcataagttgaaaaactaatggttaattactaatggctaatggctagaaaaagtacaataagcaaaataagggcgtatgggggatgccttggctctcagaggcgatgaagggcgtgataagctgcgaaaagctacggggatcagcacacatgacttgatccgtagatacccgaatggggcaacccactatgttgaagacatagtacaccgataggtgggcaaacccgctgaactgaaacatctaagtaggcggaggagaagaaaacaaaagtgattccgtaagtagtggcgagcgaacgcggattagcccaaaccaatgttgttacggcaatgttggggttgtaggaccacgttatttgttgcggatagaattagaatttactggaaagtaaagccaaagaaggtgatagccctgtataagtaatagaagataacgatagtggtatcctgagtagggcgggacacgagaaatcctgtctgaatttggcgggaccatccgctaaggctaaatactcctgagagaccgatagtgaaccagtaccgtgagggaaaggtgaaaagaaccgtgaataacggagtgaaatagatcctgaaaccatacgcttacaagcggtcggagccctttcgtggggtgacggcgtgccttttgcataatgagcctacgagttaacgttgctggcaaggttaagtgattaagtcacggatccgtagcgaaagcgagtctgaatagggcgctttagtcagtagtgttagacgcgaaaccgtgtgatctacccatggacaggatgaagctgtggtaacacatagtggaggtccgaacccgttgacgttgaaaagtcttgggatgatctgtgggtaggggtgaaaggccaatcaaactcggaaatagctcgtactccccgaaatgcatttaggtgcagcgttatggttaaagttatatagaggtagagctactgattggatgcgggggcttcaccgcctaccaattcctgacaaactccgaatgctatataatgtttcataacagtgagggcttgggtgctaaggtccaagtccgagagggaaagaacccagaccatcagctaaggtccccaaatatatactaagttgaaagaacgaggtctgtctgcatcgacagctaggatgttggcttggaagcagccattcatttaaagagtgcgtaacagctcactagtcgagcggacgggcatggataataatcgggcataagtatattaccgaagctatggatttagagattactctaagtggtaggggagcattctaacagggtagaaggtgagtcgtaaggcttgctggactggttagaaaagaaaatgtaggcataagtaacgataatgcgggcgagaaacccgcacaccgaaaaactaaggtttccacagctatgctaatcagctgtgggttagtctggtcctaaggcgaacccgaaagggacagtcgatggccaacgggttaatattcccgtactactattaattgtgatggggtgacggagtgatgaaagcgccgcgaactgacggaatagttcgttgaagtacctacctataagaaccgcaggcaaatccacggtttttggggaaatacgatagtactcggagccttcgggcaaagagatagtgcgcctaagggcttccaagaaaaacctctaaacttcagattgatagtaccagtaccgtaaaccgacacaggtagttgaggagagaatcctaaggtgctcgagagattcatggctaaggaattaggcaaaatagacccgtaacttcgggagaagggtcgccagcagcaatgctggccgcagtgaagaggtccaggcgactgtttatcaaaaacacagggctctgcaaaatcgtaagatgaagtatagggcctgacacctgcccggtgctggaaggttaagtggagatgttatgggtaaccagaagcattgaaatgaagccccagtaaacggcggccgtaactataacggtcctaaggtagcgaaattccttgtcgggtaagttccgacctgcacgaatggtgtaacgatctggacactgtctcagccatgagctcggtgaaattgtagtaacggtgaagatgccgtttacccgcagtgggacgaaaagaccctgtgcacctttactatagcttagtattgaccttggataaatgatgtgtaggataggttggagactgtgaagtggcgtcgctaggcgttgtggagtcattgttgaaatacaaccctttgtttatctgaggcctaaccccgcataagtgggggacattgcttggtgggtagtttgactggggtggtcgcctccaaaagagtaacggaggcttctaaaggttccctcagcacgcttggtaaccgtgcgtagagtgcaatggcataagggagcttgactgagagacatacaggtcgatcaggtacgaaagtagagcatagtgatccggtggttccgcatggaagggccatcgctcaaaggataaaaggtacgccggggataacaggctgatctcccccaagagctcatatcgacgggggggtttggcacctcgatgtcggctcgtcacatcctggggctggagaaggtcccaagggttgggctgttcgcccattaaagtggcacgcgagctgggttcagaacgtcgtgagacagttcggtctctatctactgtgggcgcaagaaatttgagtggatctgattctagtacgagaggaccgaattggactaacctctggtgtatctgttgttccgccaggagcaccgcagagtagctacgttgggaagggataagcgctgaaagcatataagcgcgaaacccaccacaagatgagatttcttttaagggtcgtaggagatgactacgttgataggctatagatgtaaaggcagtaatgtcatagtcgagtagtactaataacccgtaagcttatgtacacacttttcccgagtcgcaagactcgggaagaaactttctaaaaaaaaaaatacttctttatctcagtatgttaagatattaaccactagttcttcgacacaagtcaaaagttactatggaaagtgcaaaagttaatacttttcacttaaaaacttaaggtgattattgcggcggggctcacctcttcccatctcgaacagagaagttaagcccgcctgcgcagatggtactgcatttatgtgggagagtatgtcgtcgcctttctttaaagaaaccctatccaaatcggatagggttttttgtttataaaatattagtaaaacggattaagtcgaaaacagatcaatcctaaaacgggtcacataaattttatggggattaagcaaaaagtttttccattctaaagagaaagaatttcacatctactacacctctttgatttgctctaaagagttttattttagaattaaatgactcagcatttgcgttggtatgtctgtttttgaagaagttcaaaatggtttctaaatgataattcaaactatttgcagcggtattaaaaacagtcatattgagttgcttggttttttgcacccaattagtcattttttctcttgctatctctttgcttgtttcttcataaatatctcta

SEQ ID NO: 1554 - DNA, 22466 bp, synthetic construct
  source 1..22466: mol_type = other DNA
  misc_feature 1..22466: note = Synthetic
gtaaatggtattcagtttctttctattattttggaaataattggtttggaaatttttaaattcatttaacaatatggtattcgttattttatctgaagaatttaaaatggaaagacctttattatgtagcacaaatttcgattgatcaagaaattcaaaatcaacaatagatagatttttaaaatcttcatattttattattgcatctaaacgtatttcataaattcctttatcattagaaccaacataaagaacatttcgaagtgtatcatatactacatttaaaattatctttgaatctatttcaaactgattagaaacattaatcattttatcgttttcaattttatacaggccaccatctggattataaacaccatctgcagcagcaaaaattaaagaatcttgaactttggcgtattgaaaaacaaaagaagtcccaaaccgattggctttataatttgcatttaataaattcttaatatttattttttctatgaaaccttctctacttaaaagtaaatcatttttatccaataaagcaccataaaaatttttacctgaatatactggtacaacctttggaatagttgaactttcgtcaattttaaatatgccatcaaaaacacttacaaaatacacttcgtttttatacacaaaaaaattaatgcaaataaaatcttcctttgctttaggaacttttggtgttacaattttatttgtttttacatcaataatcgagataccttgctctgtccccacataaatattgtttttaaaaggaaataattttcgagttttatcagcagccaagccatctttagaaataaaaggagtaaattttttgccatcatatttacttattccaccaccataactggcaaaccacatattaccatcagtatcttgcgaaatatcccaacaactattatgtcctaaaccgtctgcttcacttaaattataaaactgaccatttacaaatcgaaaaacaccattttctgtaccaacccacaaaacattatccttagcaataaataacgatcgaacagcattgtttggtaaaccgtcagaagtagtataattaaaagaagtgagtttttgagcaaaagcagtcgttaaaaccaataaaaatatactaagaagaaatcgcatccattaatttctttttagaaaacaaagtgtccgaaacaggaatactatcacctgtaattaaatctaacttaaactcgtccgatttaaaccctttaatataatttttatttacaatatagcttttatgaattctaataaaattagaatcaactaaaatatcttcaatttcttttaacgatttagaagtaaacaattctttgtcaattatgaatatattagaatatgaaccatccgacttacaataaacaatagaattagcctgaattacctcaaaaccagatttcgttggaaaaacaattctttgcttatctgtaaactgattattaatattctctgttaataatttaaacctatcaaaatcaattttaacattctttttcgacataaatcttgataaagcaatattaaaatcttctttactaaatggtttaaccaaatagtctaaggcgctttttttaatagcttcaatagcatattctttataagcagtagtaaatataatttcaaaattaattttatcaaaatactttaaaaattcaaaaccattttcgtcaggcatttgaatatctaaaaaaaccaaatctggctggtacttttttattgccctaactgcagcttccacagaattacattcttctacaacttcaatagtttctgaatggtatcgctcacaaaatttcctaagaaaactccgagcgtgcatttcatcatcaacaataattactttaattttcatctaataaatcaatatcattcaaaaatacgattaagtttaggagtatccaaaatattttataaaagcatgaaaaaaggaaacaaaatactcattttggtttacataagactcaactttatccttgatctatccctccttgatccgttttactaatattttataaacaaaaaaccctatccgatttggatagggtttctttaaagaaaggcgacgacatactctcccacataaatgcagtaccatctgcgcaggcgggcttaacttctctgttcgagatgggaagaggtgagccccgccgcaataatcaccttaagtttttaagtgaaaagtattaacttttgcactttccatagtaacttttgacttgtgtcgaagaactaatggttaatatcttaacatactgagataaagaagtattttttttttagaaagtttcttcccgagtcttgcaactcgggaaaagtgtgtacataagcttacgggttattagtactactcgactatgacattactgcctttacatctatagcctatcaacgtagtcatctcctacgacccttaaaagaaatctcatcttgtggtgggtttcgcgcttatatgctttcagcgcttatcccttcccaacgtagctactctgcggtgctcctggcggaacaacagatacaccagaggttagtccaattcggtcctctcgtactagaatcagatccactcaaatttcttgcgcccacagtagatagagaccgaactgtctcacgacgttctgaacccagctcgcgtgccactttaatgggcgaacagcccaacccttgggaccttctccagccccaggatgtgacgagccgacatcgaggtgccaaacccccccgtcgatatgagctcttgggggagatcagcctgttatccccggcgtaccttttatcctttgagcgatggcccttccatgcggaaccaccggatcactatgctctactttcgtacctgatcgacctgtatgtctctcagtcaagctcccttatgccattgcactctacgcacggttaccaagcgtgctgagggaacctttagaagcctccgttactcttttggaggcgaccaccccagtcaaactacccaccaagcaatgtcccccacttatgcggggttaggcctcagataaacaaagggttgtatttcaacaatgactccacaacgcctagcgacgccacttcacagtctccaacctatcctacacatcatttatccaaggtcaatactaagctatagtaaaggtgcacagggtcttttcgtcccactgcgggtaaacggcatcttcaccgttactacaatttcaccgagctcatggctgagacagtgtccagatcgttacaccattcgtgcaggtcggaacttacccgacaaggaatttcgctaccttaggaccgttatagttacggccgccgtttactggggcttcatttcaatgcttctggttacccataacatctccacttaaccttccagcaccgggcaggtgtcaggccctatacttcatcttacgattttgcagagccctgtgtttttgataaacagtcgcctggacctcttcactgcggccagcattgctgctggcgacccttctcccgaagttacgggtctattttgcctaattccttagccatgaatctctcgagcaccttaggattctctcctcaactacctgtgtcggtttacggtactggtactattaatctgaagtttagaggtttttcttggaagcccttaggcgcactatctctttgcccgaaggctccgagtactatcgtatttccccaaaaaccgtggatttgcctgcggttcttataggtaggtacttcaacgaactattccgtcagttcgcggcgctttcatcactccgtcaccccatcacaattaatagtagtacgggaatattaacccgttggccatcgactgtccctttcgggttcgccttaggaccagactaacccacagctgattagcatagctgtggaaaccttagtttttcggtgtgcgggtttctcgcccgcattatcgttacttatgcctacattttcttttctaaccagtccagcaagccttacgactcaccttctaccctgttagaatgctcccctaccacttagagtaatctctaaatccatagcttcggtaatatacttatgcccgattattatccatgcccgtccgctcgactagtgagctgttacgcactctttaaatgaatggctgcttccaagccaacatcctagctgtcgatgcagacagacctcgttctttcaacttagtatatatttggggaccttagctgatggtctgggttctttccctctcggacttggaccttagcacccaagccctcactgttatgaaacattatatagcattcggagtttgtcaggaattggtaggcggtgaagcccccgcatccaatcagtagctctacctctatataactttaaccataacgctgcacctaaatgcatttcggggagtacgagctatttccgagtttgattggcctttcacccctacccacagatcatcccaagacttttcaacgtcaacgggttcggacctccactatgtgttaccacagcttcatcctgtccatgggtagatcacacggtttcgcgtctaacactactgactaaagcgccctattcagactcgctttcgctacggatccgtgacttaatcacttaaccttgccagcaacgttaactcgtaggctcattatgcaaaaggcacgccgtcaccccacgaaagggctccgaccgcttgtaagcgtatggtttcaggatctatttcactccgttattcacggttcttttcacctttccctcacggtactggttcactatcggtctctcaggagtatttagccttagcggatggtcccgccaaattcagacaggatttctcgtgtcccgccctactcaggataccactatcgttatcttctattacttatacagggctatcaccttctttggctttactttccagtaaattctaattctatccgcaacaaataacgtggtcctacaaccccaacattgccgtaacaacattggtttgggctaatccgcgttcgctcgccactacttacggaatcacttttgttttcttctcctccgcctacttagatgtttcagttcagcgggtttgcccacctatcggtgtactatgtcttcaacatagtgggttgccccattcgggtatctacggatcaagtcatgtgtgctgatccccgtagcttttcgcagcttatcacgcccttcatcgcctctgagagccaaggcatcccccatacgcccttattttgcttattgtactttttctagccattagccattagtaattaaccattagtttttcaacttatgcctaatgccttttgtctaatcactaaaaagtgttctttctactttttaaatattttcttatctcaatatgtcaatgaactttaataaagtattaagtgttttgtattaagtattaagattttgtcttaatacttgatactatcatcttgatactatctcgtggagaataacggagtcgaaccgttgacctcctgcgtgcaaggcaggcgctctagccagctgagctaatccccctaatagattttagattttttgaattcagattttagattttgaattgtagttctaatttcttttggttgaatcctcaacttctaaaatttcctttactttaatgaacgtatttatcctttttttaatctaaaatcttaattctaaaatcttaaattaatttgttgtctcggacagactcgaactgtcgacccctacattatcagtgtagtactctaaccagctgagctacgagacactcttctaattgataatcaataattatcaattattttttattttgaactaacagcaaagagtaattgagaattttcttatttataaaactaaaaacatgctctagaaaggaggtgttccagccgcaccttccggtacggctaccttgttacgacttagccctagttaccagttttaccctaggcagctccttgcggtcaccgacttcaggcacccccagcttccatggcttgacgggcggtgtgtacaaggcccgggaacgtattcaccggatcatggctgatatccgattactagcgattccagcttcacggagtcgagttgcagactccgatccgaactgagaccggttttatagattcgctcctacttgcgtagtggctgctctctgtaccggccattgtagcacgtgtgtagcccaaggcgtaagggccgtgatgatttgacgtcatccccaccttcctcacagtttacactggcagtcttgctagagttcccgacatgactcgctggcaactaacaacaggggttgcgctcgttataggacttaacctgacacctcacggcacgagctgacgacaaccatgcagcaccttgtaaattgtcttgcgaaaagtctgtttccaaaccggtcaatctacatttaagccttggtaaggttcctcgcgtatcatcgaattaaaccacatgctccaccgcttgtgcgggcccccgtcaattcctttgagtttcattcttgcgaacgtactccccaggtgggatacttatcactttcgcttagccactgagattgctcccaacagctagtatccatcgtttacggcgtggactaccagggtatctaatcctgttcgctacccacgctttcgtccatcagcgtcaatcaatttgtagtaacctgccttcgcaattggtattccatgtaatctctaagcatttcaccgctacactacatattctagttacttccaaataattcaagccaaacagtatcaatggccgttccatcgttgagcgatgggctttcaccactgacttatctggccgcctacggaccctttaaacccaatgattccggataacgcttggatcctccgtattaccgcggctgctggcacggagttagccgatccttattctcacagtaccgtcaagctcggtcacgaccgagtgtttcttcctgtgcaaaagcagtttacaatccataggaccgtcatcctgcacgcggcatggctggttcaggcttgcgcccattgaccaatattcctcactgctgcctcccgtaggagtctggtccgtgtctcagtaccagtgtgggggatctccctctcaggacccctacccatcgttgccttggtaagccgttaccttaccaactagctaatgggacgcatgctcatcttttaccgttgtgactttaatagtgtgttgatgccaactcactatactatgaggtattaatccaaatttctctgggctatccctctgtaaaaggtagattgcatacgcgttacgcacccgtgcgccggtctcaaatattgctattctacccctcgacttgcatgtgttaagcctgccgctagcgttcatcctgagccaggatcaaactcttcatcgtatattgtttgaagttagcattaatgctttcttctgtttttgatgctctagctttatttcaaatcttacgattcgctcttactctttattcttttgttttaaatatcgctatttaaaacggctgtcaattcaatatgtctaggaacttgtcttgcttttttttagcctcgtttgtgtctttatctgtttctcgaagcgggtgcaaaagtagtggttattttttaactggcaagctttttgataagtttttttgaaaatatttattctcgtttgcttttctttttcttaaccaatttgtcaatgaacttaatctcttgcgggtgcaaaggtagtttctttttactattttcctaatctttttaataaaatttttgttttattttttttcgattcgtttttaatatgtaataagaactgtgtgccaatgcgggtgcaaaagtaatacttctttttggttttgcaagctgttttttgactgtttttttgctttttgctttaaggttttggttttgtggtggttatctttgtttttttttgaagcgttgctaattgttgggggtatttaaggctttattgacatcgattgcgtttctttttagttgtcctagtagggtttgtgcttgctttctcctgttttgctgggttgcttaatgttttgtctttatatttttactccttatatataggtgtaggggttttgtgttatggaatgttgaatcttataacgcgggtatctttattttttaatgggttttgtattattgcatttgcagtttgtggtttgcaacgcagatgacacggatttgataaattaaaaaaaatggatttgtttgtttttggaaatagctgggtcaaaattttgaatgctgatgtgctgatgtgctgcgccgcgtgagggatagcagcggaaatcctttttttgaggcttttcgccgataaaaaagattgtagcgcatagcccgacccgaccttttcgggaggggcacgtccaaaaaattaaaaattaaaaattaaaaaacataccttatatatgatacttgttttatggggtttggggatctaagtttataaacttgtgtggaaatattaaaagtaggatatttgtcgtttaaaaatagatagaaaggcaagattattttgtggaatttatgaagttgttattgtctgaagtgatagtgggttattttggattgatttcttataaaaaaaatatttaatccttgtgcgtttcttaatttcgtatttattaattgaatttaaaagcgataaatgaaaaaagtactacttgccgaagatgattttgattttgctgatgttttaaaacaatatctggagctatataattaccatattacttgggctaaagacggggaagaagccttactcctatttgagaatgaaactttcgatatttgcgtgtttgatatcatgatgccaaaaatggacggttttacactagcccaaaaaataattgatatgaatcctgaaacaccatttgttttcttaactgccagaaaactcaaagaagacaaactaaaaggattgcaattgggtgccgatgattatattgtaaaaccttttgaagccgacgaattggtcttgagattaaacaatattttgaaaagaggcgagcaaaaaaatcaaacaactttttcaggcgatgaaataacaattggcaattatatttttgatccgaataggttagaattaaagttaggtaatcatacacaaaggcttacagtaaaggaagttgctattattttgttttttctaaaaaataaaaacaaacgcataaaacgaaataatattttgcaacatatttggggaaatgacgatttcttttcaggaagaagtatggatgtttttataagtcgaattagaaaatatttctctagcgacaaccgaattactattgaaagtattcgcaatgtaggtttagaatttaagattataacctaaaaaaaaagcagacctataagccggattctgttctcgatattactaacgataccttatcatttatctaggcttgcaattactcacaagctccatctttctacccttcagcaacggacgagaagcccttaactaccgatatacttgaaatttcaccgcatagagtttacctggtttcactacagcattacctgtacatactttctgttgcacttgtcctaaccccaataaattggagccgacgggtgttacccgctatgcttctctctggtgtccggactttcctcccccaataaattggcgacgataaggcggtctgcgctgcaaaagtagtttttttaggagccaatcccgctatccgttgcaatcttttttcggcgaaaagcctcaaaaaggattttcactactatcggggctagggcattgcggtaataaaacaacattttcacaaaatacctaaataaaaaagcgaccctttagaggccgctttaaatgttttcacaacggaataatccttattgtgaattgcttcaaaattgtagtacaatactacaactttttttttatatataataaaaatgtatctaaataatattaattatcttacatttatagttaaaaataaatctagacaactagaataattaaaatataaccaagtacaatgaaaaaaatattaggattagatttaggaacaaatagtattggatgggcgtttataaatgaggcagaaaacgagattgaagtgtcttcaattgtaaatacaggcgttcgcattgttccacttactacagatgaagaatctgatttcaaaaaaggcaatacaatttctataaacgcagatagaaccttaaaacgtggcgcaagaagaggtttgcaacgtttcaaacaaagaagagaagctttattagaaacattcaacagaataaaattcattgcgactgactttgtttatgcagaaactggcgcagcgacaactttttcttcttatcaattaagagctaaatcggctgttgaagccgttacaaaagaagaattagttaaagttttattaatgcttaacaaaaaaagagggtataaaagcagccgaaaagcaaaaactgccgaagaaggcgatgcaattgacggaatgaaaattgccaaagaaattttcgaaaacaatttaactccaggacaatgggtttacaattctttatcaaaaggaggtaaatttattcctgatttttatcattccgatttgcagaaggaattagaaaagatagttcgttttcaaaatcaatttcattccgaacaaataaatgataaattattagcagacattcaaggaaaatcaagaacgcagacttctcaacatttttcaaaaacattgaatattcctcttgccgaaaataaaggaactagagaagaaaccaaattgcaacattaccaatggagaaatgaagctttggcaaatgaactcgatatgaaaattttggcatttattattactgaaatcaacaatcaaattaaccaatccagcggttatttgggtgccataagcgaccgaagcaaagaattgtattttaatcaggaaacggttgggcagtatcaatacaaacaacttcaagaaaatgtacacgctaaacttaaaaatcaagttttttaccgtcaggattatttagatgaatttgaaaaaatttgggaaactcaagcaaaatttcattctgaattgaatgaaaaattaaaagcagaaattagagatataaccatattctatcaaagaaaactaaaatctcaaaaacatttagtaagcttttgcgaatttgaaaaaggacataaagccattccaaaatcgtcccctttgtttcaagaatttaggatttggcagaatttaaacaatgttgttgttaaaaacgaaactacaaaagaggtatttgaattgagtgaagagttgaagcaattaatcgccgaagaattgcagtttaaagaaagtatgaccgatgttcagatgttaactttttgcgaactaaagaaaggaactcataccgttaatttcaaaaaaattgaaggaaacagaaccaatacttctatttataaagcttttgaaaaaatattggaagtagaaggctatgaaatagatttttctaaaatgaaacctttagaaataaaagaaactgttgctccaatcttcgaaactttaaatatcaatactgttattttagattttgacccaacaattcaaggtaatgattttgacaaacaaccttattatcaattgtggcatttattatattcggcagaagatgatgataaattaaaagaaactttaaaaaccaaatttggtttcaaagaaaatcaccttccgtttattttgaatattaatcttcaagccgattacggaagtttgagtgctaaggctatcaaaaaaatattaccgcatttgatggatgggcatatttatgacaaagcttgtttaatggtaggttataatcattcctcatcattaactacagcacaaaataacgatagagttttaaaggataccttagaattactcaagaaaaatagtttgcgaaatcctgtggtggagaaaatccttaatcaaatgattaatgtgattaatgctattatgaaagatcccgcaatgggaaaaccagatgaaattcgagtagaattagctcgtgagttgaaagcaaataatgaacaacgaaaaaaagctacttcggatattaataccgcaactaccgaacacgaaagaattagaaaattattgcattccgaatttaatatacctagagtaactagaaacgatattattagatacaaactttggctagaaactggaggaatttctttatatacaggaaatccaattaaagcgtctgatttattttccaaaaattatgacatcgaacatattattccaaaatccagattatttgatgatagtttttcgaacaaaacgctatgcgaaagacagctaaatattgacaaaagtaacaaaacagcttattcctttttacaagaaaagctttcagaaaatgattttgctgcatatgaaaatagagtaaaagatttatttaaaacaggaaaaataaaaagctatacaaagtacaaaaaactcttaatggcagataacgaaattccataaggattcattgaccgtcaattacgagaaacacaatacatagcaaaaaaagccaaagaaattttattggaagtttccagaaatgtaaccgcgactattggaagcgtaaccgataaattacgtcaagattgggaattggtcgatgtgatgaaagaactcaactgggagaaatacgacaaattaggtttgacccatattgaagaaggcaaaaacggagaacgattgtctaaaataaaagattggacaaaacgtaacgaccaccgccatcacgcaatggacgcgataacggttgcctttacaaaacctgcatacattcagtatttaaacaatttgaatgctaaaacacaaggtgaaaataaagctaattcaattattggtatagagaacaagcatttatatcgagataaaaacaacaaattacgtttcatttctcctatgaaaaactttagagaagaagccaaaaagcaactcgaaagtattttgatttcgtataaagccaaaaacaaagtagttaccaaaaataaaaacaccactaaaaaaagcggtggaaccaatcagaaaattcaactaacacctcgtggacgattacataaagaaacggtttatggaaaattgcagcaatatgctactaaagaggaaaaagtaaatgcgagttttactgaagactatattcaaaaagttgccaaaaaagaataccgtgaagctttgttaaaaagattggaagaaaatgacaacgaccctaaaaaagcatttacaggtaaaaatgctttaaacaaaactcccatttatattagtttaaaggacaatattatagttccagaaaaagtaaagacagtttggttagaaaccgattataccattagaaaagatattacacccgatttaaaaattgataaagtaatcgatgttggtataaaaagaatactccaaaatcgtttgaacgaatttaatggagatcctaaaaaagcatttgttaatctgggcgaaagcccaatttggctcaacaaagaaaaagggattgctataaaacgtgtgactataagtggtgttagcaatgcacaagctttacacaccaaaaaagaccatttgggaaatgaaattttagacaaaaacggaaacccaattccagtagatttcataagtaccggaaacaaccatcacgtagccatttacagagatgaaaaagggaatttacaagaagaagtggtttcattttatgacgctgtcattaggcgaaatcttggattatcagtaataaataaaaaccatgaaaaagggtgggaattcttattttctatgaaacaaaatgagttttttatatttccatcggatggttttaatcctcacgaaatagatttattaaatcctaataattatcatttgattagtcctaatatttttagggtacagaaaatttcaacaaaaaattatatgtttaatcatcatctagaaactaaagctgttgatggagaaatgttaaaatcaaaaaaagaattatctaaaacaagttatcatttcatccaaactccaacaaatttgaatggaattataaaagtccgcatcaatcatttaggtaaaattgttcatttaggagaatattaatttctagattataaattaaataggattgggctttagcctattcaacaaaaaaataggaataaacaaaaaggctttagccaaaatatttcggctaaagcctttcttaaatcaattattatccgcctccatttaaaaatggaggcaattgaaaaaggagtatagagttctaaaatcataatcgatacaattgataaaaaattaagataaattcaaattcatagaaatgggttttaaccaatttaacaatataaataatcgagatttactttagccaaaatatttcataaaccatttttaaatcgcaaaatatgataaaacgcacccttttttttggcaatcccgcttatttaagcaccaaaaacgagcaaattgtaatttcttatcccaacaaggagcaagaaaccaaaactgtggctattgaagatattggcgtaatcgttttagaaaaccaacaaataaccattaccaatggtttgttagaaaaactaaccaacaacaacgtggcgttaattaattgcgaccaacagcatttgcctattgggttgttaatgccgctcaacggacatacagaacaatcggaacggtttaaaaaccaaattaacgcttctgttccacttaaaaaaaacttatggcaacaaaccattagtgccaaaatcatgaaccaagcaggattgcttaaagaaaaaggaatcccgtgccgaaaaatggagctttgggcaaaagaggttacatcaggagatgcgcttaatcacgaatctagagcagctgtattttattggcaaagcctgattacggtaccaaattttaccagaggacaaaaaggaattccgcccaataatttattaaactatgggtatgcaatactgcgagccattactgcaagagccattgttagttcgggcatgttacccactttaggcatctttcatcgcaacaaatacaatgcctattgtttggctgatgatattatggaaccctatcgcccatatgtagatttgatcgtgtgtcatattatagatacagaggattcatacgatgagctgaccatcgaaatcaaaaaacatttactcagcattgccacaattgatgtatgtatagacggaaaaaatagccccttgatggttgccatgagcagaacaacacattccttacaggaatgctttgcgggagccgcaagaaaaattttataccctatttatgtatgacgaacattacacccgtttaaaccagtatagaagtttgtggatattagttttttttgacttacctaccgaaacgcggaaagagcgtaaaattgccagtgaatttcgcaagaaattattggacgatggtttttctatgtttcagttttcgatctatatacgattttgtgccagcagagaaaatgccgaagtacataccaaaagaataagaaatagtttgcccgaacacggcaaaattggagtaatgcaaataaccgataaacaatttggtatgatggagcttttttatggaaaaaaacctgtagaaacagacaaaccttcgcaacaattagaacttttttgaaaaataggatttagaaatattagacctaccagaatatcaacacacaaacagaactgttttttaatttcaaaataagcatataaccaccaacatatcaaacgattaactcgcggtatgttggtaattataagctaaaatacaattttgaaagcaattcacaacgctaaatatttcttttattttattttgcttgttggtaattataagctaaaatacaattttgaaagcaattcacaactattgaacagcaattttcatcagatgatgagttggtaattataagctaaaatacaattttgaaagcaattcacaactacggcattcaaaccccccatctattactgttggtaattataagctaaaatacaattttgaaagcaattcacaacaaagacttatttaagtctaaagaagtgcctgttggtaattataagctgaaatacaattttgaaagcaattcacaacgaatgcgtgcgctgtatgtatttcgttttgttggtaattataagctaaaatacaattttgaaagcaattcacaacaatgtgtctattgtgaatacattacctactgttggtaattataagctaaaatacaattttgaaagcaattcacaacacggaataaacggaaacgagcaacttattagttggtaattataagctaaaatacaattttgaaagcaattcacaacattacagttgctttaaataaaaagtaaaagttggtaattataagctaaaatacaattttgaaagcaattcacaacaaaacaatcatctatgttgctaaatcttttgttggtaattataagctaaaatacaattttgaaagcaattcacaacgaacacataacaggacacaaggcattggctgttggtaattataagctaaaatacaattttgaaagcaattcacaacactttgatatacgacatctcgcttactggagttggtaattataagctaaaatacaattttgaaagcaattcacaactaagttttcctacttaaccattttttaaaagttggtaattataagctaaaatacaattttgaaagcaattcacaacatagtactttgatttcacgtgcgaaaacggttggtaattataagctaaaatacaattttgaaagcaattcacaacggtggcaatgtgtattcaaacacggatatagttggtaattataagctaaaatacaattttgaaagcaattcacaacggagctggttcgggtacaattacattaaatgttggtaattataagctaaaatacaattttgaaagcaattcacaacattctctttcagtttttcgatattgtttttgttggtaattataagctaaaatacaattttgaaagcaattcacaacctgtcgtacgctctagtattagatatatctgttggtaattataagctaaaatacaattttgaaagcaattcacaactaatatttagcataaatttataatcgtcctgttggtaattataagctaaaatacaattttgaaagcaattcacaacagtgctaccttcgataattagcgcattaatgttggtaattataagctaaaatacaattttgaaagcaattcacaaccacaaatggggaatttgacgaaaacaaaagttggtaattataagctaaaataacccgttgggtgtaattaaattatttgatgacactatcccgcaaagtttttataggggtcaaaacaccatttacttttatgatgttttacgtcgacctcaattgcgatttcctgtgtttgtggttgaattattttaatttcaattccttttgatctaaatatttgtttaacatttgaatatattaataatccattataatcccaatcacaaaaataatatattggtagttttaatttgtcttgagaaatatcttctaatggtttggtattattacctccaacataccataactctatattatgatttttatattctagtggaacttttagacaatcaagattctcacaaagcacaatgacttttggattaaggcaatcaactacaaatctccattgattattttttgggtctttttctggaaattcagcaagttctaatatttttaaaattgcatttttaacacttaatttattagataagcatttagaattttgatttttataaattaaagcagataactttttctctgtagttacattcttttttaattcctctttgttataaaaaacaaacattaatgcttttatatcttcatcattaaaagattttttagcatcattttctattccagatttttcaaaaaaattattataatattcataggtttctaaaaattcctgctggtaatactcattaaatcttgatgatgcttcgataatagaatgatttccaaccttatattttattagtttcttttgtttaaaaatgacctgattaataaaatcattgttggttatttttaatcttgtttgctttgatttataaagttgatgcaatccttttatatgtttccattcaattttcttcatattttaattgtttgatgatccaaaaattggcactggagtgtagtttatattttcatcttctaaactattgtgcaacaaataaatattttgattttctgcatcaattttattgggatttatcgataaagataaaatttggtaatcatttgcttttgcaatattataaagcatatcaaaattacttccaagaccttctgcctcatcaatagccatataacgaattccttttcttattttcgatttcgaagttttatcgattaaagataattttgccatacataaaagtgctattgctgaatatgtttgacttgtactaccagcagttttgttcccttgtgctgatttaatagaaaatttcaacccataatatgattttggattcaataaatccctaacttctagtttgttcgctcttgttccaccagttcgataaaatgcttcttttaatttttcttccaaagttggaaaactttctaattctgttgaaaatgttttaagtgtttcaaataatgattcatccataccgtattgaatatctttatttatttcttcggtaaaattattcatccattcttttttgaaaacattatcatatataacatctaaatcaactttgtgacctccagttattttcttttcttctgaattcaaaaaattacttattattcttatatccattaattgactacttacttcatttgaaacatcgtcgataatctcacttaatttttgaagctttcggctatttagctttctatttttaatatttatatttcgtaaataattagaaatattttcaattatatctgcgtctaataaatctttttcatcaaatatttcttgaggtagaatttctctgcataaaggactaaaatcgccagtgtctttatattgattattcttctgtttaagaaaagtatagactacaaagttgtagtttgaaatataatcattattagcattattagactttttttctaattcattaatttcaatatcttcataaatatccattactatttcttctgtaaatagattagggttttgactataaatctcatttttcttatgtttaatatttgaaatttttaaatctatttcctttagagattctgtttgattattattacttatttgagtattgtaagcttttttcaattctatataataatcttcggcttcgtttaattctttatttaagctgtctaaatcaagatttttagttgatataaaattatatttatttttataatcatctatttcatcaataattattggtgttaaaaatgattctaattcacgttctagattgatatttagattgtctaattttcgcttttcgacttctaattttctgaaatttgttctcgcatttgtaaactgttcattaatttctttttctcttgaaaaagcatcaaaataatcatcaaagaagatatttgaaacttcatacatttcgtgattttcaagttgttcttctagtccaatatctgaattaaaagcaagtatataatcatcaggactttctaattgttctaaaacttctatgagcaattcaatgtttgctaattttctctccaaatttaaaatgtcttcttcaatcgtaaaagtttgtttttgaaaatattccttaatttcttctttatcctccttgtcaaaaattggtgattcaattaaagatatgtgttccattaagccatttagatcaatccaaaaacctttgtcatttttatttgatattttaagattttctattaattgatttggttccggaatatatcttaataaatcatctaatggagcatctacttttatattttcattgtggtatttatgaattatactttcctggaataaatctaattttttagtttgatttaaagcccaatgtgctaatgattttttatcttcaatattatttaaagcttttaatttatttttaatttctagctcttttttgtaaacttctgtttttgaattaatttgtacaagtacatttttaccctttaaattttcatttgtaaaaaaagtcaaaatgttttttgattttaacttttcagtcaattctcttaattgtgttatttgaagtttattttgatggtatttattatatttttcttttaaaatttctttttcagaacaattaaaatcctgtaaccaagagaaaaacttttttaatttcttttcactttcttcccatttatttttttctataaatgcagtttcccattttggatctattatttcaatttcttcttttgttgaaattattttttcttggacaattgtttttaattggatgagtattttggaactatcttcataaagattaattttctctcttatttcattttctgaattagtaatttcctttgaatagtggttaaaagaggctaataagtaaatctgttcgtttttatctttttcatttttcaatttcaacaattcacttaacgcattttgcttatcggtgagtaattctatttcatttaagtttttatcaaattctttggtgtcaccattcaattctttgacggtttgattaaatttttcaagtaattctttttctttttcttcaccaaataaaaaactttgtaatttttcactcttattcatatccaaagattctctagaaaatgcttgaataattttggcataattgtctaaagttttattactgatagacaaatcaataggcaatatctcatttttgaaaagaattttatgataatttgaagtcttatgccaagattcacaagttagttgcaaagtattactgatgtgttctttcaaattttgaattggtaatatttgattgtttttgagaaaatcggaataccctaaaacagtttcaaaaggaatcaattgagtatcgtcatcaaaattattaccctcttgaataataaacatatttgaagtaccagcactttctaaataaataccaataactataaatttatttttctctacctcaacatttataaaagcataacccatatcagttccattaccatcagttcttaaaaccatagttttaggttctctcgtacttgtaccttttgtaggagaatgaaaagccgaagtaccaacacaaattaattgtaaaatatcagaaatcatacttttaccagcgccaccttcgccaacaaaatcagttctgaacggattaaaatcataatcaaatccttgatggtgtactattcctaaagttgatagtcttttaattattggatagtctttcatttcaattcgtttagtgtttcctctatgtttatgatgtactcttcatatacttttagcaatctgtcgaatgcaggtaatgtatgaaactcatctttatctaatgttatccaaccaatttttttaaattcttcaagagccgattgaatcgttttatcaattatttcatcattgtaattaccaggagttgtattctttgatttagcaattaaagtataaataccttgcttgtagtcttcacattcaagacggattttttcttttaattttttaacagaatctaaatcaaattctcggtcaataaacataattttataaattagaaatccaataattacatactcacttttcagcatatacctgtgtttatcagagatatttccacgatcattatttataaaatctaaataataatagcttgcattgtcttcgcctcctttaactaaatcgactttaaaaaaggcattgtaatacattttaagactttcttcattttgcgaaataaaattatattgatttatttgttttccttctttttgaaagtgtacaccatcttttaataaataatcaattgaagcaaataaatcctctgaattatcactgtacaagaaactacttaaactaattttattattttcattttccataatgcaatgtttttaaattcgctattcgtttctaattctttatcaatttctaatttatatttctctttattgctataaacatatttaatgatgttaaaagttacgctcacagcgatttgactgcttttattttcttcaataattttaaaaaaaacttctgataatttgatacttccttttagttctatttctgataaaatatatttttcccaatttctaatagtgtctatttcgtttattttatcttgagctttcttaatgttttcctcaattattttttcgttttgagcatatttttttctttcttttggtttggaaggaaataattctcggtctttatcaattattgtgaaatgtggcgttgcaatatgaatttgtggtgaagaaatattacttggaaatactattgatttattaccattgttagattctaatgtacttttat

SEQ ID NO: 1555 - DNA, 22179 bp, synthetic construct
  source 1..22179: mol_type = other DNA
  misc_feature 1..22179: note = Synthetic
agatggagccaaaacaaaaacgtattcggtatccataaaatcagaattacatcaagaccaaatggcttttcaagaaacagaatattacaaagaaaaagcaaaacatcgatacaagatagaagccaaaaatagcgagttaaaaaatgtacacggttatgatagagcgatatcatacggtattaccaatatgcaaatgcaaggtgcaatagcaatttttacagtcaacttaaaaagaatactcaaattaatgtagaaaatgtaatctacacatgcattttgccaaatgaacctgtataagtcaaaaaccgactcatataacctacaataaaaaacagttacaaaaataaaaacgcttataacagatgtttgaaatcctgttacaagcgttttttattatctaaaaaaggatgctaatcaaaataagcgatgtttttcagtgccctcaaaattttagcagctttttttcatccttacagttgtaatatgaaagattctaatggattaatctttatttgcaaggttccttctccttgagaaactcttaattgagaagaatacacttgatacaattgatcttttacagtatatagaccatctattaattgccactttttaatgaggtcttttgaaattttaagttcaaaagtacttgtggtcactgatgaaaaattagtaacaacaattattttttgctctgtagaccaacgggcaaatgaaaaaatactttcgtcataaccttttgtaaattgacggttttgagtatgcaactcctgataatcgctcatcaaagccggactattcaatgaaaagttaagaagtcgtctataaaaatctcgcaactctttttcatttgctgttaataacgctccatcaaatttgccattattcatccagcgctggtgatttggcacgccaacataatcaaaaattgatgttcttgaatgtgttccaaatccagcattttcattgccagcttctccaacttcttgaccaaaataaaccatagtaggagctgaacttatggttgttgaaactaccatcaatggttttcctttttcagctgatccggcaaattctggacttgctaagcgctgctcgtcatgattgtccagaaaatgaagcatgtggttttcaatgtcttttaaaccattctggatttctacaagactatttggtgtaccttgacctttcacgatggctttcaaagcgtcatacgtctctactttgtcatacaaataatccattttacctagatggatgtaatttctatattcttttgggttgtaaacttcggctaatagaaaagcttctggatttttcattttaatggccgaattcatataactccaaaattcatacggtaccatttcggccatgtcaaatcggaaaccatctaccccttttgctgtccaatacaaagctatgtctttgaatttaacccacgaattgggtacatttttatttttccaaaattcaaaatgttcctgaactgtttttttgtcatatcgtgctggaagttctggaaaatctttggacccatccgggcgaataccataatttacttttacggtctcgtaccaatcattcttatctggtttagccattcgggagccatttccagtccattttgctggattttcttcaaattccccatcaattaacggatgaacttctccgtttaatggtgcattcgtatcaggaacttcaaatttagtgtttggaatataataaaaattgttatctcttttatatttaacagtagtatcatcatcagcgccaaaatcgcgaactcctgagggattgtttttactctcgtacttgcgcgctatgtgatttgggacaatatcaataatcacttttaatcccgcttgatgcgttctattaataagggcttcaaattcttgcaatcggttttcaggatttactgctaaatctgggtttacattgtagtaatctttcacagcataaggcgatcctgctctacctttcacgacttctgggtcatcattagaaattccgatagcagtataatcccgaattaaagcatgatgcggcactcccgtgtaccaaatatgacttacgcctaaatcctttatttcttgcaaggctattgtggtaaaatcgttgaacttccctactccattttcttcaatagttccccaaggtttgttggtagtatttttatttccaaataatcgcgtaaaaacttgatacacgacttcttttttacgtgcaacaggttctttttgcgtagtattcattttcaaatcagttgttttgcaggctattgccaataatcccaagcctacactcgcaacaatagttctttttttcatcatagttatcattaatgctaatgtcaataggtcttgtaccaaatggacatcagattttaaatttaatattttttatactagatgaagtgaaaaacaattaaaattataccgttctacgtactagtgaataaactacaacgaaagagtagttttatttgttgataacttttagtgtaaacctatcctttaaagtccgttttgactaattataaataaatcctaatatggattaggattgtttcctttttcataaatttgacaaaaattagatccattgaaaaaaacactttttttccttactcaactagccattttattgatttcgcagtttgttttggcgcaagccccaaaaaaaatcaacatagaaaatgctgatttttcagatgtgtatcaaatagaagtgccagatgccgttttactcattggtaacgttcgtataagccatgatggaatagttctaacctgcaacaaagcttattattttcaaaaggaaaaatacatcaaagcttttggaaacgtgcaaatggtgcaaggcgacactttgtttttgaacagtaaatacgccgagtacaatggaaatgtaaaaaaagcatatgcttctggtgacgcagttatgagttcgccagacgcaacgttggtaacagatattatcaattttgaccgaaatattcaagaagcgtattacgatacagcgggaacaattaccaataaagacaatacacttaagagtaattcaggaagatattatgtaaaagaaaagaaatttcgatttttgacagcggttaccattacaaatcctacgtatgtgataaaatcaaatcatttggattattttagtaattcgggacattcgtatcttttaggaccctcaacaattaccagtaaagccaattacatttacaccgaaaaaggattttatgacaccaaaaaaaatctagcacacttcctaaacaaatcttatatcaaatatgacgatagagtgattaaaggtgacagtttgtattatgatagaaacagagaatttgcatcggcgactcgaaatgtaaaaataacagattctataaaccgcggtattgtcaaagggcattatgccgaagtgtttaaaaaacaagattctatgtatgttacaaaaagagcggtggcagtaaattttgtcgaaaatgactcggtttatattcacggaaaaaaactgatggtcaccggaaaagaaggaaacagaatcattagagcctttaataacgtccgatttttcaaaaaggatatgagtgggaaatgtgattcgatacattctagtactaaaatgggactgacaaaaatgataggaaatccaatactttggaacgcagaaaaccaaattacgggcgacattatgcatttaataggagataaaaccactcaaaaattagactctcttaaagtactcgaaaatacttttattctctcaaaagacactttgggaacaggatacaatcaagtcaagggacaaaatttatatgggaaatttctagaaggaaaattacacgatgttgatattatcaaaaacgcagaagtcatttactacatgcgtaatgaagcacaagaattgataggaattaacaaaaataaaagcagtaaaataaatttagtactagctgataatgagatcgaaaccattactttttttcaagaagttgatggagatattttccccgaagacgaactgcccgaaaatgctagaaaactaagaggcctagtttggcgaggcgatgaacgtataaaatcaaaggacgatatttttcctcccgaagaaaatgaagacaatgaaaaaattgccaaagccactaaatcagctaaaggcaaagggaatattccgatgaaaattaggaaagaaacactgaattacgataaaaagaaagttaagaagtagtctcagtttgcagtcacagtacacagtcacagtttacagtgaacagtatcagttttcagtaaacagtcacagtaaatagctgccgataacaaaaaaacatccaataaacgattaaacaataatttgtgaacacagattttttaaaataccaagcacaaacttcaccctatccgctaggcatggaggtgtcacacgctatagggtcttacatctacgcaacagattctagaaaatacctagattttgtagcaggcgtatcagcctgtgccttaggccaccagcatcctagagtcaaccaagccataaaagatcaattagataaatattcacacgtaatggtatacggcgaatattctcaaagcccagctgtagcttattgcaaattgttagcctcattattgcccgcacctttagacaaaacctatctggttaattcaggtacagaagccatagaaggagccttaaaactagcccgaagaaccacaggaagaagtcaattgatttcgtgtcacaacgcgtatcacggcaataccatgggttctatgagtgtcatgggatttgaagaacgcaaacaagtctttcgcccgttgatccctgatgtggagtttatcacgtttaataacgaagctgatttacttaaaataacgcacaaaactgcaggagtattattagaaaccattcaaggtggagcgggattcattcaaccacacaatgactatctcaaaaaagtgagagaacgctgtgatgaagtaggtgccatgatgattctggatgaaattcaaccaggttttgggagaaccggaaaactttttgggttccaaaattacgatgttgttcctgatattgtcgtcatgggaaaaggcatgggtggcggaatgcctgttggtgcttttacagcttcatcagcacaaatggatttgttgagtgacaatccaaagttaggacacataactacctttggtggacatcctgtcatagcggcagcctgcttagctactttgcaagaaattacagaaactaatatcatgcaggaagctcttgagaaagaaaaattatttagatcgcttttggtacatcctttgatacaagaaataagaggtaaaggattgatgctagccgccatgactaaaagcccagatataacaaacgaggttattttaaaatgtcaagatagaggacttatcttattctggctcctttttgaaggatgcgccatcaggattacacctcctttgactatttcggaggaagaaatacgagaaggttgtagcattatactagaagtgatggatgaaatgatgaataagaattaatctttaaaatattcgacaaggagatactctttgttttaactaaagcatttttttgttaattaaattgttcacaaaaattctaaattaccctcacagtacacccacgattacctaattttagttaggctaaattaaaaaaccaaagtatgcaattaagcaacgaagaagaagattataacttatccttatcaaaatttgagtccatgttgaaaaccaacaaggtattctttttcgactccgaagaatttgaagaaattatccttcattatctggatatgggcaaagccactttggcaaaaaaagccctcaaattagccttggaacaacatcctaaagcaacaggacttaaactcgtgcaagtcgagatgcttgtgtatgatgataaattagaactcgctgaaaaaatattgaatgagttgtatgctattgaacccaataatgaagaaatatacattcaaaaagcaaatatatgctctaaaagagaccaacatgaaaaagctgttgaactcttaaaaattgcacttaaatatacagatgatcttgccgatgtgtataatttaataggcatggagtatttgtttatggacaattttgaaatggcaaaaacaaactttatcaattgtcttgaggaagatcttgaagatcaatcagcgttgtataacgtggtatattgctttgaatttttagatcaaaatcaagatgcaattcaatttttaaaaggatacattgataaaaatccgtatagtgaaattgcttggcaccaacttggacgtttgcattacagcgtaaaagaatatgaagaagctatacgtgcttatgaatatgcaacgctgatagatgatgaatttgtgggcgcttttatggaaaaagccaaagcatacgaacgtcttaaaaattatgaaaaagccgttgaaagttacagtagaactattgagttagatgatgcaacttcttatgcgctgttgcgaatgggaaaatgtcatgaaaaacttggcaataccactctagctctcaaatattataatcaaactgtacatgaagatcctttactagataaaggctggattgccataactgatttttatgtacgtcaaaaaaactatcaaaaagcactctattttgtaaacaaagcacttgctattgacaaccaaaacaaattgtattggaaacgatttgcaagcatcaacaaaaaaatgggcttttttgaagaagcaacctttggctacaaaaaagcagttgaatatggagaaacaagccttgatgtttggcttttttgggtagatattttacaatttcaaggagagtttatggcagctgttcaaacacttttgcaggctaccgaatattatcctgaagaaaacgaaattgaataccgattagctggtttatattatttactaaacgatacaacgaaggcaaaatttcatttgagtaatgctttacgactcaatgccgccaattcaaagttattaaaaaattctttcccatctgtttgggagaaaaaatcagtgcaaaaccacatcaaaaaatatacgggtacaaatgacggagagtaatacaagacgttttgggttagtaggacgtaacatcagttattctttttctaaaaaatattttactgagaaatttgctgcggcaggttttgaaggttgtacttatgaaaattttgacattcaagacattcaagattttccaacaattaggtttgaaaacaaagatatacaaggacttaatgtaaccattccatacaaagaaacggttattccttatctagattccttatccaaaaaagctgcgcttataggtgcagtaaataccatacgcgttacaaaaaaaggcaaactaaaaggatacaatactgattattttggctttaaaaaatccctgatacccttactgcaacctcatcacaagaaagccttgattttaggcacaggtggagcttctaaaggcgttgcttttgctcttgatgagcttgacattccgtatgtatttgtatcaagagaagctactgaaacaagcataagttatgacagaattaatgctacaacatttgataattaccacattattattaatgctacgccagtaggtacaagcccaaatactgatgctttcccactactgccctattcgttttttacagagaagcacattgcctacgatttaatttacaaccccgcagaaacacaatttttgaaaaaagctgctgctcaaggcgctcaaacaaaaaatggcttagacatgcttatttttcaagctgaaaaagcttggaaaatttggaataagtaaaccttgaaaataattgcaaaatccctcaaataaacaattcatttgagggattttttattccttgaaactactgcttaaatagaccaataaattttaaaattataccattaaaaaagcgacccttgtgaggccgctttaaatgttttcacaacggaataatccttattgtgaattgcttcaaaattgtcttacaatattacgaaatatttttttaatgcaaataaggtttttcgtaaaatcaatagtttatttttcgtaagtttataactataataaataggatgaaacatgaagaaaatattagggttggatttagggacaacatcaattggttggtcttttattaacgaagcagaaaatgaaaatgaaacatcattaataataaatactggggttcggattgtaccgcttacaacagatgaagaagctgacttcaaaaaaggaaatacaatttctataaacgcagatagaaccctaaagcgtggagcgagaagaagtttgcaacgttttaagctaagaagaaatgctttattagaaattttcagcaaaataaaattcattcctgccaattttgtttatgcagaaaatggaactgcaactactttttcatcctatcaattaagagctaaagcagcaaccaaagctgttagcaaagaagaattagttcaagttttattaatgctcaacaaaaaacgaggttacaaaagcagccgaaaatccaaaactgccgatgaaggcgatgcggttgacggaatgaaaattgctaaagaaatttttgaaaacaatttgactccaggccaatgggtttataattcgttatcaaaaggtggaaaattcattcctgatttttatcgttctgatttgcaaaaggaattagaaaagattatgcattttcaaaatcaatttcattcggaacaaatgaatgaaaaattattagaaaatattcaaggcaaagctagaacggtaacttctcaatatttttcaaaaacattaaatattccgcttgccgaaaataaaggaactagagaagaaaccaaattacaacattacaaatggagaaatgaggcattgacaattgaacttgatttgaaagttttggcctttattattaccgaaatcaacaatcaaattaatcaatctagcggttatcttggcgccattagcgaccgaagtaaagaattgtactttaatcaagaaacagttgggcaatttcaatacaaacaacttcaagaaaacagacacaccaaactaaaaaatcaagttttttaccgtcaggattatttggatgaatttgaaaaaatttgggaaactcaagcaaaattccattccgaattaaatgaaaaattgaaatcagaagttagagatattacgattttttaccaacgaaaattgaaatctcaaaagcatttggtaagtttttgtgaatttgaaaaaggccataaagccattccaaaatcatcgcctttgtttcaggaatttaggatttggcaaaacattaataatattgaatttaaaaaagaaaaagaaatttatccattaggagaagaacttaaacagattattagtcaagaacttttatttaaagaaaacatgactgatgcacaatttattaagttcatcgtaaatgaatgtaaattagaaaaaggtaattattccattaatttcaaaaaaattgaaggcaatagaaccaatactgaaatttttaaggcttttgagaaaattttaatccttgaaggctatgacgaattggatttttctaaattagatgcaatagatatcaaacaaattttcaaatcggcttttaaagatttggaaatcaatacggctatccttgatttcgacccaactattcaaggcaatgattttgacaaacaagagtattaccaattgtggcatttgctctattcatcagaggaagacgaacctttgaaaaaaaccttaatgacaaaatttggcttcaaagaaaatcacgttccatttcttttgaatataaatctacaagctgactatggcagtttgagtgccaaagcaataaaaaaagtattgcctcatttgatggacgggcatatttatgacaaggcttgtttgatggtgggctacaatcactcatcttcattgaccaaagaacaaaataatgatagagttttaaaagaaactttagaattgctcaagaaaaatagtttacgaaatccggtggtggagaaaattctcaatcaaatgattaatgtaatcaatgccattatcgaagatcctgcaatgggtaaacctgatgaaataagggtagaattggctcgtgaattgaaagcaaacaatgagcaacgaaatgaaatgacaaaggctatcaataaaagtacagccgaacatgacaaaataagacaattgctccgcaccgaatttggaataccaagagtgacccgaaacgacattataagatacaaactttggaaagaaacagaaggaatttcaatttataccggaaaaacaattgaagcttcaaaactttttaccaaagaatatgacattgaacatattataccaaaatcgcgtttgtttgatgatagttttgccaataaaacaatttgcgaacgccaattaaatattgataaaagtaacaaaacagcctattcttttttaaaagaaaaattatctgctgaagaatttgaccaattcgagaaaagagtaaaaagtttgtttggaaaaataagtcgcaccaaacaaaataaacttttgatggcagacaatgaaatcccggaaggatttattgaccgtcaattaagagaaacccaatacattgccaagaaagccaaagaaattttattggaagtttccagaaacgtatctgcaacaattggcagcgttaccgataaattgcgtgaagattgggaattggtagatgtaatgaaagaacttaattgggataaatacgataaattgggtttaacccatattgaggaaggtaaaaacggtgaacgcttatacaaaataaaagattggacaaaaagaaatgaccaccgccatcatgctatggatgccattactgttgcctttaccaaacccgcttatattcagtatttaaacaatttgaacgccaaaacacaacgcgaaaacaaagctcgatcaattgtgggcattgaagagaaatatttaaaaagagacaaaaataataagttgcgttttatagctccgatgcccaattttagggaagaagccaaaaagcaacttgaaaatattttaatttcatacaaagccaaaaacaaagtagttaccaaaaataaaaatacaaccaaaaaaagtggcggaaccaaccaaaaaattcaactaactccaagaggacagttgcacaaagaaaccgtttatggcaaactaaagcaatatgctacaaaagaggaaaaagtaggtgctaatttcactgaagaatacatccaaaaagtggccaaaaaagactatcgagaagcacttttgaaacgattgcaagaaaatgacaacgatcctaaaaaagcgtttacagggaaaaatactttaattaaaaaccctatttatattagtctaaaagacaacattgtagttcctgaaaaagtaaaaatagtttggttagaagctgattatactataagaaaagatattacacccgatttaaaaattgataaagtaattgatattggtttaaaaaccattcttcaaaaccgtttgaatgaatttggtaatgacccaaaaaaagcatttgtgaaccttgacgaaaacccgatttggcaaaacaaagaaaaaggaattgcgataaaacgtgttactattagtggagtgagtaatgcacaagctttacataccaaaaaagaccattttggaaatgaaattttagacaaaaacagtaaaccaattccagtagattttgtaagcacaggaaacaaccatcatgtagctatttatagagatgaaaaaggaaatttgcaagaagaagtagtttcgttttatgatgcagtagttcgccgaaatttaggcttgtctgttatcaacaaaactcacgaaaagggatgggaattcttgttttctatgaaacaaaatgagttttttatttttccttcggataattttaatcctcacgaaatggatctattgaatccaaataattatgctttgattagtcctaatatgtttagggtgcagaaattcacagttagagattatttttttagacatcatttagaaacaacagtagaggataaaaaagaacttaaagatatttcattcaaaagattaggcttaaatggaataaacggcattatcaaagttcgtgtcaatcatttaggtaaaattgttcatgttggagaatattaatttaaaaatcaataggaatgggttttaacccattggataatataaaacaatccaaataaggctttagccaaacatatttggctaaagcctattcaagataaatattcttatcccctccagctaaggagacaatttaaaagctggaggaaattcaaaagctggaggaaatttaaaagctggaggaaattcaaaagctggaggaaattcaaaaatgagaaattgagaaatttggaataaatttataattcaggaagatttaaattcaataagaatgagtttttatacattcaattacaatcaataggattgggttttaacccaatcgagaatatcgaatatttaagattggctttagccaaaatatcgacaacataaacaataaattatgccatacatcaaaacctatattcattttgtttggagtacaaaaaacagaattccttttctggacaacaaagaattaagacaaaaagtttggcatcacatcaaagaaaacgccaaagacaaaggaatatttgttgattttgtgaatggatattctgatcattgtcattgcctggtttctttaggggctgatcaaactattcaaaagacaatgcaactcattaaaggagaatcatccttttggattaacaaaaacaaattgtgtttagacaaatttgaatggcaagacgaatattttgcagtttcggtttcggaatctatgattgataaagtgcggaattatattaagaaacaagaggaacatcacagcaaacaaagctttcaagaagaatatgatgaattcatagctaaatatcaatttcaaaaagaatagaattagactaaagctatgcaaccttctttttattatatccctcctgctaaagcaggaggcaattcaaaagcaggaggcaattcaaaagcaggaggcaattcaaaagcaggaggcaattcaaaagcaggaggcaattaaataggaaaaagaaatttaaaacaaaaatcaattgaaaatctgggttgtaattcaaaagcagaatacatttgaaaattaaataaatgctttacattcctaaaatcaattggattggctttagcccattaataataaaaaaattaaatcataattggctttagccaaaatattttataatcattttttaatccaaaagatataatgataaaaagaaccctattcttcggtaatcctgcttatttgagtactaaaaacgagcaaatagtaatctcttatcccgacaaggaacaagaaaccaaaaccgtggccatcgaagacataggcgtaattgttctagaaaaccaacaaatcacgataaccaatggtttgctagaaaaactaaccaataataatgtggcattaattaattgtgatcaataccacatgcctattggcctattaatgccgcttagtggtcataccgaacaaacggagcgttttaaaaaccaaattaacgcttcggttccgctcaaaaagaatttatggcagcaaaccattagctctaaaatatcaaaccaagcaggattgctcaaagaaaaaggaattccgtgccggaaaatggaactttggtcaaaagaagtcacatcgggggatgcgctcaatcatgaatcgagagcagccgtattttattggcaaaacctaatcaaaattgaaaatttcactagaggacaaaagggaattgctcccaataacttattgaattatggatatgcaattttaagagctattacagcaagagcgcttgttagctctggaatgttacctactcttggcatctttcatcgcaacaaatacaatgcttattgccttgcggatgacattatggagccttatcgtccctatgttgatctgattgtgtgtcacattatgaaaacagaagacagctatgacgaactgactattgaaattaaaaaacaattgttaagtattgcaaccatcgatgtcttaatagacggaaaaaatagtccgttgatggttgccatgagcagaacaacccattccttacaagaatgttttgaaggaacagcaaggaaaattttataccctgtttatgtatgaggaacactacacccgattaaaccaatatagaagtttgtggatattagtattttttgatctgcccaccgaaacacgcaaagagcgtaaaattgctagtacttttagaaagaaattattagacgatggtttttctatgttccaattttccatctatatgcgtttttgtgccagtagagaaaatgcagaggtacataccaaacgaataaaaaacaacttacccgaacacggaaaaattggtgtaatgcaaataaccgataaacaatttggaatgatggaacttttttatggtaaaaaaccaatagaacccgaaaaaccttctcaacaattagaacttttctaataaacaggattagaaaaaagactaactcactttagtacaacaaagaagcactacttcttttcgatttcaaaataagctcataactaccaaaatatcaaacgattgaatcgcggtatgttgggaattataagctaaaatacaattttgaaagcaattcacaaccataggtttagataggttagttagttgtatgttgggaattataagctaaaatacaattttgaaagcaattcacaactgaggtcggtttttaattcgctcataattagttgggaattataagctaaaatacaattttgaaagcaattcacaaccaacgtgtgcgttatcttccgcccaagcttgttgggaattataagctaaaatacaattttgaaagcaattcacaacctaatgcttgttttccgtacttaattaaatgttgggaattataagctaaaatacaattttgaaagcaattcacaactatttgcggtgtaataaggtgagagctatgttgggaattataagctaaaatacaattttgaaagcaattcacaacacaacattgttaataaaagcaaatatataagttgggaattataagctaaaatacaattttgaaagcaattcacaactatgcaatcacgacagtgatgagaaagactgttgggaattataagctaaaatacaattttgaaagcaattcacaactttaatgaagcaaatacaaattgcaacaatgttgggaattataagctaaaatacaattttgaaagcaattcacaacccaacagttccgttttctaatttttcataagttgggaattataagctaaaatacaattttgaaagcaattcacaacgtacttgtaatattgggtaattaatcgaaagttgggaattataagctaaaatacaattttgaaagcaattcacaactaaatgaaatacattctgacggttcacttagttgggaattataagctaaaatacaattttgaaagcaattcacaacaaacagctaacgaattagataagaaattaagttgggaattataagctaaaatacaattttgaaagcaattcacaactaaaacaataggcgttactccagacgaaggttgggaattataagctaaaatacaattttgaaagcaattcacaaccaaaagttcttcgtacaaatcattgtcaaagttgggaattataagctaaaatacaattttgaaagcaattcacaactaattcctacaaatataaaaagttaaaattgttgggaattataagctaaaatacaattttgaaagcaattcacaacaaacattctgaagtttacaaatttgaattggttgggaattataagctaaaatacaattttgaaagcaattcacaacttagttttgaaattggtcaacatatcggctgttgggaattataagctaaaatacaattttgaaagcaattcacaacccaaggtcacttgcatatctgatatataagttgggaattataagctaaaatacaattttgaaagcaattcacaacatctgctacaggagctaaaaaagttaatccgttgggaattataagctaaaatacaattttgaaagcaattcacaacagtggctggaaatcgtggagaccacaatatgttgggaattataagctaaaatacaattttgaaagcaattcacaacctagcttagacaatgtaattaaaagcttgtgttgggaattataagctaaaatacaattttgaaagcaattcacaacagaaagattgcgagttgataatgtacaatcgttgggaattataagctaaaatacaattttgaaagcaattcacaacactcaagaagctacacaaatgccaccatcagttgggaattataagctaaaatacaattttgaaagcaattcacaactgtcaatgggaaattaactattcctatttcgttgggaattataagctaaaatacaattttgaaagcaattcacaacatgctaataggcgttcaatgcaagaaatggttgggaattataagctaaaatacaattttgaaagcaattcacaactgtgaattgcaattgactttcgtagtaaggttgggaattataagctaaaatacaattttgaaagcaattcacaactttggtgaccgttggacagtagctcaacaagttgggaattataagctaaaatacaattttgaaagcaattcacaactgtaaattctacgtcttgcagttttatacggttgggaattataagctaaaatacaattttgaaagcaattcacaacttttaatgctatgtacatatattttttatagttgggaattataagctaaaatacaattttgaaagcaattcacaaccgtactaagtgattgtccgtaagaaattatgttgggaattataagctaaaatacaattttgaaagcaattcacaacacttgccattgtactcctccatacatatccgttgggaattataagctaaaatacaattttgaaagcaattcacaaccaatatcgttcttcgtgtaaccgtcttttagttgggaattataagctaaaatacaattttgaaagcaattcacaacggtaacttagtagtgcgcttgggtttatctgttgggaattataagctaaaatacaattttgaaagcaattcacaactgtggagaaaaaagactttagcaaaatgacgttgggaattataagctaaaatacaattttgaaagcaattcacaacggtctttaatcaaagtttcaggcgtactttgttgggaattataagctaaaatacaattttgaaagcaattcacaactcattcctcttggtaatgtcagtcctgctggttgggaattataagctaaaatacaattttgaaagcaattcacaactttattagtttccaaatttttcatacctttgttgggaattataagctaaaatacaattttgaaagcaattcacaactaaatacttctttcataatttagcagattcgttgggaattataagctaaaatacaattttgaaagcaattcacaacaatacgatttaaaagccctttttggcgatggttgggaattataagctaaaatacaattttgaaagcaattcacaaccagatgcaaaacaagcggtacaagcgtttggttgggaattataagctaaaatacaattttgaaagcaattcacaacggggtgtgccaatcgtttataaaagcactagttgggaattataagctaaaatacaattttgaaagcaattcacaactttgcaatgatatgagaagcagcacttcctgttgggaattataagctaaaatacaattttgaaagcaattcacaactgttctctgataattcttgtgtgtttaattgttgggaattataagctaaaatacaattttgaaagcaattcacaactgtatctggatgaattgaatccggattactgttgggaattataagctaaaatacaattttgaaagcaattcacaaccattatgcttgtttatttaagtttaacatgttgggaattataagctaaaatacaattttgaaagcaattcacaacacagctgctttacttaccgctgcttccgttgttgggaattataagctaaaatacaattttgaaagcaattcacaactgggatactggaactttttttggaattggagttgggaattataagctaaaatacaattttgaaagcaattcacaactgtagttaatctttccaattccgctcttaagttgggaattataagctaaaatacaattttgaaagcaattcacaactagacaagtaagcaattgcagtaattagcgttgggaattataagctaaaatacaattttgaaagcaattcacaactaaaaaacaatatgactattggagctcacggttgggaattataagctaaaatacaattttgaaagcaattcacaacatacaaaccccatcgctttgaggtggccgtgttgggaattataagctaaaatacaattttgaaagcaattcacaactcagctcctgtgcttttgtggatagttttagttgggaattataagctaaaatacaattttgaaagcaattcacaacagcatcattaatgtgatccaaaccactcgtgttgggaattataagctaaaatacaattttgaaagcaattcacaacttatttcggtacgcttgtgattcagttaatgttgggaattataagctaaaatacaattttgaattacaaatcatccaacacctataaaaaataaaatcgatgtgagataaagcaactcacaacacttgtcgattcgttttacttattaattgttcctatttcaaagataagtattcatgtttttgaatcgatgtcaaagatatgagcccagatggaagcggcatcctttaggatcctgatttttttcaggatcctaaagatatagcgtacagctggagaaagctcctaattaaaaacatcatttgttgtatgattaattaaatggcttgtatattttgtattttggtaaggctttactacctttcggactcaatattatttagaaaccttatacatttaaaaaaatgttagaagaaaagaatgacaacctggatcaacatcaagtagatgcagatggaaatggtaccgaaacaatcttgaatgctactactgcaactcaagatgatttaagtgaactaacgcaacccgaagctgtactaattgaagctgatgccactactgcaacagatgcgattgctgccagtaatgcagaggaaagcgaagatgaaacgttgaaagagcgacatgaaattcctatgaaggattatgatgcacttgcacttgaggagcttgttgaggaacttaaaggttttgtttctagcgataaagcacttgctttcaaggatcatattgaagaaataaagaaagcttttttagctaaatacaaccacgtagttgaagaaaagaaagaggaattccttgctgaaaatcaagatcctactgaagagtttgaataccactctccattaaagagtcagtttgataaattgtattcacaatttcgtgaggtaaaaaatgctcactttaaaagcttacaaactaacttaaaaaataacctagaaaataggcttgctattgttgaggaattaaaagaacttataaatccgcaagctaatatcaaggacaccttaaaacattttaatgatttaagagagcgatggaataatgcagggtctattcctaaggataagtacaaccatgtgtggaataattatcattttcatgttgaaaatttttatgattatttacaccttgatcgtgaagcgagagaccttgattttaaacacaacctggaattaaaacaaaaaattgttgcccgtgttgaggaactggttcttgaaaaagatgttaataaagcttttagagaattacaagacttacacaaaatttggaaagaagatataggtcctgtttcaagagaacaccgagatgctatctggaatcagtttagcgatttgactaaaaaaatgcacgataaacgtgaagttttatttgaaaatcagcgtgcagttgagttagctaatctagaaaataaaaaagccattattgctcaaattgaagttctggctactgaaaaagtaaatgctcactcgcagtggctaggtcaaatagaaaaggttgaggcattgcgcactgcatttttcgctgctggaaaagttccttcagaagttaatgaggaaacgtggagccaatttaaaaacgcggtacgtaattttaattcttttaaaaattctttctacaaagacattaaaaaagaccaaaacgacaatcttgctaaaaaaactgcacttgtagcaaaagcaaaagcactacaagaaagcactgattttgctgccactacacctataatgaagcaaattcaagaggagtggaaagaaataggtcatgttcctagaaaatattcagacaaaatatggaaagagtttagagaagcttgcaaccactattttgaacaccttaaagaacataaaaaagaggaaaacagtgaagaagttgctgcatttgaaagtaaaaaaacatatctagaatcgcttagagaatttcaacttacaggtgatcataaaaccgatcttgatgctataaaacttcatattgaaaactggaaaggttttggtaaagtcccttttgctagaaggcatattgaagggaaattcaacaaaattctagatgctctttttgaaaaattaagcttgagtaaaaaggatactgacatgatgcgttttgctaatagaatggatcaattatctgaaagtaatgattctagaaaactagatagtgagaaaattttcattatgcgtaaaattgaggaagtacagaatgaaatttttcaattggaaaacaacattcagttttttgccaatactcgtaatgctaagaaagagaattcgattgtattagaagttcgtaaaaacattgccattcacaaagaaagtcttgatgtatggaaagaaaaactaaagcaattaaaaaatattaaaatagaagaatagatttttatccacaaggtagtaaaccccaatccaacaggattggggtttcttgtttttatgacgtttctacatgataattatcatttttatcttgatagactcgccctacttttggtgtgacaaaatgttcaattatgaaaaattctttgattcaaaaatataatgtacccggccctagatacactagctaccctaccgttccttactgggacgaggatgattttactagtgatttatggattcaaacgttacaacaatcatttcgtaaaagtggtcctcaagaaggtctcagtttgtacattcacttgccattttgcgaaagcttatgtactttttgtgggtgtaataagcgaattacaaagaatcacgccgtagaacatccatacattatggccgttttaaaagaatggactttatattgcaaactattgggcgaaaaacctacaatcaaagaaatacatctaggcggtggcacacctacttttttttcgactcaaaatttagaggacttaataaacggcattttcatgcatgccaataaatctgtggatcacgaatttagttttgaagggcatcctaacaatacaacctatgctcacttacaaaaactatatgagcttggttttagaagagtaagttttggggtacaagattatgctgaaaaggttcagaaagccattcacagagtacaaccgtttcataatgtagcaaaagtaaccttctgggcaagagctattgggtatacatcaataggtcatgatattatttatgggttaccgtttcaagaaattgacgatgtaatagacactattgaaaagacaaaatcccttaaaccagaccgattggcattttatagttatgcacatgtgccttggataaaaggaaatgggcagcgcggttttaatgacgaagatttacctcaagatgataaaaagagacaattatatgaaactggtaaagagttattatatgagaatggatatcatgaaatagggatggatcattttgctttagaaaccgatgcactttacattgcttttcaagaaaaaacttta

SEQ ID NO: 1556 - DNA, 19554 bp, synthetic construct
  source 1..19554: mol_type = other DNA
  misc_feature 1..19554: note = Synthetic
ggattagtagcctggacattcgatggtaatgaaagctataaccctgctagtggtaatgcgacagtaacaataaacaaagcggatgccctaatcacggttactccttactcgcttccttacgatggaaatcctcatacttctgcctttacggctattggggtggaatccactccggcagatcttacggcattgatggatgtaagcgcaacaacacacaccaacgggggaacttataccgctgatgtatggagctttgcaggaaacaataactacaataccgccaatggaactgtggacaatgcgatcggtaaaattatgttgaccgtaacggttgatccagctagtaaaaactgcggagaatccgaccctatacttacaggaacgttaacaggtaatatacctcaagatggaataactgctacttacacaagaacagcaggggaaacggtagcaggaagtccatacacaatcagtgcaacgcttgtgcctgtaaatgcattggataactataacattagttacactactgctatatttactatcgaagatacaacagcaccagtaatagcaagtctgccacaatcaacaaccattgattgtaacgcaaccccgcaatttactcaagcaacagcaacagattgcagcccttttaccttaacatttttagacacaacaaatccaggcgcttgtgctggctcctattctataaccagaacctggacagcgactgatgatagtggtaataatgcgaccgcttcacaaactataaatgtacaagatgtaattgctccagtgattgccgttttaccaggggtttcaactattgaatgttcagaaattttaacctttgctaaagcaactgcaacagattcttgtggttcagattttcagttgacttttaatgacctaacaaataacggagaatgtactggatcctattcggtaactagaacttggacagcgattgatagttgtggaaatacttcaacagcttcacaaactataattgtgaaagataccactgctccagtatttgtagaaactttacctacgatggaaatcacagtaaattgcgatcaaatacccactgctgcaaagctaacggcaatagacaattgctcaggcagtgtcccggtaatatttactgaaaagattatcaatgtaacatcagcatcttactcaattattagaaaatggaatgctactgacccatgcaataacaaaactgaatttattcaaatcataaatgttactgtcagcagcaacgtaataacagtttccagttctgcctgcaatgctaatcctgcagcagttgacttaaatagtctactccctgaaggcaccccaacaggtggaatatggattggcgataatacaggaacactacaaggtagtatctttacttcactaggagttcctctaggaaattaccattttgaatataaaattaatactgcggcctgtcctaggagtgtggtaattaatatgaccgtaaatgatgactgtgataagattgtattaggctgcggtataattgaagttcataatgccttctctccaaatggggatggtattaacgaaacatttaccatagataatattactgacacaagttgctatcccgaaaatacacttgaaatatataaccgttttggaatattagtttataagacccaaaactataataatagttcgaatgcctttgacggaaaatctaatgttaagcagtcttctgatttaccaaaaggaacttatttctatattctgaattatacttctttggatggtaacaataaaatccagattaacaaaaaagatggttacttataccttacaagataaatttaactcaaatctaatccctgagggctagcaatcctcaggtttaaaacactaagccaaatgaagacaagagtactactatccgctttactgttaactacagctctaagttatgctcagcaagatgcacaatttacacaatatatgtataataccatttcaatcaatccagcttatgcaggatcaagaggggccatgagcatatttgccttacatcgtacgcaatgggtgggacttgatggtgcgcctgtcaccaatgcggtatcaataaatacccctttaaacgaaagtaatttaggattgggaatatcactaataaatgacagaattgggcctacacgtgaaaacacactttcagctgatttatcttataccgttcctacatcagagactttcaaactctcttttggtattaaagcaaccgcaaatctattcgatttagatgtgaacaaattaaatcctgtggatgatgacccaagtctacatgactatcataataagttctcccctaacataggtgcaggagtttactatcattctgacaaggcctatgtaggtttgtctgttcctaattttatagaaacaaaccgttatgatgataatacagtgcgaatttttaaagaaaaaattaattattacttaattgcaggttatgtcattgatttaaataactttgcaaaattcaaaccagctttacttaccaaaatggtagaaggagctcctcttcaagttgatatatcaggaaacctcctgtttaatgataaatttgtgattggagttgcctacagatggagtgctgcattgagtgcaatggttggttttcaggtttctgatgccttgtatataggctatggttatgatcatgaaacaacagaacttaacaattataattctggttcacatgaagttttcttacgatacgaattatttaacaaaaataaaaaaatgacaacccctagattcttttaaaataattcctatgaaaaaaaaactagctgttttagtattcttaattcttttttcatttagcagctctgcccaaaacgaaaaaaattatgtaaccgataaaataagcgataagtatgcttatgttgatgtcataaaaacctatgaaagagttgctgcaaaaggctataaatcaattgatttatttcaaaaattaggaaattcatcatactcaaattctaaattagataaagcagcagtatggtacggcgagctatttgcaatgacctctgatttagaacctttgtattattatcggtatgccgaatctttacgattcattggtcaaaatgaaaaagccgacgctcttattgataaattaaaacggaagtctaaagcattagcaaaaaacaaagtctaacataaagccctccatacttttttacttcaataattatcttggggcaattgattagaataaagtagactttttttttgataaatgaactattaagataagaaattgtaccatgaaaaatttcattactgaagtcaagggggataaaattacctttaaataataaatctactaagcctttattaatattaaaaagattgattttgtaattgactaacttagtcgattataatctctttatgattttaaaaaagtataactaaaattagtactggagaattcaataggaccgatatcgaatcagagttcgagcaataaacaaaaagaggctgttttataagttataaaacagcctcttttatataaaaaatcaattatattttggcaaaaatgtttgtgtaatattttctaccactcactgaatttactctaattgaaataccaaaatgagtgtaagtcccctcaatattagccttatgaccagaactagccaaccaagcgtcaaaagcagcttgtacggtactactattatatgcaacattttcacctactgccttagctcctaatactttcattatatcttgagatcgagtattaaaattatcgtgactcagaatatttgtgctaagcatataattattatgctcttctgcctttgaggaaataaaattacttttaactaaagaatttaaaccaatacttactctgtagttatttattaaatccatcaactgaatttcagaactactataagaataattattcggatctgaaggcggaggcgtcgttggaggcgtcgttggaggagtcgttggaggcgtcgtcggaggcgtcgttggaggcgtcgtcggaggagtcgtcggaggagtcgtcggaggagtcgtcggaggcgtcgtcggaggcgtcgttggaggcgtcgttggaggcgtcgtcggaggagtcgttggaggcgtcgtcggaggagtcactgatgttaaaggttcttcgtaagggtctgcagtgcaagaattcataacaactattactgtcgtaaggaataatacaattagtgatttaaatttcatgttttttttgtagtagtttaattaccaaatagttattgcaaaaaaactattttggataacttaataattattgtgctctattaaaactcgaaactacttttttcaactataaacaactaaccaaattcaataatttacaaaattttaactgcaaactatgtgcttttcttacatacaaaaaaatgaaaattttatttataaagaaaattctctaactggacatgctaacttagccagagaaaaaatgaatacattatgccgaataaattattaatttagtattcagattgactaaatgtaaccaaattaaagaaatgaacacaaataagaatttaatcaaatttctagatgcacaaaatcaggtatacctaaaagcgctctcagaaataaaaaatggcaaaaaagaaacccactggatgtggtctgttttcccacaaaccaaagggctaaatttcaatgaaacagctaattcttatcatatcactagtctagaaatggcctcttcctatctggcacatcccatacttggcaaacatcttatcgaaatttctgaggagctcttaaatcttaacaaaaaagaaataacacaaatttttggaagtcaggacaatcttaaactgcactcctgtatgacaatatttgccaatattgaaaatacaaatcctgtatttcttaaagtattggataaatatttcagtggattacaagatgagcgtactctagagctgattcgataatcattcacaataactaatattctacaaaaagtatattttcctcatagaactattaggtacttacctatgacagaaaaattaccttctctttttttcgatatatcctatctaatattccaaatatctgtttttttttaaaggaatttcacataatgcttccactagtaactgattaaaaaagataaataaaaaggcaagagacattaatatactgtacactcttcggagatggattttgtcttaatccatagcattgttctacttcagccaagggtattgactccctgaataaattcattctcccaataaaaatcaaaaaaaaaaaaaaagcgacaaccctaaagatgccgctttgaatgttttcacaacggaataatccttattgtgaattgcttcaaaattgtaatacaagtatacaataaaaaattaatttctacttgaaatttccttataaaaagtaaaaaatcactaaatttaaaaactaattctgtcgatatgaataaaatattgggattgaatgtagatgttaccacaatcggatgggcatttataaacgaagcacaaaacgaaaatgaagtatcaaaaattattgatactggtgtgcgtattgtatcgctctcttcagaggaagaaaatgatttcaaaaagggaaaatcaatttcaatcaatactgacaggactttaaaacgtgctgcaaggagaggcttgcaacgctttaaacaaagaagaacagcaattttagagatatttaacaacctaaatttcatttctgatgattttatttactctgaaacgggtaaacaaactactttttcttcttatgaattaagagctaaatctgcctctgaagccattaccaaagaggaactagttaaggtacttttaatgttaaacaaaaaacgtggttataaaagtaatcgaaaactaaatgtgatcgaagatggtgaagctgttgacgcaatgatccttgccaaagaattgtttgaacacaatttgacccccggacaatgggtttataagtcgctgtcaaatggaaataatcatatccccgatttttatcgttctgatttgcaaaatgaactagaaaaaatcgtaaagtttcaaaaacagtttcattctcaaaaaataaataatgaattacttgaagagattaagggaaaatcaagaacattaacttcccaacattttaatagaatattaaaaatagaacttgccgaaaatcaaggaactaaggaagaaagtaaattacaacattataaatggagaaatgatgctttagacaatgcgcttgatttaaaagttatcgcttttatcattacagaaatcaacaatcagattaatcaatcgagcggttaccttggtgccattagcgaccgtagtaaagaattgcattttaataaagaaactgttgggcaattccaatacaaacaacttcagaataatgctcattctaaactaaaaaatcaagttttttatcgtcaggattacctagatgaattcgataaaatctgggaaacgcaagccaaatttcatcctgaattgaatgacaaactaaaagctgaagtccgcgatattaccattttctaccaaagaaaattaaagtcacagaaacatttaataaatcattgtgaatttgaaaaaggacataaagctattccgaaatcatctccattatttcaggaatttaggatttggcaaaacttgaataatattgttgtcaaaaatgaaactacaaaagaactttttctattagaggaagaattaaaacaacaaatagccgaagaacttcaattcaaagagaatatgactgatattcaactaatggcattttgtggtttaaaaaaaggaagtcactccgtgaacttcaaaaaaattgagggaaatagaaccaatacagcaatctacaaagcctttgaaaaaatccttgaagtggaaggctatcaaatggatttttctaaaatgtctccttttgaaataaaagaagctgtttttccaatatttgaaacgttaaagatcactaccaatgtattcaattttgattcttcaattcaagggaatgagtttgataagcaaccttattatcaattatggcatctgctatattcttgtgaagaagacgaacccttgaaaaaaactttaatgaccaagtttggttttaaagaaaatcacattccttttcttttaaatattaatctccaatccaattacggtagtttaagtgccaaagcaatcaaaaaagtcttgcctcatttaatggacggacaaatttatgatcaagcttgtttgctctctggatacaatcattcctcttcgttaacgacagaacaaaatcatgatagaattctaaaagattcgctggatttaatcaagaaaaacagtttaagaaatcctgtcgtggagaaaatccttaatcaaatgattaatgtgattaatgccattattgccgatccatcaatgggaagaccagacgaaattagggtggaactagctcgcgagttgaaaaaaaataataatcagcgtaaccaaatgaataaggccataaacaaaagtatagccgaacacgaccaaattacaaaatttttacaagatgaattcaaaatccttaaaccaactcgaaatgacattattcgctataaactttggaaagaatccgaaggaatttcactgtatacaggaaaaccgataaaggtttcaaaactcttttctaatgaatatgatattgaccacattatcccaaaatcacgcctatttgatgacagttactcaaataaaacaatttgtgaaagacaattaaatatctataaaaacaatagaactgccttctctttcttacaagaaacactttctcctagagaatttagtgatttccaaaaaagagttgaaaatctatttgggaaaattagcccagctaaacagaataaacttttaatgtccgacaacgaaatcccagaaggttttattgacagacaattaaaagaagctcatcatattgtgcggaataccaaaaaaattcttctaaaagtttccacaaacttaacaataacatcttctagtattacaactaaattacaacaagactgggaacttctagaggtaatgaaagaactcaattgggaaaaatacaacaaactcgatttaactataactgcagaaggaaaaaatggaaaattaacatctcaaattaaagaatggaacaaacattatgaccttcgtcatcacgccttgaatgctataacaattgcattcactaaaccatattatattgaacgtttaaataatttaagtacccgacacttcagtaataagataacaaacacgattgcaacaacagaaacaaaatacttagaaaaagatcatataaacaaattatttttcactccacctataaaaaatataagagaagaaactaaaaaacaccttataaacactttgatctcttataaaacaaaaaatagagtcctcaccagcaataaaaatattgcaaaatcaaaaaatagtcgcaatgaaaaaattcaatttacaccacgtggccaactacataaagaaacagtctacggaaaaatacaacattatgatacaaacttagaaaaaataggagctcattttacagccctacacattgctaatgtagcgaaaaaaaaataccgcgatgctttattagttcgcttagctgaaaacaacaacaacccaaaaaaagcctttaccggtaaaaatgctctagcaaagaatcctattttattagctagtcaaaaaaacaatatagttcctgaaaaagtaaaaatggttaggctgaaagacaaatatacaatacgaaaagatattactcctactaatttcaaagatctaaaaagtattgaaaaagtaatcgatccaaaaatcaaacaaatacttctaaacagattgaaacattttaacgatgatcccaaaaaagctttttcaaatcttgaagataaccctatttggttatacaaagaaaaaaaaattactattaagcgctgtacgatcagtggggtaagtagcgtacaggcattacatactaaaaaagaccatcttggcaatgaaattttagacgaaaacaacaatccaataccctccgattttgttagtccaagaaataaccatcatgtctctatttacaaagatgaaaaaggaaaaatacaagaagaagtagtttcgttttatgatgctgtcgttcgaaaaaattcaggaatctcagttgttaataaaaatcacgaaaaaggatgggaatttttattttcaatgaaacaaaatgagttttttatatttccaactgaatcttttaatccacatgatatagatttaaaaaaaacagagaactatcatttaattagtccaaatatttttagagttcaaaaaattgcaaaaaaaaactatctattcagacatcattcagatcccaagattgaagaattaaaagatttaaaggatactaactataaaaccgttagaagtacttctcatttacaaaatatcattaaaattcaaattgatactctaggtaagattattcatattggagaatattaacttttagtcaaaatcacttgccaatttaatagatctaaaactacaaattcataaattttaactcaaaatttattagagctgaaaaacttaccaatagataatctcaagattaataatactgaaaataaacaaacttacacgaaaaaataaaaaaaacattattcaaattatattgttaaatagtaggcataaaatttgacaaatactaaagacacagcattcatctaattatacaaaaactataaactcccatttgctatcaactataaattacaattttgaaaagcaattcacaaacggttatttataatattacttaatctcatttctgaaaatgataaattaaaaatacaactttaaaagcaattcacaacttaattatataacatattatgttagatgctaagaattataaccaaaaatacaattttaaaagcaattcacaatggtcttgtttaaaaattagctctaaacacaaacattaatgattagaataaaagctaactaaccttaagctaaattacaaatttgttagcaatctaacaagcctatcagtaactttatgcaccacaaagatctataaaacaatcgataaggtaagttttaatcctcctgaaaatgaatattttcggttcttaggaagttcgcttcacaggagagatttatatcttttattaaaattgaatattctaatgatgaagttattcaaatgtttgaacgcttaaaaaaatcattcaaaaaatgtaaataccgttttcaagggagattttttttacagatcaagctttgttagcagatcttactcaacttaaaatcttgcatgaaaaattaaacagtactattactaatgtttagcttgcagaaaatgaatatatgataacaaataatagtcgcaatccaatatgcttaccgctttagaaaaaggactgaataaatacaatatcgacttttatctggtaggtgccgtagcacgtgatgtttagatgacggccataaacaatatacctcccagcagagttactggagtcatcgattttgctatttttataaatgacaaaaacacttatgctgatctcagagaatatctcataaacgtagaaggattcatcccttataaagataatgactttgtacttaaatagaaaaacattatacaaatagatttaatgtcttttggtgaaattgaagctaaaccatctaatgtaactgttcaaggaacagggcttaccagcctaaatatgtctggtttcaaggaaatatatgattctggtcttccggaagctgaactcgaagaaaaacaccgctttaaattttgcaccttacccggtattgtactgctcaaattgcttgcttttcaagaacgtcccgaaataagacgcgacgatgtcaaagacatcagtaaaatcctaaagcatttttttgatatgtatgccaatgagatatatgaaaaacacaatgatctttttggtgataagtatatcaacctgaattggattgctgcaagggttttagggagagatatgggaaaaattgctcaattaagcgaagatctttttatcagaataaaaaaaatattaacgaaaaacacaattgatatacattccagtaatattgccaaaattatgactgagttttttcaaaacacgattgaagagaatgtaaagttactagaacaggtaaaaatcggctatttagaaaaccgatgacttaaaaaattaaagtttatcaatcatgctaatcaggtcaaaattttcaaagtgatggacaaggtttaccaaaatttaattaagtttaaaaaagaaaaaaacaatgttttagttattttaaaagatgataaaattgtatctgtaaaaccatcaataaaaaaggataattaataaattttacattttaaaagttactcctttctcaagctaatcaataaaagaatcttttacaaatggcactgtaattccatttttagatatagaaaataaagaaagaacctatccgttttttattttttattaaacatattttttcctctcattatattcataattgtatcaaaatggtatcttatttacaaatcagcctttaaaaaacaaagcaagtaaataattttatcccctaaaaatcaaagaattaaacacttatttcttacctttacattattaaaataaagactttgaaagtctagtgaccctattggtgaccctgttcttaaaaaacatatcgaaagctcagtaaatacagggactattataaaggcatcggagcctctttctccgccagtttaaaaccctaaccattgtaaataaaggagttagggttttttgtttgacaaatatccccacataatccccacaattttttgtttttgaaagtcctaaataccacttcactttttaaggatcaacgaaaaattaaatgctaaatattgagagttgaaatttcaaccaacaattaaggctagtacctgctctttatttaaactggtataatggcaaaactcatctactgaaacaaactcattttcgagcttattaaggtctcttcttattctttgcatcaatcttgtgctttgacgataacttttccctgttatgcgctgtatatccttcgggtagatacacaacctcttcgtttctgttttcatactctatccatacctttgactaggctttgatatgcctttaagtccaatttgtctcctaccgaaatataatttactataaatataatctccgaatgaaatctcttaccaaaaggtagttacttggggcttattgtgcttttttctaagtactatttgtgctcatattggtcatttatgtcggtccaagacatatggtacactaccctctttcaaattcctcgtcgatacctcaactttgtctgataatcaatcggggaatgttgcaacaggatgatgattgaaagaacagttagattattttgaacttaaaaattagagattatggcaaggcagaaaggcataattaagttgaaaggtactatcggggatattactttttataagacccaagaagggcatttggcccgtgagaaaggcggcatcgatgcgagcagaattgcgagcgatcctgcgtttcagagaacgcgtgagaattgcgctgagtttggccgagccggaaaggccggtaaaacgttgagaactgcattgcgtactttgcttttgaattcggcggacagcagaatggtgggcagactgacgcaggcgatggtcaaggtgattcaggcagatatggtaaacgaaagagggttgcgcaatgtcattgatggggaggcggaattgcttgccggatttgactttaatgccagagggaaattgggcaccagtttattcgctccttttgtaggaacgattgacagggcgaccggagaaattgcagttgatttggattcattccttcctgggaatatgattgcggctccgagcggaaccactcatttcaaaattatttcggctggggctgaaatcaattttgaagcggaaacttttgttgttgcaagttcggaaactgcaattttgccttgggatatgactccaacggcagccattaaccaaactaatttggttagtgcaaacagcgttagtccgctgtttttggctcttggggttgagtattttcaagaggtgaatggcaaaatgtatccgttgaaaaacggtgcctacaacccgttggccctggtgcaggtaagcggattgtaagatggttttggtgttgaacagaacttattttcccgagggaacgcagggagttttagaatggaacggcacaatagtttgttataccatcgaattgccttggcttcaaaatcaaaggcggatttcctgtattcctgaaggagaatatgttttagtgaagcgatttagcccgaaattccaatggcatttgcatttgagaagtgttccgggaagagatttaatcttaatccatcccgccaatgacgctaagaaggaattattgggttgtattgctcccgttagtcagcatagcggaattggtaaagggtgtttttcccgaaaagcgtttgaaaagctgaaagctttggtttatccggttttagagcgcaatgaagaagtgaaaataagtattcattctaattcttctacttcgctaccattgacgtttttattaaaagaaaaagattaaggttgctgattttcttttttgcttgatcaaaaaagaaacaaaaaaatcaagtctgagctccctcgtcggtcaaattagttttcgaagtctaaaacaaaaaaactcgcttcgctcaaacagtttttgtttttacgacttcttcaaacatttgacgctcgactgcggaagctaaggacagttaaatcccggcaataacagtaatttgaagcataattgaatgcaaacttcaaagctcattttatattgctttttttgtaaaaaattaaaccttaggacgataatttagaaaataaatagaaaaattatgaatgtagtagaacgcgcgaaagcgcccactccaaagttttttaagattttgagaaccgttggtttaaccttgttggccataagcggaagtgtgattgcggctcccattgttttaccggctaccgtggttactgttgccggttatttggccgttgccggtggggtgatctctgcgattagtcaaattactgttgatgataaagcccaaaaagagcaagaaaaccaaaacaaagctcgtgatggagactaatatctcccttcgaaccggcacggtatcagggacgttgttgagtgtgatacccaacatcttttctgaagatattgtaaaaacgattatcttagcggtagtgggagccgttgtgagttttgcagtatcagtccttttaaaatggttgacaaaatctaaaaataaataatccggatttgattggtaagcttttccggatttataagaaggcctggtcgagagatcaggcttttttttgatttaattatttattatggtttccattttttggtatctaatttttaggaaagaaaaaagagaaaaaaagaaagccgttctagaagcggaaaagacgaacgggaacggagggattccgaaagctttcggaataccgactgagagtgaggaatggacgctagttttgcttggttttttctctttcttttcgaaaaaatgcagggtggtcttggattaatttgcggtatttcttgtggaaacggcaattaacgccccccagcaccgcaaggagcaaaaaaagtggtgccccttttttggggcaaggaacttttttttgcggatgaggagcgccgcggcggtgttgcggcaatcgaacagccacgctagaccgagaacggaatggagtgctaacgcaatggagagaagggatagcagcgtgtaacggcggggaaacaataaatgactcccgcctttttttggcgggtaaccttgatttagggcaaagtgaggtttttcagcgaacggagccaacccagatggctgagcgaaggagcaaccgctgaaaaaactgagggcggcagacgcaaatactgctggaatgcagtgcagcgccctttgactttattcagggtgacaaaatgtgtaacaatatcgattcgttgttatagaacgaagagggaagcgaaacggaatgaagcggtattgcggatgcagtagcccgaccgaacgcagggagagcgcgtgtgaagatgagggcgaggaagcgaaaccggtacctgccctttttttggggctggtgctgtttttagctgacgagtggactgtggaacggagggaggaggctttttctgccgacgactgactggagcagccgaacggaacaaagcgaacgaccggagagagaccgcttgattgcctcctgttctttaacgagagtttcttatggaaataaaagttttggaaaacatacttcctggggagctctatttaggaatactttagggaaaaatatatgtcctgtttattaaaataatatcacaaaagccgtaagcttagaatggttgcgccatagttatgccaatcctttattagaaagcggcactgatttacgctatttataagaactactgcgacatagcagcagtaaaaccacagggatttacaaatatgtaagtaagaaaagtattcaaaaaataaaaaatctatttgataatttgtaagaataaaacaatatatttgattttaaataaagtcagatagctattagacatatatacaagttggcagaaatataaaaaaaacgaatcgtgaataaaacaaacattgaaataaaagaccagtttaatttttttaatgagttggtttatgaagaaaaaattattttaaataaagaaatacttcttcaacctaaaaagaataatgtcttttggtttaccggtcagtctaatgttcaacacaatactattagtgaagatattgtttttatgatcgagcaaagtaaaagagacaacaaatatggaataaaacttcgctgtaataatttcattaaacaaccatactttagatttgactctgatggtcctgctcaccggaatgaaaatccagaaattccacttgaagaacaatcaatcaaaactccgcatttcaattcatttgatgaaaacggaaattatatagcttacaaaaatgaaactttaaaaaatgaagctgaagcgcaaataattgcaaatgatataaatttcgggatttcattattttgtatggaaacaaattcaaagttaattgataataatttcccatctgttattcaactaattcaagaattaggttttacagaaaatattaatattaactttgataatattaattttgagtaatggaaaataaaacagtaatagagcaaattaaaaagtctttttgtaatttaacaagtttcaaagaaagagataatgctttagaaataataactgcattttcaaccattaacaacaaatttgtttcggtttttgtaacgattacaaatcaaaaaatagtagttaccgatagtggttggattgaccaaaattattatgaaactcctaattttgaagaatcagaagatttaatcagaagaattatttattcatattctttaaattacaaagtcaaatcaacttttgacaaatcaggtatagaatattactataaaatctgtaacaaaattgaagaagttccaagtgctgtatttgatttggcaaattttatcgttggcgctgtaaattcattttgtatccaatataaagatgaaaaagaagaaaaagaaagagaaactttcagaagcgacgcaaatacatttttaaagtcaaattatgttgaagatgttaaattaagacattatttagatgactttaaaaacattaaatttagtgcgattataactaaaaaatcaaaaataaatttaatcacttatgttacaggttcaacttcaggttattttgaaaacgatttgagaaaatctattgtgaactttgaaatttcattgaagtcaaaatatgaaaaattaataaatgaaaaattgactataataaatgacaaatctgaaggttattctatagaaaaatcggcatcaatacttcaacttcttaatgaaaaaactacaaaagagccaataaaatggtctgaaaaagagcggatattagaatatatctaaaaatacttctgccaacagctaagctccataaaccaaatacacctcataattctgaaaatttttatttacatattactctaaattggaagattttgaaggcatcgaataagttttatgaaaaaacaaatcggtctggattgaaactgtccatgttttcttgtgtatatccaaaccaatatatacttttggactagtagtaatttgagtactcatatcattaaagtattggcagacagtaatcttcttctgtcatcaaaataactatttaggtttaaaccgatttgtatgcttgatccggatggtttggcatatcaatgattgtgtgttgcaacttgccttcttctttcatcggaattatataatttctgtaaacatagttttcattcctattcaatattaatgctatttgtttaactgaatagcttttatgcttacaaagctcatatataacatttttgattttattagggtcattttcccggacacctaatttctcaatttgttctcttatctcagaaggtaactcctgtgttagtgattggggttctgtgttaagctgatcaggttctgtgttaagcgggttaggttctgtgttaagcgggttgggttctgtgttaagaataacactcgatatataatatgttgatcttcctttacctttttgctctataagtcctttgtctctaagacttcttaattcgttacttgcttttaaaacatcacaagcatttagttgtctataagtagaattgtctattgctcctgcttcacgaataaagattaatccctttttttgttctgtattcaaatcgaatttactaaaagcgtccaaccattgtaaatcactttcgttaagaaaatgatgcaataataatcttgtggtaaataaattggctgtgtggtcgctttcaaaagttggaggtgctaatgaggatttctccattaagtttctcatcgttctgataccacttccttttgtttccgcaaggtttgtttcgtggaatattgatgctataaatgggtttctgtttttagatcccggttctcccaattgttcttccggttttaaagaaaatcccgggtttttgatttctattctgtttccgtatcggatgatttgaatgggctgattctctctgtaagttctgtgtataaaagcatttactaatgcttcacgcaacacttttgagggtaaaccaattgtatctgcctgtaatttatcgtctcctaacaagaatcctttaggtaaatcatctgctatagcgctaaaagttctttgaaccaattcaataagtggtccccgcatatctatggtcgtaaatctgttttcagggtcttctacccattcgttacccggaactcgaatgtaatcgatacgaaccattggaagtagtcttcgcaatgcttgtcttttaccaaaaaccaataatcctgtgtaggttaatttccattcgtctttgtcttttttgatgcaacctaaagaccttaataaatcgaagtcattataccctaactcttcggcatattcgtttactttggcacgcaagcttttgtataatgaaatggcttcttcgctaatatcatcaatgttggtgtcgtttacaatggtactgtctaaactgtcttctttattatagaaaataaataaatcatcttcggtacatctttggtcgctagaaccaattcttctgtatgcgccttgtggcaatcctttctttttgaaatacaatggtttttggccatcgggcaattctttgacaaacattttcaaaattagcttaccatttgccagtttttcgatttctatatccggtctaaccggttggttaaataatgttgcggtttgtgaagcaatatctaattgtaatttatccggatttgtaattccttcaatataatagttttggaataaggaagtttcatcttttaccacaccaagcacaattaatcccccgcctaaaccaggttcgtttgaaaatgcgcaaatggtttccattatagaggtgtcgatagaagaacctttttttgcttcaattgtggtgcattcgtctgtgatgtttaaatgctctaaaatgtctttgatggattccataggatgctattactgtattgattgtgtaaattcaacaattttatatttaatttttttagcattatattatatattttcttcttttttggttttccaaaattgtcttaattcaataagttttggttcaccaatattaattaagcctttacctgaatctaatttagataattgagtatttaatttgacttcactattaacgctaccaagaaaaggtataattctttttgaagatttatcattgacatttgcacaaatgggaaattgtatttgagacataaaattaaaatcac

SEQ ID NO: 1557 - DNA, 19406 bp, synthetic construct
  source 1..19406: mol_type = other DNA
  misc_feature 1..19406: note = Synthetic
ttttaccgttgtgactttaatagtggtttcatgcgaaactgctatgctatgaggtattaatccaaatttctctgggctatccctctgtaaaaggtagattgcatacgcgttacgcacccgtgcgccggtctcaggttccgaagaaccctacccctcgacttgcatgtgttaagcctgccgctagcgttcatcctgagccaggatcaaactcttcatcgtatattgttgatcttaatcactcaagatcgtattgttattcgaatcagtctctatcggttcttttaaatctctcgattatcttactctttattcttttgttttaacatctctgctaaaacggctgtcaattcaatatgtctacgaacgtgtttcaattttgtttcgcttgtgttgcaaagcgggtgcaaaagtacaacctttattgagatctgcaaggattttcaaagagtttattccatctttttcgaaactttttcttaactttctgataacagcaattttagacttcaatataaaaatacaaaatataatatttttcttattttactgtattttcaacaaaataagcattccaaaaaaactgctttttatgaaattcataaatataattaccctgttgtcaagaaaaatagtgcttttagaaaaagtaaaaagtcaacaatcataagatatcccaagattaggttctaatgtattaaacaaaacacctttccattaatttattgcacaaatccgttatcgtattctttattatatatatgtttaaaaattagtacacattacttcctgaaattgtaagcatatgctctgtctgtattgaaggacaacaatgaccgtcattttctgcgtactctaatttttcaacataaatcttaccgttactgattttgtcaaattgaaacaaattatcaggttcatatccagcaatgaccttcacatcatatccattattttgatagagtgttaaaccctgcccaacaagcgcatttcctccaccgcttggagaaagagaaaagtatattacaacatcttcaatgccatcacccgtaaagtctcctgtatatgattcctgaatatcaagtgttgcatcgtgcgattttaaaattttaggtaaataattttcgaattgcttttctgcaagtcttactgcatcattggttgatattttatgtctactaatttgcatttcttttatagacaattccttctctttaagttctaattctttctctttaagttctagttctttttcgctttttgaattattgcaacttattaaattaaaagatataagtattacaactactattttgatatttatgttcatttttgatttgttgtttgtttttaaaataatgtttcttctttctagtaccttctggcttgataacgatattttttactaaaaaagttaaattaagtcattttcactaccttatttttaaaatttaaaaactgaaaagtaactatttattagcaaagtatcccagtataaatacctgtttttatttagaaaaaagaaaatctcattttataatttaataggttgaataaaacaaattaaagaaacattaaacattcacttcaataaaaaaaaatatcataaaagctccaagaaaaaataatagcaattcgttagcaataaatacattttgttaataatacgttaacattgcagcttttaattgttataattttgccaaaaactaaactgtaacaaaagacaaaaaatgaaaaaaattatttttattttgattatttttctatcagccctaggtcatgctcaggtaacgagctcagctatgtcagggaatgttagatcaaacaagggagaagctcttcctggggcaactgttgaaattgttcacaagccaaccggaacaaagtatttttctacaactgattttgatggtggatatgctgcacaaggattaagacctggaggtccttacactattaaagtaacctatattggctacaaaacaacagaaataactgatattaatattggtttaggtaataacgttactgtaaatgttaaaatagacgaagaacaaaatgctcttcaagaagttgtagtttcaactaaatcaaaaggaaattttaataaaggaagaactggtgcttcgcaacagttttcaaatagagaaattgttgcagttccagtattaggggctcgttccattaactctgttacaaaatataatgccaatgccggagcaaacggaacttttggtggtcaggattcaagattaaacaactttacaattgatggttctgtattcaacaacggatttggtctgggatcagattcacaagctggaggtagaactgggtctactgcaatttcattagatgcaatcgaacaattacaggtaaatattgctccttatgatattcgtcaatccggatttttaggttcaggtatcaacgctgtaacaagaagtggaacaaatgaatttgaaggatctgtttatacttctacaagaagcaataaaaaagattttattggtacacatgccggtgatgtaacaatcaaaccaggtaaatttgaagaaaagatattaggagcccgatttggagcaccaattatcaaggataaattattcttctttggaaactttgaaactattgacaatacaagccctgctacgaactttacttctacaggttctccaaatccaagtggtcagaattctcttccgacatacacagaaatgcagactctttctaacttcatgcaggagaaatttggttacactacaggtccatgggaaaactatgattcatcaaaagaatcaaaaaaattcttgaccagaattgactggaatatcaacgacaaccataagcttacagctcgttatgtatatcacgattcctcttctgatcagttaacttctaactctaactcattaggttttggtaacagaacaaatagcggattagcaatgtcttttcaaaatagtggatatactattttagataacacaagatctatcgtattagaattgaacagtaaattaagcaattcatggtacaataactttattggaggttatgacaaacaaattgaagacagaggtttaattggtggcggtttattccctacaattgatatcaaacaaggtgctgctacttatatttctgttggtttagatccttttactcaaggaaacaaactttcttactcaacacttcactttacagataatttaacgaaaactatcggaaaacactctttagtatttggtgcaaactttgaatatttcaaatctagcaacttattcttctcaggttcaaacggggtttacgtttttaactctttagctgatttttatactgctgcaaatcaatctttagcaaatggtggtgctccatcaagtgtaactcttacttctcctgctcgtttccagtacaaatattcggctttaccgggaggtgctgaaccaatgcaaatactaaaatctaacaaattagatttgtatgctcaggatgaaatgaaattaagcgacaaatttaaattaactgttggtttaagagcttcaagagtttggtatgctgatacagcattagaaaaccctacagttacagctatgacttttgctaatggcgaaaaattcaacactggtacaatgccggatgcagcaatcttattcgaaccaagagttggtttcaaccttgacttaaacggagatgcatcaacaattgttcgtggaggttcaggaatatttactggtagatctccaggtgtatatttatcaaatcaaattggaaacaacggtgttcttacaggtgttgtagatgttagtggtgctgctttagtggcaggaggatatggttttacagcaaatccgtcaaaatactttactccggctacaccaacagctccgtcaacttttgacttgtcatttaatgagaaaaaattcaaatctcctcaggtttggaaaactacaatggcagtagatcaaaaacttccttttggatttacatttacagctgaaggaatacttcagaagaatatcaatgctatcaattattacaatgctaactttgatggtcctgttggaacatttagtggtactgacagcagaccaagatattcacgtaatgataacggaacacgtgtaaatgataacgtttcaaatggtatcgttttagcaaatactgatgacggatatttttattctacaacttttaaattagaatatccttaccaaaaaggtctttggggatcattcgcctatacacactctaacgctacagacttaatgtctccaggatcagttgcttcaggttcatggacaagtgcaagatctgtaaacggaaataacaaccttgaagtttctaattcaaataacaatacaccaaatcgtttggttggagttatcgggtacagaattgaatatggtaaaactcttggaggtgcaacttctatcaacttaggttatattggtgaacaagccagcccatttacttacgcatatagtggagatatgaatggagacagagttaatggtaatgatttactatatgtaccaaacagcgcttcagaacttcgttttgctcctctttcagtaacaagttctcctataggtggtcctgttactacaaaaatttatacagaagatgaacaaagagccgcatttgatgcttatattaatcaggacaaataccttcgtacaagaagaggacaatacgttcagagaaatgagtctactttaccaatgttacacagattagatttatctgttactcaggatatatacatcaaaattaaaggtaaaaagaacagcttccaatttagagctgatattcttaactttacaaacatgatcaataaagattggggaatttcacaaagagctacaaatccaaacgttttagctttctcttctgcaacaacgggtaacgtgccaatttatacaattgctacacaaacagatccggatggaacaagatatttaattaaaaatacttaccaaaaaaattcatcaacatctgatgtttggcaagcgcaatttacacttagatacacatttggtaattaatatttaggttataagtaatacaaaagataaatataaaaacggcattgacttttagtttaatgccgtttttttgtaatatatattcttctggtacttcgattagtctaaactaaatcacgttcaataataaactaaacatcataaaaaaagcgaccccttgaggccgctttgaatgttttcacaacggaataatccttattgtgaattgcttcaaaattgtaatgcaataatacaataaaatcgactaattaaccatgatattacgtaaatcaataatcatcttttacttattgagaagttaatttttaatgatgaaaaaaatattaggattagacttaggaacaacttctatcggctgggcatatatacatgaagcagaaaataatgatgagatatcatcaataataaattcaggtgttcgtattataccgcttactagtgatgaagaagctgactttaaaaaaggaaatactatttctataaatgctgatagaacagtaaaacgcgcagcaagacgaagcctgcagcgttttaaacaaagaagagatgcattattagagactttcaataaaataaattttatttataatgattttgtttatgctgagacaggaaaatcaaatactttctcctcatatcaattaagggcaaaagcagcagtcgaacaagtctctaaagatgaactagttcaggttttgttgatgcttaataaaaaaagaggttataaaagtagtcgaaaagctaagactacagaagaaggagattcaatagatggaatgaaaatagcgaaagaaatttttgaaaataaccttactcctggtcaatggatttttaattcattatcaaaaggaagtaaatttattcctgatttttatcgctcagatttacaaaaggaattagaaaaaatcattcattttcagcatcaatttcattcggaacatataaataaaaaacttctggaagatattaggggaaaatcaaaaatgcagacttctcaacatctttcaaaaacattaaaaattgaactttcagaaaataaaggcaatagagaggaaaccaaattacaaaattacaaatggagaaatgaggctttgaccaaggcactcgatttaaaaattctggcaattatcattactgaaatcaataatcaaattaatcagtccagcagctatcttggcgctattagtgacagaagcaaagaattgtatttcaatcagcaaactgttgggcaatttcaatataagcaacttgaaaaaaattcacattccaaacttaaaaatcaagtgttctatcgtcaggattatttagatgaatttgaaaaaatttgggaaacacaaactcaatttcatccagaattaaataacaaattaaaaatagaagttcgggacatcacaattttctatcaacgaaaattaagatctcaaaaacatttagtaagtttttgcgaatttgaaaaaggacataaagcgattccaaaatcatctcctttatttcaggaatttagaatttggcagaacttaaataatattgttgttaaaaatgaaactacaaaggaagcttttcttttagatgaagacttaaaaaaaatcattgctcagcaactattattcaaagagagcatgactgaatcacaaatattatctttttgtgagctaaaaaaggaaaaacatactgttaatttaaaaaaaattgaaggaaacagaactcatatagcgatttataaagcgtttgaaaaaattctaattctcgaaggttatgatgaattagacttttcgagattagaagtatctgaaataaataaaatcattaaaactgcattttctaatttagaaataaatactgatattcttgattttgacacaactattcaagggaatgatttcgacaaacagccctactaccagttttggcatttactatatgctgcagaagatgattattttttaaaaaaaagcctgatgaataagtttggctttaaagaaaatcacactccatttctcttaaatataaagctacaagcagattatggtaatttgagcgctaaagctgttaaaaaaatcttacctcatttaattgacggacatatttatgacaaagcatgcatgttatccggatataatcattcaacatctttaacaaaagaacagaataatgatagaattctaaaagacacattggaattgcttaaaaaaaatagtctaagaaaccctgtagtagaaaagatacttaaccaaatgattaacctcattaatgctattttaaaggatcatacattaggaaaacctgatgaaattcgtatagaaatagctcgtgagttgaaaaacaataatgaacaacgaagcgaaataacaaaagctatcaataaggatactttagaacatgagcaagtcaggaagttattatataacgattttggaattcatcgggtaaccagaaatgacattacacgttataagctttggaaagagtgtgatggaatttcattatatacagggaaaacaatagaaccatcaaaattatttacaaaagattatgatatcgaacatatcattccaaaatcacgtttatttgacaatagtttttcgaacaaaactatttgcgaacgtcaattaaatattgataaaagcaataaaacagcctactcttttttaaaggaaaaattatctgatgaagaatttgatcaattcgaaaaaagagtacagaatttatttggaaaaatcaccaaaacaaaacagagcaaactcttaattgcagataatgaaattcctgagggttttatagagcgccaattaagagagacacaatatatagccaaaaaagtcaaggaaatcttattggaaattgccagaaatgtaaccttaactactgaaagtgtaactgataaacttcgcaaagactgggaattgattgatgttatgaaagaactcaattggaaaaaatacaatcaattgggtttgactaatattgaaaaaggtaatagcggagaacgcttgtacaggattaaagattggacaaaacgaaatgaccatcgtcatcacgctatggatgctataatagttgctttttctaatcccgcatatattaaatacttaaacaatttaaatgcaaaaacgcaaggtgataaaaaagcagattctatttttaaaattgaaacaaaatatttaagaagggataaaaataataaacttcgatttatagaaccaatacctaattttagggaagaaacaaaaaaacaactcgaaagcatattgatttcctacaaatcaaaaaataaagtagtaaccaaaaataaaaatatcactaaaaaaagtggtggaacaaataagaaaattcaactcaccccacgcggacaattgcacaaagaaaccgtttatggtaaggtgcagcaatatgttacaaaagaggaaaaagtaggtattaattttacagttgaattaattaatagggttacgaaaaaacaatatagagaagctttattagatcgtttggcagaaaatgaaaatgatcctaaaaaagctttttcaagagaaaattcaatctccaaaaatccaatatatacagactcccaaaaaactattgaattacctgaaaagctaaaattagtctggctcgaaccagattatactatccgaaaagatgttaatccggatttaaaaattgataaagtcatagatattggtttaagatcaatacttcaaagtcgtttgaaagaatttggtggagattctaaaaaagcttttatcaatttagatgaaagtccaatttggcaaaataaagaaaaaagaattccaataaaaaaagtgactattagaggcataagcaatgctcaggctttacatacaaagaaagataatttgggtactgaaattttagatgataaagggaacccgattccggtcgattttgtaagtacaggaaataatcatcatgttgctatttacagagatacacaaggaaatttacaagaaaaaactgtttctttttatgaagctgttatccaaaataatttaggattgtcaactattgataaagaatttaaaaaaacggaaggctgggaatttgtattctcattgaaacataatgaatattttatatttccttctgatggatttaatccacaggaaattgatcttttaaataaaaggaattattctttgattagtccacatctattcagagtacaaaaattgggtacaaaagattataatttcaggcatcatctggaaactcaattattagacaatagtgaattaaataacatctcttacaaaaggattagaagtccaaaagaattatcaaacattgtcaaagtcagaattaatcatttaggtcaaattgtgcaaataggagaatattaattaggataaaaagaatactcttcttcggtaatccatattatttagtactaaaaatgagcctggaaatcacagaggaacaatttggaatgatggaactattttatgaaaaaaaactgtttaaacaaaaacattaaatagctgtattgcaatccttatacagatttcttttaaaacatataattaccacgacatcaaatattgactcgatacgtggaattataagtaaaaaatacaattttgaaagcaattcacaacttgttcatgattttacttcctttaatctcattgagaatttgattgaacaaatattacaatttgataaaaactaaacatcatcaaattattaatatataattatcttttattagaaaaaaatcttcaagacacaataaatcaagactttaaaaacacaaggcaataaatattcttatttttggagcttcaggcagctgcgtaaccacaactggaaaaatcttagaaaaacgagataataaccactattgcttttgaaaataaagataatcagtactaccgcttacatcgcgtaatcgaatttgagaattattaaactcaaataatttccagttgcgatttaatttactcaacggttctgcagtaaattctatttttacttctctaacaccattaattactgtacttccccattgacctgtttgtgaagttgcgccttttgttgctactaatgatttatcacttttaaatacaaatgaatatccactatacgaagatgttttctctgaatcatcaaaaaaataaggaatctcccaagaaccatttattattgcttgagtaaaatcgagtgttgcaatgttattttcaggacaataatcgatagcatatttaattgcattttcaaactccagattattagtaatcaattttgtctggttattataatctgatatcgaaataggatattttaacgaaatatattcactcgcatttaaattttttataaaattaaaaaatgcctgatcgcttattatcgattgagaaattgccatttgattggcgctgttataactattaatcgttattggataattaattttcagaccatttattttggataaaagatccggataaagattccaataagcaattaaagaatcaaaatctgcctggtccggaatcactttttgaatgtaattataatataccatcgtaaccggaaaatcgatatttacaatatcatcatcataagtatttgcattgatattatctaatactttttgatagtcggcgctgctgttaattgcaatttttttgctgtttacagtaactgtataaggtggttttatagtacaataactagagccgtcgattatattatcctgcacggtctgaaccatagcaaccctttgcaagtaagtagtaagaggcgaaacattagtaattgttccttgtgcattattactttgctcatccatttcactttgacaagacagtaagagcagaagaactgccagtgataaatattttttcaaagggaacatatttatatttttacaaaggtaataattttaaagaaactgttttttaataaattcgatatcaaaggttttctatctcttgatctgtgctaaattatcaaaagcaagtaccattttattcttatataaaacaatcagctttccttttaccctacttaaattaaaataaatacttttacatcgtacaaattgaaaaccaaatgccacttaaaaaccaatccaatacttgtgatgaaataattttttcgtctttcttcaaaagtcatgtaaaagcgcttcggaattttcttttttacaaatttggcaatatcgaccaggcagaagatgttgcgcaggaagcttttgtaaaactttggcaaaactgcgcggctgtaccaatagaaaaagcaaaatcatatatttatactgtggccaataacagcagtcttaacgaaattgcacaccaaaaggtggttttgagatatgaaaaaaactttacaggtttagataaaacaaatgaaaatcctgaatatctcctggaagaaaaacaatttcaggttaaacttttgaaagccattgaaaaccttaacgaaaaacagcgtgttgcttttttaatgcacagaattgacggaaaaaaatacagcgaaattgccctggagctaaacattagtgtaaaagcagtcgaaaaacgcattcatatcgctttgttatgcttacgcaaagaaattgatttataaaagtagggtaaaataagttccaattgttttaatatataatactagtataatgaaaaaaaatcgattattagcaaaatggctcaacgacgatttatctccggatgaattggctgaatttgaggcaagcgccgattttgaaaaataccaaaagataaaaaattacaccaatcatttagaaatagatgacctggatgaaaatgctatgctatctactattttgagtcagaaaaaaacacctgtaaaagtggttcctttatacaaaaaatggatgtttagggcagccgcagtatttttgttagcttttggaatcacctttacaatgaaactttttgtagcagaaacgcagtcggcagattttggagaaaaaactactttttcgctgcctgataattctgaagtagtattaaactccggttctgaaatcaattacaaaaaatggaattgggaaaataacaggaatcttgaactcgaaggtgaagcttattttagagttgcaaaaggacgacgatttgaggtccgcaccaatcttggaaaagttacggttttaggaactcaatttaacgttaaagcccgaaaaaagaggtttgatgtagtatgttatgaaggtcgtgttaaggtaaattatgccaatactcaaattttattaacgcacggacaaagcgttagttttgaaaacggaaaacaagttaacagaaacgtaaattcattaaaaccagaatggatcgagaatcaaatatgttttaacaaagaaaatatcagaaccattttagacgaggtagaaagacagtataatgttgagatagaattgaatacaaaagatacaatctcattgtttacaggaaaattacctgctaaagatttagatacagctttgcaaatcattagtacaacgtatcatttagaggctaaaaaagtctcgaaaaataaaataatttttgacgaaaaataaatgctcctccccagacaatttcattttttgttttttctcttttttcttatcctgaagctaaatgctcaggacaaggaaaaagttatgccttttaaaaaaattataattgctattgaagagcagcataacgttagttttaattatactgaagacaatgttgccggtctgaaaataaatccacccgcaaaatcactttcgctagacgaaaaacttgaatatctggaaaaaaaaaccaatttatcttttgaaaatatcggaaacaaattcatcaatatttataaaaaagaaaatccccttcctgcaatatgtggatatgttttttccagcacagataaaaaacccattgaaaatgccaatattactttaagcaatcaaaatcagcttacaactgattcaaacggttattttgagtttaaaaaagaaaatacaactacttttttaatcagccacgttggatacacatccaaaaaaattacgccggctaatatcgattctaaaaattgtctccagatagtattagaacctaaaattacagaacttcaggaaattaaagcgagtgctattttggcttcgggaatttcaaaaaacacagatggatctcttgaaattaaacccaaaaaatttggtattcttccgggacttattgagcctgatgctttacagaccatgcagcaaattccgggtgtaaacagtttagatgaaagtgtttcgagcatcaatgttcgcggtggcacgcacgatcagaatttgtttttatggaatgggatacgaatgtttcaaacagggcacttttttggtttaatatcggtctttaatccaaatttagcacacaccatttctatttataaaaacggaagttcagcattttatggagaaagcgtatcgagtgtagtagccatttcgtctacaccggaaacttcagaaaaaaactcttatagtgcaggaataaatatgattaatgctgatgtttatggaaaatataatctttcgaagaaaagttatatagaaatttcggcacgaaaatctattactgattttttagaaacccccacatacaaagaatatttcgacaaagtatttcaaaatactactatcactgacttttcgcaaacccaaaatgtagattatagaagtgataaaaaatttggtttttatgatgcaacgttaaaatacgctcaaaaaataggaaacaaggatcaaatagtacttgatttaataactattaaagataatcttgaagtttttcaaagcgcaacggcgtataccataataagatctgaaaataatgttttacgtcagcaaaactatggaggaaatttgtcctggaagagaaactggaatccttataatactactaaagttaatatctataactcgtcttatgagcttctggccaatcaaaaaaacacctatgaaaaccaattggtcattcaggaaaatacggtcgataacaatggttttaatttagaaaacaatcacgtgattaactctaagtttagctttaatgatggatatcaatataatgaaatgggtattactaatttagagctagtacaaaatcctgatttctatcgtaaggctaaagacgtattaagaacccatgctttaattctggaaggaaaatacaacgatacactttccataacatactttaaagttggaacccgaattaattatatagaaaagtttaaaaaatttattgtagaaccccgaattcaattcaatcatggaatcagcaaaagcttaagtttagaattacttggcgagctaaaaagtcaaaattcacaacaaatcattgatttacaaaaggattattttggtattgaaaaaagacgctggattatttcagataacagtacaattcctatacaaagaagcaaacaattatctttaaacctattctataaaaaaaatgactggcttctcgatattgaaaatttctataaaaaagtaaccggaattaccacttcgagtcagggttttcaaaatcagttagagtttgttaaaacaactggcgattatgaaatttggggcgctgaaatgcttgttcaaaaaaaaatgaatcactttctaacctggttaagttatacttataaccataataattatcattttcctaattacgaatttccggttttccccaacaactttgagttgatgcatagtgtttcatgggcaggaatttatgagaaaaataattttaaaatcgctttgggaacaaaatggacttccggtcgtccaaaaacttctccagacatctctcaaattgaccttaataatcctgtattggtttacaataaaccgaacagtaataatttacatgttttttcgcaggtcaatatttcctcaacttataaatgggaaaccgaaaatggaattcagtacaaattaggaatctccattttaaatatcctaaacagaaaaaatgagatcagtgaacattatagagtaagtactataaccaattctattgaagaagtagaaacatttgctctgcaaagaactccaaatatgagctttagagtttcattctaaggctattttacaaggattctcaaaatcctttattccttctttttatttctttaacaaaaatatcaattctttggtagggtaatctgctacaaggctgttttattattgaatccatcaaaacaataaaaatggctctcttcaaaaaattgatactttattcttatgatagttcgtaacctgacaggaaatgaaatcttcattaaaaacagatacagcttcttgatatcgaatcaaacaataaaatactttacgttttctgtaaagtatattttttccctttctataaaattaatctaatcaaaaagacaatgaaattaaaacaaattaaattcgttttggctgctcttacagcaactacatttttcgctggttgcagtagtgataacagcaatgataatggtactcctactacaccagaattaaaaacagaagttaatctttctactagtgcaacattaggctcttatctaacagataaaagtggaagatctttatatgttttcgcaacagatgcaaacggacaagtttcatgtacaggcggatgtgaagctttatggcctgcttttgtagtagataatttaactgctgataaattaggttcaggattaacactcacagattttggtacagtaaccactgcgtccggcaagaaacaagtaacctataaaggctggccattgtattattatgcaccggtttccggagacgacggatatggtaatggcggcaaaaatgtacctgaagctgccggtaaaacaacaggagacggagttggaggcacttggtttattgccaagccagattattcggttatgcttgttagaagccaacttttaggacatgacggtaaaaattacaaatcagattataccgttggtgatggtttaaccacttatttcactgacgctaaagggctgacattgtatacttttaagaatgataatttcaataaaaacaatttcacaaaagcagatttttcaaacaatgccgtttggccaatatatgaaacagacaaaattgtggttccttctattcttgataaatctaagtttgctgtaattaccgtatttggtaaatctcaattaacttacaatggctggcctttgtattattttggacaagatgcaagcgtaagaggttcaaataaaggaattagttttcctgctccggctgtttggccagtacctgtaaaagactccccaattgcaatctaaaaggaaactattcaaatcaaattgatttatgtgtttgcataacacactctttttcaaattagtccaatatgctgttgggctaatttgatttttttttacaaaataacattttttggtagggtaattttcattaaagctgttttactattgaaccttaccaaaagaataaatatgaaaagaaaaaaaatagcaattgcaattgcagccttattgatagtggctttggggggcatttatttttattacggctttctctttaaagaagcgcgtaatatagaatcagaaatgccggatttcaatatctcagcaacaaaactacttgaagattataacgctgatcccaaaaaagccgacgcattatacctcaacaaaactattgaaataacaggtacagtcacaaaagaaactgattctgtagttattcttgaaaacactgttttttgtctgtttactcaaaaagtcaaatcaaaactcatccataataaaataaaagttaaaggcaaatgcattggttacgacgaactgtttcaagaagttaaaatagaccaatgcaccattaataaataaaaactccaataatcgatttatgaaaaaatttctagttacaatttgcctttttttaattacgatggcatattcgcaagatgatttactacaaagtcttgattctactcaggtacaagacagttattcgacagcaacttttaaagctttacagctggtaaccttacagaccacaaaaatgcctgcaaaaaaagaattctattttgtggtttcgcaccgttttggtactgtaaaagatggttttgacagtttttttggtcttgataacgccactacaaaactaggcggaatttacggagttacagattggttatcagttagtttgtccagacatacgctcaataaaatgtatgaaaccggattaaaataccgattggcaagacaaaacgatcattttcctgttgacattgttggttacagcgttgcggatattaatacgtttttagaaaaagaccaatatccgggattagaattcaaacatcgcatgacttatgtacaacagttactgatatccagaaaagttggtcaaaaattatctttagaacttgttccctcatttattcacaaaaacctttacaatcctgatatagaaagagataatcagttttcttttggaggtggcggacgttataaaatcaccaaacgattgtctgtgaatttagaatacatgcacaattttgataaaccggagttttacaaaaatccattatctgttggtcttgatgtagaaaccggcggacatgtatttcagctaatctttaccaattcacaatccatgagtgagagcggatatcttaccaatgcttccggagattggggcaaaggagatttctttttcggatttaacctataccgagtattttaataattacaaataaccaaattatgaaaaaagcaatagcatttacaattttactggctgtacttacgagctgtagtgattctgatacttatcaggatatcgaaacaccgccagaaacaggaaatcctccaacagatcccacaactcccactgccattacttacagtaaaaatgtgaaatcaattattgatgccaattgtataagttgtcatcaaagtggaagatctgcagcttttagacccttaacaacttttgccgaagttaaagtagctgtcgaaaatgctggtttattaaaccgaattcagttgcaaaacggacagcagggtattatgcctcaaggtggaagaatgtctcaggcaaatattgatttaattgtaaaatggaatactgacggacttaaagaaaattaattattatgaaaaaaccattcattaatttattcgttctactatttattatggttgtgaatacagatggatttgcacaaaaactgatcacaaaaacaggtactataaaatttcaggcttcaatgccaaattatgaagaagttgcagcagaaaataagagtgtatctgccgttttagaacagtcaaccggagattttgcggcattagttcttataaagggttttcggtttaaggttgctttaatggaagaacattttaatgaaaattatatggaatccgaaaagttctctaaagcaactttaaaaggtaaaatagacgattttgatatttctaaaattacaaacaccgctaaaaattttactttaaaaggagatcttactattcacggacaaacaaaacctgttaacgtaattatcaaaatttctaaagctgctaacggagtaaatgctgttggttcatttgaagtaaaaccggaagattttgatatcgagataccaagccttgtcagaaaaaaaattgctgacaagattaaaattaattacaattttttattgactaaatgatctttctaataagatcaaatatttagataattattttattcctgcccaaatagtatctaattattgctctttttatttagaagattattaaacataccaaatgttatgaggtcagttttgtgtaaactggcctctttttttaactctaaactaaatttaaaatgatttgcaaaaattatgttgtttccggcgaagatgttaatgacggtatggttatgcaagatagcgcatacatatcctatacacttcgattattatatcatttcttatttcataacggattttcaagagaaaaacttaataatctgcatctggaattacaagagggaaatcatgcattagtttacttcaaaaatctcatgtttaccgaatctttttttgttgagatgaaacattgtttaatcaatgacaaaatcaatataaaaagttgttttttcaactcaaaaaatgaatgttgcgcagaagttaccaaagaactagaatggtttgattctattcgcaaagaagttatcataactcctaaacaaattgcaaagcattttaatattggtaccaggcagaaattccagtttcctgttactttcaactcattaaacagaacataaatccttaacaataaagcaattaaatagatcctgttttatttttaaaaaaagtcacttttgaggtaacaaat

SEQ ID NO: 1558 - DNA, 18320 bp, synthetic construct
  source 1..18320: mol_type = other DNA
  misc_feature 1..18320: note = Synthetic
cattcccaaagtcatggttctatttcttcggaaattgactgctatgctatttggaacataattatgcttttcagcataatcctttaccaatttaatcgtctcttcagaaatcccagaataggagtttagcgctctagaggcagtagaaacagatatacccaactcacgggcaatatctttcaaggtaattcttctcttatccattcttttaaaggatcattcatcaagataaactgaaaaaatggatttttgtcctgttccaacctctgattagttttcgctgaggacttttcctttgctatccagcaataggattttctgaatttcccctttttgaaatcgaagttcaattcttgtttgaccttctacttctttgaaaatcaccctcctaatttcatagccagaatattttttcaagattttagactcaatttcagaaggcaactgatcctcatagggaatagtgttttcaaatctatactcaggccccaaatcagttttcaattccaaaaaggtattgcttccatcctcatttttcgccaattcaaaagcatcatagagttctcctacagctgtataggattcaaatttcaggctattattctcaatgctaattagctgaaacaactgggtgttttcagcagcccggtctctcactgcctcagttccttcccatgcatttgggttaaggccatacattttgcctccactgactgacaccacgtaaactgtaccagttaggtctctcaggttggttccattcagtacattctcaccaagacttactctccctcgagcatagctatggtcatgttcttgcaatgccaagtctaccttaaattcatcgaaaataggcttccaaatagctctcaatgcctcattatctcttccagacgaagccgaaaaaagtggatggtggtaagatacaatggtccatttctttttattctctttcaatatgtttcgaagccatgcagcctgcttttcatgatctctgttagagtccaagaagataaatttgacatcaggataatcaataaaataggctgtttcctccaaaccttcaggaccgtttatagggaaagtaaactgaggcttccactgaatggaaagtgctcttccggcctcccgattggagttattgagataattgtattcatgattaccaggaacagaaagggaagggagcatactatggataaaacctcctgcagtaaaccattcatgccattcctgttctctatgagcataattgatcagatctcctgcatggattataaaatctgcatcaggtgcctttctatttccttcccgaatcaacctagcccataattccaggatataattttgtgcatctcctacatacaaaaaagaaaagcgctcctttggatcagcagaggctgttttaaattgaaaccattcggaccaatgttctccatctccaactctatagccataaagttgtcctggttgaaggttcttaaattccacagaatgataatttgcctccacttctgccatgggaacttctttggcattcaagttttcggttttggctgtgtaagtttgggcatttctccaaaacttcggagctgccgtagcaggtgcaatttctgcgtaggcaacctctatctctgtagtcgttctccaagttacgttcatctctgaactgggattttgaccgggatttaagatgattctgtccggatgaatactgggtttggaccaatcgttagcaaaaattggttctttgtaaaccctaatctcctgggctttacaagaagattcaaaaattagaatgcctaaaaatagaaataggatcctgatatgcataggattttgggtttggttaaggtcttgaaaaataccggattatccccagaagaaaaatcaaaaaaggaataaacatctctttaatcctagaggagctattgtttaagtagaaagctgggatagtttatcggctatccatgcttgatattccatatagcagtcttctgaaaaggagttgagaattgacttatcagacttagcagccgaaagctcctgatcctgttgaatccacctgttttgaataatattcaactcctctctaatttggaaaaataggctttgccgatcctgatcgattaaagaatggagctcctttgctttccaccatagggacttgtctggattggaggttggagctaccagaaagcttttggatgtgcccagataaaatggcacataaatacttaaacaggggtgtggtgtgcctgaaagccaaatgcttgaaaagccttcttttctgagctctgcaaccatacttccagtagtatctgacggatttgtcaagcctgttgcgtgcatacaaatcgacccagaattggctttcttggggagaaatttggtatcaggtaagttatgggttcttaaaatttcaatgactgaatgtacatcgatagctccctgattttcttgtagaaaattaccggtacaagcttttcttttatcaccttttccaaaataggtaaataggatgtcagaaaatcttgatttaaaccccgatttttgagcaaaccaagaggaaaaggtttggctttcatcagctatgaaaatctgatcataatcctcctcgatggtcaatatattggaaatgctggcagttaacgccacttttttccatgcccaggattttcccgaagtttccagtataaatgcatgatccagatcagcaattaggaagctgttgtgatagtaaaagtctttattttgatagcctccacaggcattttggccaaactgctgcagaagggaaataatgatttccctagcttcttctgcgcttttacttctttctaatgccaatcgcaacaaatccatccctgttagtcccggattagatttatcgaatttgacattggtaaatacagcttcattgccaatgcacacattgaactcatttacccccatctctgcaccccacatttggaagggtttggaaaagatgcattcataagtttcgcttacttgaggaatctctaaataagtgcatttaaggatttgagaagtaggctttttggctggaacccagagaatttcctgagcctcttgtggttccctatccgaattttttccaaaaatcagatttccagattgggttgcttttgcaagggctaccagtgtatcacacataagctcaaaagttcaaggaccagatcccagcttgttctgccgcttgtatttccaaggtatctcctctcaaatatgcaagaggttgcccatctgcacctaagtcccagagctctccttttaggaagatatttaatccaaccaacgccgaagtctggctgattttaccaggtaaggcatattttttccatgcttcgccttccgtcagaagattaatgtcagattcattgatgcttgtaggtgtgatggacccgctatagcctttccaggggctattcatggtgctatctccaggacagaaggatggcaccaagactatttcagctctattttcaatagtatttaaataagcatcttcataccaactatcggcacacacgagtacggatgtttttcccataggaagatcaaatacaggcaaatctttactttctccagaacttaaaaaagggagttcggattcaacgggaaagttcttgtaaataggggagcccatgatattgccttccggatcaaaaaggaaagaaacattatacaaaggaccattggggtccacgctgagttttccggaaatcacagcaggctgaggtagaataactgaacctgcagtaatataaacctgataatctttagcaagactggaaaaggtttcgaaataggtttttgccatttccttagctttcatcctgaaaatagaagctgctgctttgtccttttcttttgtcttgaaaaaagccaaagagaaatcaaaaatattgctcatgaccaaggtgctcatagcctcattcagggtctttttttcagctaaaacatgcttttctccttgcaaaaccagccaagtgccgatatactcaggatacagaaccaaagtgttactttttaaaaaacctgaatcgcgggcgatttgtagatacaattctatttttcttttaaaaatatccggctgcaaataatcgtgctcatccatgaaaggttgaattcctacgatattcctttctaaggaatcgctgggattgatttcctgaaccatgctcaggtagggctttggcattggagcttgaattttacgtccggaagaagaccaaatcaaccaaacgaaaatcaccaataagaatagactgatgagtaatcttttaatcattgtttaattcctgtaatattttctctgccgcagtttctcctgctctcacggcaccttctatatatccatgccatcgagtagctgcttctgtgcctgcaaaatgcaatcttccctcgctttggctataactgttctgatatttagtccaagaattgacttctctaattccggcgtagcagccctcagaccatgtttcctcattcatggtgtggtccacatagttgatttcctgattagcttcctctccaaaatattggataagctgttttttcacggcttgttttctcgaatcctcgtccatttggaagaatttccgagccttatttccaatgacaaaacccattaagacgccgtatttggaatctgccggggaactgtcaaatattgtttgtaggtaaaattcagaatccgaaacggcttggccggatagatttttatgtctccaaaatggcttagcaaataccatttggcacttcccaatatatcccatttcatatccttctaagagtttttgcttttgatcagaaagtggaggattgattccaattttcttcaaaagaggaggaggaacggcgaagatgatatggctaaatacttgagctcctttggaggtgcttagggtaattttttccttttcctgaatgattgataggacaggggagtcaaattgaatacgatcaaaaaatggtttggctatcgcttcggcaagtgtttgcattcctccatgaattctatgctgctgagctccgtttttgatggaaatcaggacatcgagagaggtgccggatttgatataaaacagcgcatgcaacagagaaagctcctcgggttcgcaggagaatatggtctgcattccaactttcatcacttgcaaacaagcctcagtttttgagtttcttttcaagaaatccatcagagtttgtccgtcaaattcctgagctttaggatgggtccagggtttttccaaatctattttggaggccatgcgctctagctttcgcacgatcatatccagattcaaaagtgaaatgatatccagcttagggatagttcctttgtaacttttgattcttccattaagatccagaatactttgcccttggttgtaggtttcgaaatatggaactccgtattccttgcagagctcgtacatccgggtttgggaagggcctatccactgtccgcctaaatccaggtaaaggtcctcttggatttgtttggtataaactcttccacccagtcgctctcttgcctcaaataaccggaaagaaattcccttttgatgcaaaatgcgtgcggctgctaggcctgaaaaaccagcgccaataatggcaatctgattggttgggtgaatcataacggaaaatagataaattttccgaaactcagatagttgattatttattctgggaaatcaagaattcacgaaattcctcggtattaaaattactcatcccttcttggtagaatacgattttgccttgaggatttattaccaaggttgtaggaatggattcactttgtaagctgctattgagaccatagctggcatgagctgtagggaaaacccaacttttaccttgaataaatgctttacttttttcaaaatcattgtctaaaccaatcagaagaaattccagattgggttcatcctttacctttttgtagagttcggagatatgcggcatttcagcacggcaagggccacaccaagaggcccaaagattaataaaaagagttttgcctttgtacttagctaaattgatttcctttccttcaaaatccaggaatttaccttgataatcaaagttttgatttgttaaatctacccgctcaattttgggtgtgattaggcctgtgtaaagtaatgcggattggattccaccttgaatcaccggcagtaagcccgtgaaataaagaaaggcaaaaaaggacaaaatcagcccccaggatttaagttctttgagaaaggttgatttcgacatggtttaaaatattttagatttttgatttacgaattacggaatgaccacttagtttattgttgggaaaaatctcgcggcggcgcggcgtcgcagcgagcattttaataactacagagagtaaggaggattatttatttcaaattgtttttccaaatctatccaggggattctgatcatgtttaagaatttttgatttacgaattacgatttacgagggactctaataactcaataactcaataactaataacctactacaattaaataagatagttgcctcttctgatagcttcttggttgctttaatgaggaaataaggcatttacggttgtagctttgatgagaccgcttcgttcctcgcggtgacgacaatatttttgatttacgaattacgatttacgagggacgctaataactcaataactcaataactaataacctactacaatcaaataagatagttgcctcttctgatagcttcttggttgctttaatgaggaaataagtcatttacggttgtagctttgatgagaccgcttcgttcctcgcggtgacgacaatatttctgatttacgaattacgatttacgagggacgctaataactcaataactcaataattataacctactacaatcaaagaagatagatgcctcttctgatagctgcctagttgcattaatgaggaaataagtcatttacgattgtagcttcgatgtgaccgcttcgttcctcgcggtgacgacaatatttctgatttacgaattacgaattacgaggggcactaataactcaaaaactaataactcaaaaactaataacctacccccatcaaagaaaatagacacttctgctgactgcctctgacttttctatcccacagattaacacagatttctttcggcttacacacttctcatttcagcctttccaaaattacccccacgctttcagacgcttagtgacaagtctcacggactttacttttttgaaagaaaagcagccttatcttgcaggttcaatcgaaagatcttagccaaaaatatgaattacgagattaaaattgcctccgaactcaacatcaaatcccatcaggtgaaagccaccatggacttgctggatgagggaggtacagttccctttatttcacgctatagaaaagaagcaacaggaagcctggatgaagtgcaggtagcagcggtaagagacaggttgcagcaattacgggatttggataagcgtagagaggcggtgctgaagtccatcgaggaacaaggaaagcttagcccggaactcaaaaaggctgtagaaaatgcagaaactatggctaaactggaggatatctatcttccttataagcccaaaagaagaaccaaagctactatcgccagagaaaaaggtctggagcctttggcagagcgtattttcgagcaagaatcaatcgacctagaagaagaagcctctcaatatattaatgaggaaaaagaagtcaaatcagtagaagaagcccttcagggagcaagagatattattgccgagtggatcaacgaaaaagcagatctcagggagaaaatgcgtaagctgtttttggaagaaggaaatttcacttccaaagtaatccctggaaaagaagccgaagcggttaaatacaaagattatttcgactggacagaacctattaaaacagctccatctcatagggttttggcaatgcgtagaggggaaaaagagctttttctaatgcttgattcctgtccggtagaacaagatgccttggcattgatagaaagagtagtgattgattcccaaaaaagcaatgaatccgtagaacaggtgaaactggcgatcaaggattgttataagcgcttgctcaagccgagtatggaaacagaagttcgccttctgaccaaaaagaaagcagatgaggaagccattcgggtttttgcggagaatttaaagcagatgcttttgggagctcctttgggtgaaaaatctgtgatggcaatagatcctggtttccgtactggttgtaaattggtgtgcttgggcccacaaggtcaatttttacattatgaaagtatttttcctcatgagcctcaaaagagaacatcggaagcgggtatgaccgtcaagggcttagtggataagttttctattcaggccattgccattggtaatggaacagccggtcgtgaaacagaagcatttgttaaatctttaggactgcccaagtcagtcgtagttacaatggtcaatgaagcaggagcatccatctattctgcatcagaagtagcaagagaggagtttccggacttagatttgactgttagaggtgcagtttctattggccgaagattgatggaccctttggctgaattggttaaaatcgacccaaagtccataggagtgggacagtaccaacacgatgtggatcaaaatgctttgaaaaatgcactggatgatacggtgatgtctgcagtaaacggagtgggagtggaggtcaatacggcatccaaacaactgctgacttatgtttctggtctaggtcctgtactagctcaaaatattattgaattccgaaatcaaaatggtccattcaagtccagaagtcagttgctaaaggttcctcgcttaggtgaaaaggctttcgaacaggcagctggtttcttgcggatttcacaggcaaagaatcctttggatgcttcggcagtgcaccctgagcgatatgctttggtggaaagcatggcgaaagatctgggagcttccatcgatgatctggtaaagtcagaggacttgcgcaatcggatcaatttgaagaattacgtttctgaacaagttggtttaccgactttgcaggatattttagatgaattagccaagcccggtagagatccacgggagagctttgaagtctttcagtttgaagaaggagtaaatagcatggaagatctccgggtaggaatgaaattaccgggtgtggtcacgaatattactgcctttggagcttttgtagatgtaggagttcatcaagatggccttgttcacttaagccatctggcagaccgctttgtaaaggatcccaatgagattgtgcatgtcaatcaaaaggtggaggtgacagttttggaagtagatatccctcgaaagcgaattgggttgagtatgaaatccgatccatttgcagagcgaggtaagaaaatggaaaggagttcaaaaccagtgaaaaaagaagagccccaaggcacgttggcagaaaagttggccatgctgaaaggaaagtttagataagttagaattgtgaagtttgaaatatgaaaaagcgcgattccggaaggggtcgcgtttttttattttacaattgattatttcaccatagaggatagagagaaattcatggagagtaaaagggggaggggctaattttgatcaattttaaccaataatttttcctagaaaaaggaaactcgaaagtcagtgttttaataaaactaatatttgaaaaataccctgttcagggtattttttagttttattaaaacaactatttttaggagccaactaatttgaaaaaaaacgaccccagctaaataaattaactgaggcccttttaaatgttttcacaacgaaataatccttattgtgaattgcttcaaattggtgatactaagataagtttttaactataaacttttacaataaagatgaaaaaaattttaggattggatttggggacgacatcaatcggttgggcattcattaaagaacctgaaaaaggagttgcaggaagtgaaatcgtagaaatgggtgtcaggatagtacctcttagctccgatgaggaaaatgattttgcaaaaggaaacaccatttcaattaatgctgataggactcttaaaagaggagctagaagaaatttgcaacgattcaaacaaaggagaaatgcacttcttataatcttcaaagaaaagaatttaattccctcaaacttcaactatgctgaggatggcccatcctctactttttcaaccttgaagctaagagataaagcagcgaaagaaaaaattgaaatagaagacttagtgaaagtcctattacaaatcaataaaaaaagaggctataaaagtagcagaaaagcaaagtctgaggaagatgaaggttcagctattgatagtatgggaatagctaaggaattatatgaaaatgatctaactcctggacaatgggtatatgaagctttgaaaaaagggagaaagaatgtccctgatttttacagatctgaccttcaggaagaattcaggaaaattgtgagttcccaatcagcattttatcctgaaattttgaacccatcttttattgaagattggatggggaagccaagtactcccacaaagcatttttttaataaaaagggagttcaattggccgaaaataaaggtaagagagaagaaagaagatttcaagagtataaatggagagccgaagcagtaagctctcaaattgatctttcagaaatcgctttaattctttctcaaattaataatcagatatccaattccagcggctacttgggcgctatcagtgataggagtaaggagttatacttcaaaaacctaaccgttggacaatacctttatcagcaagttcaaagaaatccccatacaagattaaaaggtcaggttttttatagacaagattatttggatgagttcgaaaaaatttggagtgtacaatcagaatatcaccctcaattaaatgatgatattaaaaaagagattagggatgtcactattttctttcagcgccgacttaagtctcaaaagcacttgattagtaactgtgaatttgaagatcaccataaggttgtcccaaaatcacatccaatttttcaagaatttaggatatggcaaaaccttaacaatctccatttaattaagaaggaaaatttaaatgaaaaatttgaactcgctttagagggtaaaattgctttggccaatgaattggcattcaagagggatttaagtgtaaaagaagccttgaatattttaggtttaaagcctagtgaatgggaactcaatttcacaaaaatagaaggtaaccgtaccaaccatgctttttttgaggcgtttacaaaaattatagagctagaagatggagagccgttagatttcggcaacatgaaatctgatgatattctcgaccagttttctgaagcttttttgagaattggttttgagcccggattgcttcaagtgaataatgaaattgaaggcgcagaatatgaaaaacaaccctatgtgcaattttggcacttgttgtatagctcagaagatgatcagaaattaaagcaaaatttaattagaaaatttggtttcaaacctgagcatgcaaaaatattggcaagtatcagcctgcaagatgatcacgcttccttaagtagtagggcaattaaaaaaatattgccacatcttcagtctgggcttatctacgacaaagcttgtacctatgcaggatataatcattcttcttcatttacaaaagatgaaaatgaaaagagggagttgagagcagagttggaattattaaaaaagaattctttaagaaatcctgtcgtagagaagatccttaatcagatgattaatgtagtaaatgcgattttaaaggatttagagctaggtagacctgatgaaattagagttgagatggctcgtgagctgaaagcaaatgctgagcaaaggaagaatatgacttccaatattgcttcagcaacaagagatcatgaaaaatataaagaaatactcaaaaaggaatttggactaaaaagagtcactaaaaacgatttgttgcgttacaaactttggcttgaaacagatgggatatctctttatacgggcaagccgattgaggccagtaaacttttttcaaaggaatatgatatcgagcatattatccccaaagcaaggttgtttgatgattcctactcgaacaagactatttgtgaaagacaacttaacgttgacaaagcaaatattacggcatttagttttcttcaaaacaaactatcagctgatgaatttgagcaatatcagtctcgagtaaaatctttttatggaaaattaagtaaggccaaaattcaaaaactcctaatggcaaatgataaaatccctgaggattttattgctcgacagcttcaagaaacccgctatatcagcaaaaaagcgaaggaaatactctttgagattacaaggagagtaacagttactacaggaactattacagataagctacgggaagattgggggctagtagagatcatgaaagagctgaattgggagaaatatgataagttaggtttgacctacacaattgaagggaaacatggtgaaaggttaaataaaatcaaagattggagtaaaaggaatgatcaccgccaccatgccatggatgcacttacggttgccttaacaaaaccagcttacattcaatatctcaataatttaaatgctaaagccatagatgataaaaaaggctcagagattttcgcaatagaacaaaagtatcttaagagagaaaatggaaaactttgttttattcctcccatagaaaatatcagaacagaggctaaaaagcacctttcaaggattttggtttcttacaaagcaaaaaataaagttgttacaattaacaagaataaaacgaagaagaaagcaggtttcaatgaacagattgcattaacaccaagaggtcagcttcataaggaaacagtttacgggaagtcctttcactacagtacaaagtttgacaaaatcggtgcttcttttgatgttcagaaaattaatactgttgccaagaaagaagaaagggaagcccttttaaaaaggttagctgaaaatggtaatgatcctaaaaaggctttcaccggaaaaaatgctttaagcaaaatgccaatttatttggacttagaaagaaatattaagctaggggaaaaggtaaaaaccgtaactcttgaagaaaattacaccataaggaaagaaattgtaggagtaagtcctaattcaaagcaaatagttccagactataaatcaatagaaaaaattgttgattcaggagtaaagttaattttgaaagaaaggttggatcaatataatggtgattcaaaactcgctttttcaaatcttgacgaaaatcctatttggctcaacaaagagaaaggtatatcaataaaaagagtcaaaatccatggtgtcagcaccgtagaatcacttcatgtgaagaaagatcatttcgctgaaccaattttagatcaggaaggaaatgaaataccagttgattttgtcagtacggggaataaccatcatgttgctatttacgaggatgaaaagggaaatcttcaagaggaggttgtttcgttttttgaagctgttattagaaagaaccaaggcttaccaataatcaataaaaatcactctctgggttggaagtttttatttacgttaaagcagaatgaatatttcatttttgattcttatggttttgatcctgctgatatagacttattggatgaaagaaactaccatttaattagtccaaatttatttagggtacaaaaaataggaacaaaggattatacatttagacatcaccttgaaacagttttaaatgattcaagcgaattagactctgtagcttatcttagactaagatcaccagaaaagcttaaaaatattgttaaagttcgtttaaaccatttagggaaaatcattcaggttggagagtattaaaaaatggaattaggaaaagcctataatatttgcaaccactctaactacatggagaaaatcttccgagaagaagggaatgatcggtgctttcttcagctcttccaaagagctaaaactttggaagagctttaatatgctagtcaaaaaaacttaaccgatggaaccaggtcaatcctaccatatctacaatcacgccaatggaatagagcaaatctttcaagatgaggaaaattatagattctttttaaagcaatacgcaaagtatttgggtggagtggtagatacttatgcttattgtttgatgcctaaccattttcatttactagttggcgtgaagctggaggacgaattgaagtcaacttttccaaagttcgaaactttggaaaagttaatctctaagcaatttgctaacttctttagttcttacactcagtcttttaataaagtatatagcagaagaggaagtttatttattaagaactttaaaagaacccccattctcgacgagcgccaatggcaagagactttcctttatatccacctcaacccagtgaagcatggctttgtcaaagttcatcaggattggaagtggtcaagttggcatgcataccaagatctcaataagccttcaaatttagaaagagattatttcactaatttctttgatggttggggtcatgtgcggaatatgatggaagtgaaaaatgaatggttgatgaataaaagtttggaatagtagatcggaaaacttttctaaagttctaaaaatttagaaaagttaactctccgtaaaccttataaacatgatcaaaagaactctatttttcggaaatcccgcctatctcagtaccaaaaacgaacaattacatatttcatttcctgaaaccgaaaaggaagcccgtatggttcctatcgaagacctgggaatgatagtgttggagaaccagcaagtcaccataacccatggcctgattgccaagctcacagagaaaaaagtggccattatcacgtgtaatagtcaacaccttccggaaggcctacttcttccaatgcacggtcattccgaacaaaccgaacggattcgcttccaaatccaagcttctcagcctctcaagaaaaacctctggcaacagacagtcacagctaaaatccaaaaccaagcagcacatctcaaagaaaaaggaaaagattcaccgcgtctttattatttagccaagaatgtaagctctggtgacagcgggaatcatgaagcccaagctgctgccatttattggcaaaacttatttgatatccctgattttaatcgagcacaggcaggaattcctcccaataatctgctcaactatggatatgcaatcttaagggctgtgattgcccgtgcattggtttcttcaggcatgtttccgggtttgggaatttggcaccggaataaatacaatgcttactgcttagcagatgatatcatggagccatatcggccctacgtggatttagtggttagccatttggtagagacggaagatgatatttcagaattgaccacttccatcaaaaaggaattgctgagtatccccgcattggatgtgcgaatcgatgggcaaaaaagtccgctgatggtggctgcttcaagaacgacttcctctttgtttgagtgttttgctggaatcagtcgaaaaattatttaccctgaatatggatgaaaaatatttttcaagacttaatcagtataggagtttgtgggttttagttttttttgatttgcctacggaaacccgtaaggataggaaagttgctacttctttccggaaaaagttgttggacgatggttttgccatgtttcagttttcgatttatatgcgcttctgtgccagtagggaaaatgccgatgtgcatatcaagcgaactaagaaaaacctacctcccaaggggaaagtaggaatcatgtcaattacggataagcagtttgggatgatggaggtgttttttgggacaagtaagcaagagacagaaccacctactcagcaattagagttattttaaattgaagcttttccaaagttctaaactttggaaaagataaaacctacctatttccactgtatactcttcagttccaataaattttttaatcctaaaatagcacataaaaaacagcataccagccacttagcgtggggtatgctgtgattcctacaggaaagtaccaatttgaaagcaattcacaaccgcctggcgcgactacggcgaggtcatcgtgctgtgattcctacaggaaagtaccaatttgaaagcaattcacaacgaaatccaaggaagaaaaagaagctgaggcgctgtgattcctacaggaaagtaccaatttgaaagcaattcacaacgactggatccgaggcagatcacccagcggggctgtgattcctacaggaaagtaccaatttgaaagcaattcacaactcttggtaggaagtatctggttttggtatagctgtgattcctacaggaaagtaccaatttgaaagcaattcacaactcttcgcttttctttgcctcttctgattctgctgtgattcctacaggaaagtaccaatttgaaagcaattcacaactttccaatgtggcaaataacctagggaatggctgtgattcctacaggaaagtaccaatttgaaagcaattcacaactagccacttgagtgatctccagtccactttgctgtgattcctacaggaaagtaccaatttgaaagcaattcacaacctctggaagatgatatctccggagtggatggctgtgattcctacaggaaagtaccaatttgaaagcaattcacaacccccatggccgcgcacgcccatgtcggcctgctgtgattcctacaggaaagtaccaatttgaaagcaattcacaactccaggatcacctgattgtctacatctttgctgtgattcctacaggaaagtaccaatttgaaagcaattcacaacgtcatcttcaaagaattccccactcactgctgtgattcctacaggaaagtaccaatttgaaagcaattcacaacgcttgctttgtgccgtcgccgcgaaagcgagctgtgattcctacaggaaagtaccaatttgaaagcaattcacaacaagctgtgcaaagcttctacgcccgcttctgctgtgattcctacaggaaagtaccaatttgaaagcaattcacaacttcgtaagcatagaagtttatactaactttgctgtgattcctacaggaaagtaccaatttgaaagcaattcacaaccggattttgccatcagatggccgaagcggtgctgtgattcctacaggaaagtaccaatttgaaagcaattcacaactcgctgtcctcggtgatctcgtcttcgaggctgtgattcctacaggaaagtaccaatttgaaagcaattcacaacgtccaagtctgaagacttgaaccaggtgttgctgtgattcctacaggaaagtaccaatttgaaagcaattcacaacactctctggtattcgatgtaccggaatttggctgtgattcctacaggaaagtaccaatttgaaagcaattcacaaccgtatctgtcaatgttatttgagatagtgtgctgtgattcctacaggaaagtaccaatttgaaagcaattcacaacttttggacataattactaaacaatcaaatggctgtgattcctacaggaaagtaccaatttgaaagcaattcacaacgtttaggggtcttttcagattgcttctctcgctgtgattcctacaggaaagtaccaatttgaaagcaattcacaactcttgtgtatcgctcaaaatactgcttactgctgtgattcctacaggaaagtaccaatttgaaagcaattcacaactcatggctcggtttagctttgcgatcgtttgctgtgattcctacaggaaagtaccaatttgaaagcaattcacaacaggccttctagctcttttaggcttcttggtgctgtgattcctacaggaaagtaccaatttgaaagcaattcacaacgttactttgcctatgttagcattttgccaggctgtgattcctacaggaaagtaccaatttgaaagcaattcacaacccgactcagacatgaaacagggtattgtttgctgtgattcctacaggaaagtaccaatttgaaagcaattcacaactaaagcaactgaattaaaattaggtagaatgctgtgattcctacagga

SEQ ID NO: 1559 - DNA, 17309 bp, synthetic construct
  misc_feature 1..17309: note = Synthetic
  source 1..17309: mol_type = other DNA
ccaagcccgttgtcagcgacttcaaaatgccagatatctccttcttcataggttttgatttctactataggatctctatcctcactcttgtatttgagcgcattagaaattaaattttgaagaacctgcctgatattcggtctttgtgatttgatcgtaggaaggctagaccaaattagctttgccttgttttcttcaatattagtttggaaaagagaagtgatttcttccaaaagcaaattcaaattgattgactcgctggggatgtgaatcctgcctaccctggaatactccaatagatccagaatgattgatttcattctcatagcgccctcaactgcaaaccggatatattgtactcccttgtcatcgagttgctcagcatattttctttctatcatggaaaggaagctcgtaatcatccgcaagggctcctgtagatcatgtgaggcgacataggcaaactgttccagttctttgtttgacattcccagttcatgattgctttgttgcagcttttcattcaatgcttttaaagactccaagttctgcgctctttctatagccacttctatattggaagtgagggttttcaggaatgaaatctcttcatctgaccaaaatctttcttgtttgcaataatcaaaaccgatgtatccaaaaaaatcttttcggataaaaatgggaaattgaataatcgatttgatattttgttctgaaagtattttcagaagaggtcctgaagtattttttgagttagttacaaaaggctctttcttataggctttagtcaaaaattcaggaaaatcatcaagggataatttttgataatcgggattttccaattctgaacttacctctggatcattccattcaacaagctgtcgggtcatcaattttccggattcagcatctgtgtagttcttaaagaaatagaccctgtctgcgcctatagctttcccaatcaattccaaacattcctccaaagcttttaaccagtcctgattgaaaagcaaaagcttgactaccgaggtaattgtttccaaaagtttggttttataaagtagggacttttcataatccttattttctgtaatgtctctggaaatgccgaccagcccgaaaaccttaccctcaggatctttcaatggaagctttgaagtgctcaggattcttacctgcccatgaccatcgattataggctcttctctgttaaggaccggttctttatgcttcatgaccttcaggtcatcagcatggaaaagttctgcaaaatcacttggaaataaatcgaagacggttttgcctattgtttctgactcttgctcttttccgatcaattgaacatttgctttgttgttgatcaggtgcttgaaatctttgtcctttacatagatgtaatcggggatgttgtctatgagggttctcaggagatttctttcttgggcaataagttcctctgttctcttctgctcactgatgtcctgcagtgctcccaccattctgactggtttgcctttatcatttctcagaatgattgttttttctttgacgaaagcatactcaccacagtattttttaaaccggtattccccttcccattttgaaacacttttatcttttcttgctgctgttatgctttttacaattgcaattctatcctccggatgaatggcatgttcccaggcgtcttgtgtcacgtaattggtttcaagagggtacccaaacaaagttttgtagccatttccccaaaaaatggtttcagattccaaattccagtcccagatagcatcggataccgcatgggtagcatacaaaaagcgctcattgattttttccagttctttttctgctttgtatttttcggtttcatcaattactgttgagatcatcagtccctggtcataaaccgggatgtttttagcagtgactattttctttttcccctctttagtggtgatttctatacctgaccaattcatcttttcaggaattccactttcaacatctgcaaggattctttcctggagctgctttctataaacagggtcaggatatactttttcaaaaaaagatggaatattattcagatcttccataggccaaccgtaaatctcggcaaattttttattcatcaaagtgacttggcctgaatcaatagaattgacagcgatgccaatcgggaggttgtcaatcgtggtttgaataaaatgatttctttgtttgaggtcttctgtggtttttttgatttctgtaatatcctggagcgcaccgaccattctttctattttacctttggagtttcttactccgtagcctttatcaatgacagtagcatagctgccatcggactttttgaacctgtattccccctgccaaaactcatccttggatttgaaaaaattattcatgctttctctaacaaagctctcatcttcagggtgtataaaccctccgaaatcatctaaattgaccgaactgcttgaaatatgatagccaaattgggagcgaagcccttcaccccaaaaaatggatccattgaccaagtcccaatcgtaaatgatttcagaagtggctttgctgaccaagtggtaccgcttgagcaattctttgagtccttgccttaaaacctcctcttctgtgacatcctgtatggtccctttgtatttttcagttttactatgctgatcatattttagagaacctttttccttaatccatttggtatttccttctgaggtgatgatacggtatttgaaatcagcattgatttcacctgacaaagctttttttaataccaattggaagtttttgcggtcgtccggatggatactttgccaaagtttgatcttacctggcttacttttttcaggatccatctcccaaatatgatatacttcttcagaccaaaataactcctctgtggcaggatcaaattcgaaatagcctactttggctatcttctgagcatcattaagtttttgttccgtttctttttgcttttcgatttgggatttggtggatgaaatgtcctctgtggttaccaaaacttctttcaaactgtcctcaaaacctggtacaactttccaccttacgtaaatttccctgacactgccgtccattgacatcattttggactccatttccatggaatgctttccctgcgtgatgcccactatttgttccaaaaaagcagcaccggtttcgggaaggataagcttatgaaaactttctaaaagttcttgcttactattagctttatgtaattctaagcaggctagattgaaattgagaatgcgcaatttactgatgcaggcatttataatttccggggatttcaaaagtttatttcttactgaattttcagacttccccatcaagtccaactcatcaaggtaatttttgatttccgaaaaatcttcttcccaaattggaataggggcaacatcaaatatggccttatattttgagttttcggatagcatgttgtgtagagaatgtgaggattactgtggtgaattcttcctaaaattcttactttaactaaaaataaggaaactaattatacaaagccaaataataactgttaaatcaaaacattattttttttctcaaactggaaaatttctaatagataattttagaaagtcataacttcacaatattccctgtttttactgattcatcacaagcaaaagcaattttcaggctgttgactgcatcacttaagtggtcagtcaaatcaatgttttcctgaatagcctttaggaaatattcttgttccctgttgcatagttcctgatggtcaggttcatctttcatatcaatccattcgtcttttttcaggaattgattttctgaatcaatcgctgcatggtgtattttgatactttcggtctttgtatgtgaatccacatcatctgatttgcccatacctccggcatttttggctacgatggaaactgcaccttttggaccaaaaacatccttgataaaaaatgcattgtcactgatcatgggtccccagccggcttcataccagccaaccgatccatcctcaaagcgaatctgcaattgaccgtagttgtaattgtcagaggcaatctcatccgtcaatcttgcgcctatagctgaaaccgtaaggggcttcgaacgggtcatctgacacattacgtcaatataatgcacgccacaatccactattggactgagactttgcatgaggtttttatgcacgttccacatgtagcctttgctctgctgattgaggttcatgcgcatcaccaagggtttcccaagtttttgggcttcaaaaataaacttctcccaagaagggtgatgtcttagaatatatccgaccactacttttttaccggtcttcttggctgcttccacaattttttcagagcctgagactgtatctgccaatggtttttcaataaatacatggcagcctgcttttaaggccttcaaggcgtaaggctcatgggtatccggataagtagatatgcaaactgcatccggcttggtggttttcaatgcttcttcataatcagcaaacaaaggataagaagcgcctagttttagattgagctctaccttgctgtttcctcgtgctacaagaccacagatttcaaactctttcatggagtggtaggcagcagcatgagaggctcccatgtttccacatcctactaccaaaatcttaagtggcttatctgatttgctcatatgttttttcagctattgatgatactgatttcattttcaatgattattgccagcttatcccattcttccttcacttctgcaaccaaagcattcaagctttccagatcagcttctttagctctcatttccaaatctcctgtaatttcggccaatatgtcaaagcccatagattgggaagcccctcggatataatgtgcgttcgcttgaatttcgtccagcctcgattgcttaagatgatctatattttcatatactttcgaagagaggtctttggaagtaattagaagctctttgagtaaagggatattgttgtcaataagcttaaggagctttcctttattgaagctgatcaatcctttacccttgctttccagggcatctagattttcagcagtattttccaaacaattcaggtgtttttccaagactgctttgagggaatttggctgtataggtttggtcagaaagtcatccattccagccttaaaacatttttccctttcctcactcagagcacctgcagtaagtgccacaatgggagtttttatgttgttttcagcttcgtaatttcgtattttctgagttgccgtcagcccatccatttctggcatctgaacgtccataaagatcaggtcaactttgttttccttatatttctcaagggctatttttccattgctgcattcaatgactttaaccttgtttagaatattgttcaataaggttttcaatagcagcatattcatgctgatatcctctgccaccagaatggtgaattctccttcaatcttagaatctgttctatttgatggctgagatgggacaggagtatttttctctgtctctcggtagctttgaagaatactgaagacttgctttaatttcaacggcttgatgagggtctgtttgattcccagtggttttaatcggtctgcaagttccttttcatctgaataataactcatcaaaaataccggcagtttttcttcgctgagccccaaatcatttctgatttttccggtcacatcaaggccattgacataaggcatgtgataatctatcagggccatttcaatatcagaatgttcctttaatattttgaaggcttccaggccgtttgaggccagataagttttaacctgccagagagaaaactgcgaagcaagaacttcagcaacgtttctgttgtcatctaggacaagcactttactaaatggaagacttggttcaagaggtttattggtcggaattaatatttttgaatttatttggaagaagaaggtagaacctttgccttctttactttcaatctgaattttgcctcccattttttcggcaagcaaattggaaatggtaaggccaagtcccgtacctccgaatttccttgtggtagaattgtctgcctgggaaaaagctttgaataattttttctgctgggattctgttatgcctattcctgtatcaataactgagaaggttaagtctatttcctgattttccttggtttgaaaatctaccttaagaataacatggcctttttctgtgaattttatggcattgttgagcagattgatcagaatctgtctgagtctaaaaggatctaacaggactgattctgggatatttggattgatatccaagatcacttccagatttttttgtcctgcaggatatttgataatatccatggtctcatacagaagctggtggagatctgtttcaatcagttccaaatccagtttaccagcctcaatcttggagaaatccaggatgtcattgatcaggttcaaaagggattttcctgccgtatttgcattttctgcatattgcttctgtatatgacttagctctgtcttgagcaaaatatccgtaaagcctatgacaccattgaggggagttctgatttcatggctcatattggcaagaaattcagattttgatttgctggcagcattggccctctcggtctccgcaatcagttgactttcaaactgtttgtctttggtgatatctgtcattttgatatcaagccttactggggcatcatggtcatcaaatatgattttgcccaaagtatatacccatcgggtgctcccgtctgtttttataattctgaattccttttcaaaggatttgagatcatctacttgcttcctgacctcttcgacaacagttacgtcttctgggtgaataaattttaaccagaaatcagcattctccataccttcatccggttcaagaccaaaaaaatccttgatggatggtgtgacaaaaagaacccgttttgttggtaatttaacagcccaaaccacatcttccatttctgaaagtatgctttcaagttgttgtttggttttaaccaattctgaagtttttttcctgatgtcattgatgtcctgcatcgtaccataaagacggatgcattgtcccatcttgtattctccttttgcaatcaatctcacccatttctcccgaccttgggcatcaatgatgatcaattcctgatctaaactttttcccttcttgattaattggtcgaagccctctcttactttgtttctgttgaatccttttttgaaaaactgaaggctgttttccacagaaagctcaaaatccggattcacaccatgaatttccttcattacattggaccaattgacttttttgtccaaaagatctacttcccaagcacctacagaagcggttctactggcttgctccaatatttctttggttttttccaattctaattggatttcctttctcgctgtgatgtccgaaactcttccggctacttttttttcctgttttttttgattggatacaggaaaagccttttcattgagccagcggatctgattgtcgatgttcactctgaactcaatgttgtatgcttctccattgtggagcttatcagtgccttcgcggcagatcgaacggtcctcctcaaggacataggtatcggtaaagctcttgccactttggaaaaaatccataccaacacctaggattttctcgctgttagggcttaaatattcgtatttgttcttcaatacatcatagacataataggcgtcatccacggtttcggctatcatttgaaggcgttcttcggtagctttgagtgctttttctacttttatactctctgtaatatctactgaattggttacaatgatatccctgatgcctccaaaatctgctacagaattgtcataagcccagtacttgttgatgccgtttttggatttcaggcgaaggattcccttatgccgacctacttttttcatttcctcaaagtaaaggtcaatcataaactgatcgtagtcattgataaactgccggaggtttttaccgatcacctcatctaattcatatccaagagaattcgatgcagcctcattgatctttagaatttttccattaaaatcatgtatacagatcagaccttgtgagttgtcaaagatatttctgaaaagtacctcttcatttttagtagctgatatatccaaaagaataccgtccaggtagtattcctgagctacttggtccaggaatacttttcccctttcatctatccatttaattaaccctgagctgtggactattctgtattgaagctgccaaggttttttttccttgatcgctttttcttttacgctcagcaccttttccaggtcttctttatgaataaggttgataaatgattggttagggttatccaaaaaatcttttagtgaatagcctgttattttttcaaatccatcagtcaggaaaacaaaagtttgatttgggtcatttttacatctataggggcttccatgggtgttttccaaaagagatttatagtatgcttggtttcttttgagttcggaatttctttttctgagttccaaaagcctcatgacttgggtactcaatgctcttagggtttttttctgttcttcagaaagcgtcttttgttcatcatcagccacacaaagggttcccaatgcatagccatcttcggaaataagcggataagaagcgtagtatttgatgcccagttcggtccaggcaggatgggaagacatgttgggatcggtagcactgtcttgaacttcataaaaatcatccggagattggatggcaagggcgcagaccgagtgcgagataggggtttctttgacagtcagaccataagcagacttaaaccactgtcgctctttgtctaccaatgtcactgtagcgtatttggttccgcagatctgagcagccatagctgtgatgaagtcgaagtcgctttctccgtctgtatctaaaatccggtaggaataaaggttttttaaccgctcctcctcattgtaaattttctttggctcgctcatcgtaaaagaactctggctgacaaactaatgaaattaaatgaaaagttgtcaaataaatatcatgtatttcctttctttaaatcaataatttcctgcgacgtcatgtaggttattttgatgtctaaggttatcgctattaaaggttggttttgctctgttttgggaacttgaacaatctgatctacaatttccattccttggatcacatgaccgaaaacagtgtagtctccatcgagccgatgaagtccgtttttgttttggacgatatagaattggcatctagcagagagcttgtcaacattatcatccctacctgccccaacagctccataaacatgagtgagtgtggggtgaaattccggttctaagagatattcgggatcattgaatccttcgggagtatccgggcagccaccctgtgccacaaaatcagggatgaccctgttgaaagtcaaagaatcccaataaccggcttcagccaattggacaaagctttcctggtgatttggcgtcaggtctgaaaactcaataaagattttccccaagggtgtttcgatgagtcctacagggattttgtcctgagcaggactatacaatggtataagcgtgcaaaaagcgatgatcaaaaagagatttttcataaaatgggattttgggtgaatttattaaaaaaatgtgacagcgtatgtcaatcgataaaaatcccctgtacaggggattttttaagtaaataaataggggtataatgggatttcttagggtaggggagaaaaagacgaccccgaaagatcaaatccatcggggccctcttaaatgttttcacaacggaataatccttattgtgaattgcttcaaattgatgacgctaatatagattttaaactttaaacttttataaaaatatgaaaaagattttgggattggatttggggactacttcaattggttgggcttttatcaaagaacctgaaaaagatgtggttggaagtgaaattgttgatatgggagtaaggatagtacctctcagttctgatgaagaaaatgactttgctaaggggaatactatatcaattaatgcagataggactcttaaaagaggagccagaagaaacttacaacgattcaagcaaaggagaaatgcacttcttgaaacctttaaagaaaagaatttaattccttcaaacttccaatatgctgaggacggtccatcttctactttttcaacattgaagttgagagataaagcagcgaaagaaaaaatagagctcgatgattttgtgaaagtcctattgcaaatcaataaaaaaagaggctataaaagcagtagaaaggcaatgtccgaagaggatgaaggaacggctattgatagcatgggtatagctaaggagttatatgaaaatgatctaacacctggacagtgggtctatgaagctttgaaaaatggtagaaaaaatgtccctgatttttatagatctgaccttcaggaagaatttaagaaaattgtgaattaccaatctgaattctatccagatattttgaatacatcttttgttgaagattggatgggaaaagctagtactcctacaaagcaatatttcaataaacgaggagttcaattagccgaaaataaaggaaaacgggaagaaagaagattacaagaatataaatggagagctgaagcagtaaactttaaaatagatctttcggaaatcgcattaattctttcccaaattaattctcaaatatccaattccagtggctatttaggtgctattagtgatagaagtaaggagttatacttcaaaaatttaactgttggtcaatatctgtatcagcaagtcaaaaagaatccccatacaagattgaaaggacaggtattttatagacaggattatttggatgaattcgaaaaaatttggagtgtacagtcaagtttttatcctcaattaaatgatgaattaaaacaggaggttagggatgttactattttctttcagcgccgacttaaatctcaaaagcacttgattagcaattgtgagtttgaagaacaccataaagttgtacctaaatcacatcctatctttcaggagtttaggatatggcaaaatctcaataatttaactttgataaaaaaagataacctaaatgagaaatgtgaattagcattagaggataaaactgctctagcaaatgaattagctttcaaaaaggaattaagtgtaaaggatgctttgaaagtattaggtttaaaacctagcgattgggaattcaattttacaaaaatagaaggtaatcgtactaatcatgctttttttgaggcgtttgcaaaaatcattgaattagaagatggtgagccaatagatttgggtaatttaaaagctgatgatattttggatcagttttctgaagcttttttgagaattggcatagatacagaattacttcaagtaaatagtgatatcgagggggcagaatatgaaaagcagtcctacattcaattttggcatttattatatagctctgaggatgatcagaaattaaagcaaaatttgatcagaaagtttggtttcaaacctgaacatgcaaaaattttggcaagtattagtcttcaagatgatcacgcttccttaagtagtagggcaataaaaaaaatattaccacatcttcaatctgggcttatttacgacaaggcttgtacctatgcaggatataatcattcttcttcatttacaaaagatgaaaatgaaaagagggagttgagagcagagttggaattattaaaaaagaattctttaagaaatcctgtcgtagagaagattcttaatcagatgataaatgtggtaaatgccattttaaaagatccaaatctaggtaggccagatgaaataagagttgaaatggctcgcgagctaaaggcaaatgctgagcaacggaaaaatatgacttccaatattgcatcagcaactcgagaccatgaaaaatatagagaaatactcaaaaaagagtttgggctgaaaagagttactaaaaacgatttgttacgctacaagctttggcttgaaacagatgggatatctctttatactggtaaaccaattgaggcaagtaagcttttttccaaggaatatgatattgagcatattattcctaaggcaagattatttgatgactctttttctaacaaaactatttgtgaaaggcagctaaatattgataaagcaaatgttacggcatttagttttcttcaaaataaactttctgctgatgaatttgagcaatatcaatctcgggtgaaatcactttatgggaaattgagtaaggccaaaattcaaaagcttttgatggccaatgataaaatcccagaggattttattgctagacagcttcaagaaacccgctatatcagtaaaaaggcgaaggaaatactctttgagataacaatgagagtttcagttactacaggaactattaccgataaactaagggaagattggggattggtagagatcatgaaagagctgaattgggaaaagtatgataagttaggtttgacctatacaattgaagggaaacatggtgaaagattaaataaaattaaagattggaataaaaggaatgatcaccgccaccatgcgatggatgcactaacggttgctttaacaaaaccagcatacattcaatatctcaataatttgaatgctaaagcgataggtaacaaaaaaggcacagagattttcgcaatagaacaaaagtatcttaaaagagaaaatggaaaactttgttttattcctccaatagaaaatattcgggctgaggcaaaaaagcacctttcaaagatcttggtatcttacaaggcaaaaaataaagttgttacaattaataagaataaaaccaagaagaaagcaggttttaatgaacagactgcattaacaccaagaggtcaactacataaggaaacagtttacgggaagtcctttcactacagtacaaaatttgaaaaaattggtgcttcttttgatgctcagaaaattaatactgttgccaagaaagaagaaagggaagcccttttgaaaaggctagctgaaaatgggaatgacccaaaaaaagcttttaccggaaaaaattccttgaataaaatgccaatttatttggatctggggaaaaatatcaagctatctgaaaaagttaaaactgttgtgctcgagcaaaattacaccatcagaaaaaatattgatccggatttgaaggtggataaagttattgatgttggtataaaaagaatattagaaagccgattggaagagtttggaggtaatgctaagcttgcattttcaaatcttgaagaaaatcctatctggctaaacaaggagaaaggtattcctataaaaagagtcaagatttcaggtgttagcaatgtagaatcacttcatgtgaagaaagatcatttcggagaaaaaattttagatgaggaaggaaatgaaataccagttgattttgtcagtacaggtaataatcatcatgtagcaatttacgaggatgaagatgggaatttacaagatgaagtagttaatttttatgaagccgtaattagaagaaatcaaggggaatcaataattaagtataggcatgaagaaggttggaattttttgtattcaattaaacaaaacgagttttttgtttttccatcccaagattttaatcctaatgattttgatttattggatcctaaaaattatgatttgattagtccaaatctttatagagctcaaaagttttctaaagttatgtatggaaactcagcagttagagattatgtatttcggcatcaccttgaaactgtacttaatgatgtaaaagagcttaaagatgttgcttataaacaattgaaaagtcttcaatatttaaatggaataaaaaaagttagattaaaccatttaggacagattattcaagttggagagtattaaaaaatggagctaggtcaatcctatcatatcttcaatcacgccaaccgaatggagaatatctttcgagaagaggagagttataggttcatttttcaacttttccaaagttctaaaactttggaaaagttctcctttaaactagtcgttaaaaaattaaacttatggagctaggccaatcctaccctatctttaatcacgccaacggaatggagaatatctttcgtgaagaagagaattataggttcttttttcaacttttccaaagttctaaaactttggacaagctatcttttaaattactcgttcaaaaattaaatgtatggagctagggcaatcctatcatatctacaatcacgccaatggaatggagaatatatttcgtgaagaagagaactataggtttttcctgcagcaatattcaaaatatttaagtggggtggtagatacttatgcctattgcttgatgccgaatcattttcatttgttggtgggggtgaagcagacttcagacctgtcaggttttcaaaacctgacaggtctgatccagcatccatccaaaaatccagcaattaaaggttttacaaattttttcaattcttatacaaaggcaatcaataagcggtttgatagaaaaggaaatttatttattcgagctttcaaaagaaccccaatcctagacgaacgccaatggcaagaaaatttcctatatatccacctcaaccccgtgaagcatggctttgtcaaagatcatcgagattggaagtggtctagttggcatgcctatcagaatctcaacaagccttcaaatctggacagagcctattttaacaatttctttgacagctgggagcatgtgagaaatatgatggaagtgaaaaaagaattattgatgaataaggatttggagtagacaaggttagacctgacaggttttagaaacctttcaggtcttgaggtcttgaaaattgccaagtctttaaattttaaaacatgatcaaaagaaccctcttcttcggtaaccctgcctacctcagcaccaaaaacgagcagctgcatatcagttttcctgaagcggataaggttgataggacagttcctattgaagacttggggatgattgtactggaaaatcagcaaataactatcacgaatggtttattagccaaacttaccgatagaaaagtagcagttgtctcttgcaatgcccaacacctgccggaaggtctactgttaccgatgcaggggcattcagagcaaacagagcgggtccgttatcaattggaagcttctcagcctctcaaaaaaaatctttggcaacagaccgtatccgcaaaaattaaaaatcaatatgcgcttttacatgaaaaagggaaggagtccaaacggatggagtatctatataaaaatgttagttccggagattccggtaatcatgaagctcaggcagcggcgatttattggcagaaattgtttgacattcctgatttcaatagaggtcagctgggtattcccccaaataatttattgaattatggctacgccattttaagagcggtgatagcaagggccttggtttcttcagggatgcttcctggagtggggatttggcaccgaaacaaatacaatgcatactgcttggcagatgatatcatggaaccatacaggccttatgtggatttggtggtatcccatatcgtagagactcaggatgaatattcagagttgactaccgaactgaagaaggaactgttaagtatccctgctttggatgtgaagatagatggtcaaaaaagtccgttgatggtagcggcatcaaggacgacttcctccttgtttgagtgtttttccggaatcagtcgaaaaatcatttaccctgaatatggatgaaaaatatttttcaagacttaatcaatataggagtttgtgggtgctagtcttttttgatttgcccactgaaacccgaaaggataggaaaatagccacttctttccgtaaaaaactattggatgatggttttgccatgtttcagttttccatctatatgcggttttgcgcaagtagagaaaacgcagatgttcatattaagcgtactaaaaagaaccttcctcctaaggggaaggttggaatcatgtccataaccgataaacagtttggaatgatggaggtattttttggaacaagtaagcaggagacagaacctccttcacaacagttggagttgttttgaaagtatttagacctgacaggttttcaaaacctgtcaggtctgactcaatttcgcattttaaaagcaatatttttattttctaatttcaatcataaaaaacagcataccagccacttaaggtggggtatgctgtgattcccttgggaagatatcaatttgaaagcaattcacaaccgcatccgtgatgaggatgtctatttcagtgctgtgattcccttgggaagatatcaatttgaaagcaattcacaacggaacttccctgcttctctgagcttgttgggctgtgattcccttgggaagatatcaatttgaaagcaattcacaacatcttggaggggtcataatccaccccgtcagctgtgattcccttgggaagatatcaatttgaaagcaattcacaacctccgcttcctgcctgtctttaagcttatggctgtgattcccttgggaagatatcaatttgaaagcaattcacaacaatataattttagtgttatcactccaacgtgctgtgattcccttgggaagatatcaatttgaaagcaattcacaactgtccagctcggcattgatgtattcttcttgctgtgattcccttgggaagatatcaatttgaaagcaattcacaacaccaggtatttccaatgcaaaaggaaatccgctgtgattcccttgggaagatatcaattttgaaagcaattcacaacatcgaattgtcgaacaggccataaaggactgctgtgattcccttgggaagatatcaatttgaaagcaattcacaacgtgccctggggtgatggtgacacaggcgatgctgtgattcccttgggaagatatcaatttgaaagcaattcacaacttagtggtaatgtaggaatatcactaacaggctgtgattcccttgggaagatatcaatttgaaagcaattcacaaccaattggtcattgtagataacatcgtcagcgctgtgattcccttgggaagatatcaatttgaaagcaattcacaacggatca

SEQ ID NO: 1560 - DNA, 17136 bp, synthetic construct
  source 1..17136: mol_type = other DNA
  misc_feature 1..17136: note = Synthetic
agtacttttttacagtaaaaaaaactcttgtaaatcactctcttattcttgattataatgtaaaatcattatttaaaaataataagttagaattagtaattttaaaagatacaaaatgtgaagaaaaacctgatacagttatacgtttaccttcaaataaaggaagaataatacttaacaagaaatattcagataaaaatgcattcttttttgattatgttatacatgaaaatgatagtcatgctgaaggttcatataatatgcaagaacacaaaaaatactttgatatttctcaaattggtaatggttcaaattagttgatagtcaataaatgttgtttaatttattaaaaactagtaaactaaaaaataaatagaatttaaaaaaggtgtacaattatatacaccttttttcttttcaataaagtgaaaaggttaaaaacgtgtttttctcaacttttttggttcaattaattgatgaacataatccaagtgattttgagtgtatttaccagtacaaagaccatttatgaaacacaaggttaagctagagtgatatgggtgatgacagctgatttttttaagctaaaaaaggtgttattttgctaaatcattaaaaataaaatatttaattatatacacgaatgataatgtctaataatcggagagttattaggagagggaaaagataaagtatgtataaagtgaggtggtttcattatacaatgacaaagggcagcgaaattatttaaatcaacaagaacggttacggttcttgaagcgacatagcaatacgatacttacaaaaggttactctatcggttgttgtattataccggagcgcgtattacggaaatccataacctaaaaacagatactattgacttgaacaatgaggcgctcattaatgggatttttatctatttggtaatttcatacacaataaacacttaaattaagaaactataacttttattatcagccaaaaaatataatatgtatcaaaatatttttaataaataaacacctagaatctctatagacaagaagctctctttgactttacaaattaatcataacagaaaaatttgtggttgtgcaattatatttccttagtatccttaacattctctaatcatttgtaataaaatcttttataatctgatttgtgtttgatggtaaagcggtggttactattttgtatttttttaccttcatattattaaaccagtgttcccaatagtactttattacagattcttcataagggtttccatcatctggattaattcctaatacaagtatctctatgtcggacaaattgttatttgcagttataaaaccataacctttattttcaatcttagccttccactgttcatcattcaactttaaacgtttaattagtttagatgttaaataagacgttttattaccttgagtaatctttgagttttcatggtaaatatagccatctgttaaaatcactaaaatatttctatggttttctctaatacaataatctttgatgttagtttcaaaaaaacgccatgtatccgaacctatataatccttatcctttattgcggctttataaatttctaaaggttttttagaataaaatatatctattttattcaataattttaatgttgcatttttactgtttacattaaacttcaattcatcagacaacctgtttatatctttatttttaggagcaggatcaaaatatagctgtatatcatcatccataagtcttgtttttttggtttttaaactcgaggtaaatacctttgctaccgattgaatataagccacatcacgtaaatagtattccatagattcgttaggatgttcttcagggtcaatcctatcagaaaggtctaaaagaaagcttatgtttaacttatcatccgatttaactttttcttgttcccctatattttcttctatctcgtaattagtttcattatcgcttttacatgaaggtgaagcagaaataaccagtagtataagaattttaaatagcgtaaatttcataatattagtttttagtgtataccaaatgctgataatccatttcttcttttaagctcaattgcgaaagatgtttttcggatatttcttcacacatacccctcaattcgcttttctctgaaggtagcgttactgttgcattaattgcctgataccaaccttctttatattgataatgataatgaaggtattctttaataggaaatataaagccttcaatcttagattgcagttcagatattttaccattaattgatactatttcctgctttacattttctattttagatataagatcattttttttagcagactcattttccagctcttcttttttatgccggatgaattcttttattttatccatattttcatgttctttcataacgaaatcaaaaacgagtccccatataatataaaccataaaccctgcaaatattatcccccagaagtttgcacttttaatagctattaaaggtgaaaaactttctccaagaactctttcaaaatcaaaaattttcttttcaattaaatatgctaatatgatgtcaaaaataaatgtgactaaaagaagtagaaaaagttttgagtaagaaagaatttttttagttttttgaaacatatgtattaaatagcccaatcccataaacacaaatggaattgtgctaacaaaaataacttccagccaaccatcttttactgctttacttaaggcatttgcatcaaaaattgctgcggttaaactatccgtctcaaaatctttaaaaaaagcagagtatgaagcagatatataaaacacaaataaatatattgttataggtagtagtattaataaacctatataaaattgtgctttggggcgtttactaatatctatatcatacttttccggattctgctttacattaataatttcaaatttaaattcttcaatattcttactaacttcgtctttttgctcttcgtaaattactaaagcagtttcacgcttttttagctcagttctttgcttttcctgttcttccttataaggttgtttaagcattttctgctcatttaactgtttcctgcataggtcctcaaaagcgaaataaaggtttcttaaacaaactccaaatgtaactggctccccttttgcttctttagaggcactatacccactttggtaataggtaattcttgtctgctctctggcattttcagtactctcttcttcagtaataggctcgctattatccttgagtttaaataagtttttaattgaatccattttgttataggtttatttcattgattatatcttctttttttaaaccctttttagcacaatccagtaaataatctgctaaagctgtaatgttcgcgtcaagaaactcgaactttttacagtattttttaagtgttatgtactcatcatctgttactttttcatctgcccaaatcattactgctaaatcatataaatattctattttttgctctaatgactcgggaactgaagaatcgtgtgatgggtttaagagaatatcatttagctgttctttagtcagtcctctttcttcggcaaacttgtacagcatctgcatttccaaaacatcaaaattatcatctgaaaatgccatttgatacagtcttagaaaatgactttttaactcagtagaaatcatagttgtatggttaatattaataataatatacttgtagctaaaaagaacatgaacagtaaaaggcaaccgcttttacgtgatgatttagaaaagttttttctataagttaagcccggaatacctgaccttatagagtaaccttttgagctaattgtacctctctttgttctgtaacttggagatattccggacttgctaatattaataccaagccctttacctatttttatccttttttgaaatcgtaatcccattttttatcactgtttttcttgtacaataatttcccaattaccaacagcattaacatataagtaataatcaccttctggtttttgaattgtactctggctttcttcttgtaaactctgtgtaagtacctccggaataccaccttcagtcattacatcgtgtcctttttcaacaacataaaatgaaaaggcaccaccatatgagtttccagcgttatatttatacaaaactttagcgtctgcccctgtaaggtaaaacgattctgattttttcattccattacctttaaaagtgaatacatctttataaactaattccttttcaggttctggttctttagatatttgagtttcggttgaagagaataccgcaataagaatattaataccaattactgctattattatgactcctataacttttaaaacttttttcataattgtgatattttttaattgaatataaaactgagtggaaaagcatgaatatatatctcataatattattttggaggttgttgtctatgaggtttaacaggtaatgttttaggaccaggtttaggcttgtttgggttaggtctcggcacaggcgaaggtgttgaccttttatgaggcttaacgggtacagtcttttttgccatatttatatttatttcggttttcttcttgtatgcgggcgaacataagtgccatcttttctgtaatagccttttacatgcacagtaccgcctgaactatgataacttgatgatttatttttcttttttttgagtactttaaaagtacccttgtattcatattttttcttattcttaagccgtgggatataagcccagccaattgtatcgttatattgtattttataatacatggctttaggtttttctttaataataacctgcttacccttaggtattacggttatttgctctcctccattagacttattaaaatatattggtgttggcgcatctgtttcacacatatagtaatttgtgtaacaagaacttaatacaagcggtagtagtaaaagaaatagtaattttgttttcataactttattagtttggtcaaacttaggtctattaaaaaataaagccttacgggattccgtaaggcttttaaatttgtgaaagcttctatgcgtatcggattaatttccatgtaacagctttatctctgtatggaggcattgtgttgttctcagctataggagctgtggttgagggagttccgactacttcccaatcacctgattcagggcatttttcccctgtctttgctgttgtacctaatggttttttggccatattgatttaatttaaagattaataatactccaaaattaaagtcaatacttatctaaacattacggcaaacctcattctaaaaattattttacttgaacaatttaagccccgacaaattcgtctgctattacagctattcccttgtcaagtacaacatttagttttttacaaacagtttttaaatcgttcattgcctgagtagaagattttcttgaatgccacaaagtagtattaggcagataatatctgtgtacaccattcttgtacttaaaattatctgaatacccaagactctctaattctgttttcacttgtgtatgtgatttgtttatatcatacgatatcaacacatagcctactgtattacccattgctttaaaatttaaaattaataataaggcaaacttaatggctatcgtttaccactccttacggacttcctcaatgtgaataaaatatattcatttattgccggataatatccaaaaagtgtttttggactctaaaaagcagccttattgagtcttgtataaagagaaattacgctaattgtatagtaatagtaattagggaaagagtgctgcttacaatgagtagattatttattgctttgaagttgatgtttatattaaccccatatcctttactatagtaataaggtgggttgtgttaacagcctgaaactgatcttttagtttatttattctcttttctatagaacttaagctggagggagatacattttgttccttaaataaaatgctaatttggtcttgagacatgcctttagataattccgttattattcgtatatcataatcagatatttccaaatcgagtttttcgcttaatgcattttttactgctggagaaaggtattgctttttggcataattatctataattgctatagctaattcatccaaacccttacgccctttacaaacataagcgttgatattaaaattaaggaaaaggcttcttactttttgcagcctgtcatcaattgaaaaaacaattatattaatatcaattgattctttataaagtgcttcaacaagcgcctctcccgaaactaatttttgttccctatggtcttttttaaaggataaatcagttataagaagctgatagggttggttatctttaatgcctttttttatttttaaataagcatcatcacaatattgaacctgctctatagtatgtatacctaaattagttaaaacaccttttaccccttgatttatgctgcccaaatcgtcagctactattactctagaaaacatatattacacttttatattgactttaaagccattattaacttctgattcaaatgtaacagtcccgttaattgtttttatacggttttccacatttagcaaacctccggttttattcagtgtacaccctttaccattatctttatagtctattgctaatttgttaccttcctgattaaacttaatcactacatgagtggcattactatgctttttcatatttatcattaactcttgcagtactctgtaagtagtatttttcttaatttcggatagctgattccaatttactttattaaaattttgcgtaatcactgtagtgctatcgtttttgaaacttaataacatatcatataaacagtcattaaatttctcctttaaatcgatggtgttattttccctggatatatctcttgttttattataaatactttctaagttatctaaaacattataattatctgattgtatttttgacataacatgatatacgtcgttagcgacctcatcatggattttttttgatattcttatttctgtattataaacttgtaatagtttttctcttttgtacctcgcccttagatacaaaattaataacacccctgacaaaagaattgaaatacccaataataaaaatatctgggctcttcttttttctttttcacttaaaagctcgttttcatctgccctgcgcttttctttagtgaaatcatatttcatggaagcatttctgttttgtatttcatttttagtctttttattattctcatccaatcttatataggttaagactttttcatcatcataaagctttaacgtccgggctagtgcatcttcaataaagttgctgctttttatttcttctgctatttcataggctctatcagcatatgcgattgctgaattcttatcaccttcctctttatagtaatcggaaaggtgagctaaactgctgtatgaccctttagtatctccgatttttaatctataatcgagtgatttttttaagtttgttattccttctggcatcgctaattttgactgaacaaatcctaaattatctaaggcgaaggttattagaagggtatcttgtatctccaaaccttttttataaacttttgaaagttcagctatagctttgtcatattgtttaaggtctctatatatatttgctttattgtttaatatagtaaggctgtcattaagttttgttgaaaaggataaggctttattatagtactttagagccatatttttattatcaaaacctctatatatctttcctaactgattataaattcctactctagcttctctcgattgtggcgagtcttttaaatcatccagtaactttagtgccgacacagaagtttcctcactgtcttgcaaagccccccaattaaattgaattattgctagtagcctcatattatttattacaagcaaagtatcattattaattaatggtttttgagtatttctcttgtaaaaagaataagcatcaattaaatcattactatcggagggattaattactttatcatagtagtatctcaagctatcgttgtttgtttgctgtgagtataagtattgtggatttatgtaataaatagctattacaaaataaaaaaagagggagaagtgctttagttctttcatccctctaaattaaacaatctttttatatccgataattaaatattatcccttcaaccccgtatcgattggaggcggtggaggtggtggggggatatctccatcttcaccacagcaatcatctgcccttaccgcatcatttttcacatctgttaaatcctcagtagtacacgaagaaaatgtgatattgaggaaaaccgtaagcaataataaatatatttttttcattttgactcattaaaaattagacactggtgtagctgtccggtaatttttattccggatatctttcgagatgctacacgttattattgaaaaaaggagacgtctctccttgcgggaagtaaggagctacagataaagaagtataactgcttcccgtgtgttacacagctttatcttaaagctcccatagaatttaatttcgcaaaccttattgcgtgtaaggccataattaattctgagacaaatgaaataactttatgctttgcgcattggaaatacaattgaaaagaaatagaaaattttgagaaattattttcgataaagtttctaaaaaattaatgttcaataaagtatatttaaattatgcatagaaacttgataattaaggcttttgaaaagatgaaagccgaacaggaaaaagaaaatggtatccccctctctactacagccactgcaaagctgctgtctgactttatttatgaaaatcaaaagtttcagtttggggaaagaagtttagttgattgctataaatcagcaaatgatgaaagtgaggaagaagtaatgattagacagccaaaagttgtagaggctttgtgttcttatttaggttatgatagttttaaaagttttaaagatgctaatgaaggtggtactactataaaggaagactttactgaagaatcaaaaacattactaactattataaaagaaaacaaaacattatctgtaataacgactgttattattagtagtataattatagttgtgctgcttattcatttttctaataatgagcgttggatggtatggcagaatgataggtatgttgaagtaaatttcgacttggaaaaatataatttttcccaattaaaattatataatgaataccgagttgataacctcagaaaagtatccgttgattgtaataccgaattttttgatgcaaacggggaagttaaaatttggtacggaaaaaatgcaaaaaaagagttggagtattttacttcgtatgggttacaccctgaaacagggaaaacattaaaaccaataaccagctatatgattaataagtatgtatgtcccgaaatataaaatttatacgtattgtatagggttaaaaaaatgcgatccgaagaccgcattgaatgttttcacaacggaataatccttattgcgaattgttttcaaaattgtaatacaattatacaaaatatttttttgattacaactttatttttacgaatatctaaaaaatacctaataatagggatgttctttttagaatacttcattacttttaacaaataaataaatcataattatgacctctttaaataatatgaaaacaattcacaacatcacattgacatgtcatgttacgttgcataaaaatgcaaattaagtatattaactcgggatcaatacaagaatggtttggacccacttaaaacctgttcgtcaacagagaatcaaaatttacattacaaatatataaaaataataaaatatatcaatgtgatgagttttttatttttttaaatttgtagaaataccgttattaagatgaaaaaaatattaggacttgatttaggttcagcatccataggttgggcatttgtgcatgaagacgatatcgacaaaaaatctgaaattataaacaccggagttcgtattgtaccgctaactacagaggaagaatcggactttaaaaaaggaaatacaatttctatcaatgccgacagaacactgaaacgcggagcaaggagaaacttgcaacgttttaaactaagacgtgaagcacttcttgaaatttttaaagaagcgggatttataccgaaagattaccagtatgccgaagatggaaataatactactttttctacttatgaagtaagagcaaaagcagcaaccgagatgatttcaaaagaggaattagtcaaggtactcctaatgattaataaaaaacgaggctataaaagcagccgtaaagcaaaatcggaagatgatggccaggcaattgacggcatggcaatagccaaagaattgtacaacaaaaacatcactcctggtcagtgggtatatgccagtctatccgaaggtggtaactatatccctgatttttaccactcagaccttaccagcgaatttgaaaaaattgtgcatttccaaaatcaattttatcctgaaatttttaatgatgagttgctggaggttataaaaggaatcccaagaaataaaacactagaatactttactaaaacacttaatatagaacttgccgaaaataaaggaagccgtgagcaaataagactacaacaatatgaatggcgagctaaagcattagagcagcaattaactcaacaagaagtggcttatatactaacagaggttaataatcaaattaatggttcaagcggttatttaggagctataagcgaccgtagtaaaaagttgtattttaacaaccttaccgtaggtcagtatttataccaacaacttgtagaaaattcgcataacagtctgaaaaaccaagtgttttaccgtcaggattatatggatgagtttgacaggatatgggaaacacaatcaaagcatcataaagaactcaccgaagcacttagaaaagaagttagggatattactattttttaccaaaggcgtttaaaatcgcaaaaacatttaataagtcattgcgaatttgaaaagcaacacagggtaataccaaaatcatctccactatttcaggagtttaggatatggcaaaatattaatgccatcgttattaaaaatactgaaacaaaagaaacattgcttttagacgaggatgctaaaaatagccttagtgagactctaaactttaaagataatttaaccgatctacagcttcttaaattctttaatttggataaaagaatgcatgaggttaactttaaaaaaattgaaggtaacagaactaatacagcattatataaagcttttgaaactattttacggcaagaggggcaagataatcttgacttctctaaaatggatgctgaggatataaagagtacaacagcgtcattatttaaagacctgaatattgatacccgtattttagaatttaatgccgagctacaaggcgatgcttttgacaaacagccgtattaccagttatggcatctactctattcggcagaagatgataccaaactaaaaaaaacattacaagacaagtttggctttaagccggagcatacacaccatattgctaatatagatctgcaagctgattatgcaaaccttagcgctaaagctataaaaaagattttaccctatttaaaagatgggctcatttatgataaagcctgtgatagggcaggctataaccattcttcattattaacaaaggaagagaatgaaaacaggcatctgaaagaaaaacttcaacttttaaaaaagaacagtcttcgcaatcctgtggttgagaaaattcttaaccaaatgataaacgttgttaatgctattattgccgacccaacgatgggtacgcccgatgagatacgggtagagttagctcgcgagcttaaagcgaacagcgaacagcgtggggaaattaccagagcaataaataaagcaaccaaggaacatgaagaaataagaaaattactaaaatcggaatatggcttacgaagagtaacacgaaatgatattatctgctataaactatggaaagaaactaatgggatatcactttacacaggtaagtgtatagaaccatctaaacttttcacgaaagagtatgatattgagcacattatacctaaatcacggttatttgacgacagtttctccaataaaacattgtgtgaaagacagtttaatattgataaaagtaatcgtacggcattttctatctgtcaggaaaagcataatgaatttgacttcgaacagtaccaaagccgggttaatgagctttttaaagcagggaagataaaatatacgaagtataaaaagcttttaatgcctgacaatgaaatcccggaagggtttattgaaagacagaaaagagaaacacaatatattgccaaaaaagctaaagaattactgctggaagtttcaagaaacgtaactactactattggcagtattaccgataggttgcgtgaagactggcaattgattgagataatgaaagaacttaattgggaaaaataccacaaattgggactaaccagagaagaagaaggcaaaaatggggagcgtttacgaaaaataaacgactggacaaaacgtaacgaccaccgccatcacgctatggatgccctaacagtagcttttacaaaagacgtttatattcagtatttaagtaatcttaatgccaaaaataaggatgataaaaaggctaaaaacatattgggtattgagaaaaaatatttagcgaaagataagggcaaactaaaatttaaatcgcccattccaaacttcagggaagaagcaaaaaaacatttagaaaatattattgtttcgtataaagccaaaaataaagtagttactaaaaacaagaatgttactaaaacagccaaaggaacaaaaacaaaagagcagcttactcctcgcggacaactgcataaagaaaccgtttatggtaaaataacacaatatgttactaaacaagaaaaagtaaatgtaaactttatcgccgaggttatcaatacagtagtaaaaaaagactatcgtgatgctttgctagagcgcttagcagcctatgataacgatcctaaaaaagcttttacaggtaaaaattcactggctaaaaatcccgtttattttcacaataacactcaagttgtaccggacaaggtagcaatatcagtacccatagaggtatatactatacggaaagaggttactcctgataactttaaagatgagaaaagtatcaataaagtaattgatgctaaagtaagagaactgcttttaaaccgactacatgaatatggcgatgccaaaaaggctttttctaatcttgatgaaaaccctatttggttaaaatattatgaaagtgagaatgaaaagaaaaaaaatattagtataaaacgagttactataagcggtataagtaatgcagaggcattacacactaaaaaagaccataatggcaacgaaattttagataagaatggtaagcccatccctgctgattttgtaagtacaggtaacaatcatcacgttgctgtttacagggatgaaaaagggaatttgcaagaagaggtagtttctttttacgaggccgtaatgcgcaaaaatttaggacttcctattattaataaaaatcataaaaatggctgggagtttttatttaccatgaaacaaaatgagttttttgttttcccaaatactgaaactggttttgaccctgcagctattgatctacttgatcctaaaaacagggagataatcagtcctaatttgtttagagtacaaaaaatagctacaaaaaactatatgttcagacatcatttagaaactacagttgaagagaaaaaagaattaaaagaaatagtatataaaaatattagaagtacttcacccttattgaatattgtaaaagtaagagctaatcatttaggacaaatagtacaaataggtgaatattaatccttcacgatatgataaagcgtactctgttttttggcaattctgcttatttaagcactaaaaatgaacaacttgtagttacctatcctgatagcgaagaaactaaaactgttcctatcgaagatattggtatgctggtacttgaaaatcagcaaattactataactaacggtcttcttgaaaagctgatttacaataaagcagctattataaattgtaatcagcagcatatgccaatagggcttcttatgcctctcagcgggcatacggaacagtcagaacgctttaaaagtcaaattaacgcatcactacccttaaagaagaatttgtggcaacaaacagtagcttcaaaaattttaaatcaggcaggattattacaagagcgtggcacgcccattagaaaaatgcagcaatgggcaaaaaatgtaacttcaggtgacacacttaaccacgaagcgagagcagcagtttattattggcaaaatttatttgatatagaaaattttacaagacatcaaaatggagtccctcccaataatttacttaattatggctatgccatattacgaggtattacagcaagagctttagttagttcggggatgctaccaactttagggatatttcatagaaataaatacaatgcttattgtcttgctgatgacattatggaaccatatcgaccatttgtagatttaattgtttgccatattttagaaaacgaggacaattttgaagaactaaccattgatataaaaaagcacctgttaagcattgctgctatagatgttactattgatggcaaaaaaagccctttaatggtagccatgagccgaactacaaattcattgcatgagtgttttgaaggatcttcaaggaaaattttatatcctgtatatgtatgatgatagttattacacacgtttaaaccagtatagaagtttgtgggttttagtattttttgatttaccgacagaaacacgaaaagataggaagatagccacttcattcagaaaaagactcttggatgatggtttctcgatgtttcaattttctatttatatgcgcttttgtgccagtagagaaaatgctgaagtgcatacaaaacgagtacgtggtaatttacctcctcatggtaaagtgggcgttatgcaaataacagataagcaatttgggatgatggaaattttttatggtaagaaatctgttgatactgaaaagccttcgcaacaattagaattattttaaatcaggattaaaaaagctatttccttctgaaaggatatcaaaaacaacccatgcttttttatttccaaaaagacatcataactaccaacataccagttttttatagttcggtatgttgggaatcatgagtaaaagtacaattttgaaagcaattcacaacaccatttaggtcgcacccaaccgtaaacaggttgggaatcatgagtaaaagtacaattttgaaagcaattcacaacagtaacgtattggttgctcgtatcgcttcggttgggaatcatgagtaaaagtacaattttgaaagcaattcacaactaccagtcagcttctatttgttcgggcgagttgggaatcatgagtaaaagtacaattttgaaagcaattcacaactttaaatctcttctcgtgacacgtgggaggttgggaatcatgagtaaaagtacaattttgaaagcaattcacaaccctcgcaatcatacatatacccttttccttgttgggaatcatgagtaaaagtacaattttgaaagcaattcacaactatagagtagttaataatttcggtttgtgtgttgggaatcatgagtaaaagtacaattttgaaagcaattcacaaccattacgatgtttccaagcatctttacattgttgggaatcatgagtaaaagtacaattttgaaagcaattcacaacatgtattcagtagtaattaccctttatatggttgggaatcatgagtaaaagtacaattttgaaagcaattcacaacatgatgcaggcagcagccattaacgctaaggttgggaatcatgagtaaaagtacaattttgaaagcaattcacaacaagtcaacgctgcggtaacaccctgcgcgggttgggaatcatgagtaaaagtacaattttgaaagcaattcacaactactctttacccaccgatgtaaggtaaaacgttgggaatcatgagtaaaagtacaattttgaaagcaattcacaactcgtaaaattccgaaggcacattgttttttgttgggaatcatgagtaaaagtacaattttgaaagcaattcacaacaagcccgtaggattaataatacgccttctagttgggaatcatgagtaaaagtacaattttgaaagcaattcacaactcatttaatgtttctgaactaacatttaaggttgggaatcatgagtaaaagtacaattttgaaagcaattcacaactgtatctcccgtattcccattgtaatcaggttgggaatcatgagtaaaagtacaattttgaaagcaattcacaacctataaggtatggatacaaagaaacccgatgttgggaatcatgagtaaaagtacaattttgaaagcaattcacaactgatatattgttattagtcatagccagcaggttgggaatcatgagtaaaagtacaattttgaaagcaattcacaactagtcctatccaagtctttaccattttttggttgggaatcatgagtaaaagtacaattttgaaagcaattcacaacacttgtccttgtgctgggttaatatatgtgttgggaatcatgagtaaaagtacaattttgaaagcaattcacaacgagtaagccttttctttttttatagtttaggttgggaatcatgagtaaaagtacaattttgaaagcaattcacaacttgctgttatcgcgtttacaccgttttctagttgggaatcatgagtaaaagtacaattttgaaagcaattcacaacatttttcgtcttgcttttatatctactttgttgggaatcatgagtaaaagtacaatttt

SEQ ID NO: 1561 - DNA, 17031 bp, synthetic construct
  source 1..17031: mol_type = other DNA
  misc_feature 1..17031: note = Synthetic
aagttcacttagcgccattaaaaaaagtagaaggtttagatttagactttttagcaaaacaaactccaggtttctctggtgctgatattgccaacttgtgtaatgaagcagcacttattgcagcacgttataacaaaactgctgtagacaagcaagatttcttagatgctgttgacagaattgttggtggattagaaaagaaaaataaaattatctctcctgatgagaaaaaagcgattgctattcacgaagcaggacacgcaactgtaagttggatgttagagcatgctgcaccattaattaaagtaacaattgttcctagaggtcaaagtttaggtgctgcatggtacttacccgaagagcgtcaaattgttcgtcctgatcaaatgctagacgaaatgtgtgctactatgggtggaagagctgctgaaaaagtaacttttgaccgtatttctactggtgcattgagtgatttagaaaaagtaaccaaacaagcgagagcgatggtaactatttatggattgaatgacaaaataggaaacgttacttattacgactcaacaggtcaaagtgagtataacttatctaaaccatattctgaagaaacagcaaaagttatagacactgagatttcattacttattgaaggtcagtaccaaagagcgattgcaattctagaagagaacaaagataaattaaatcaattagctgatatcttaatcgaaaaagaagtaatctttaaagatgatctagaagctatttttggaaaacgaacttttgatgacaatctagaagaagtagtgtcttaaaaaatacattataatttaaatatttataaaatcttaattcaaaagtctcttttgaattaagatttttttatctttggacgtttcaaataatatataaagtaccttcaggatatatgagtctttttagaaaatttttcggttctagtagttcggcttcagatgaggaaagagaaagagaagaacaagaaacttccacttttaataacatgtctatagatgagcaatttatctatcattttaaaaagaacggtggtaaatttttatattgtgaaaacattgaagaattaaaagaacagtttgaaaatatcttagcagagaatgattggtttgaaagccaagtcctatgctatgatccaaagttgtatggtttactagacgaaaacaaacttacctacggaatggcatctaatcctaagtttctttttactagttgcgaaagcttaattgctgaagaaggttctatacttttttcatcaaagcaaattaagcaacacaaaccaaacgaattacccacaaacattgtagtttatgctactacaagccaaatgcttgctattaagagcgatggccttactgctataaaaaagaaatacgaaagggattaccctaccaatataactgcaataaaatattttgaaaaagcaaaagaggaagactttactcagtacggtagctcccctaagaatctttatttattgcttttagaagacctttagaatgaatgaaactttaaagagatctatatcaggagctgtatatattattttactaatcgcttctattctatattcaactgatagcttttttgctcttttcggggcgttcttacttatagcaacttatgaattttgtaatttagtacaaatcaataaaattattcctatactgctagccgcagtttcttttggattgttttatatgattagcttcgctactagcagtagtcctttgtttgaatttcgctttagcaaaacatttgatttaacactattgttttcaactttgtttgtatttataaaatgcatgcactttcttttcgataataaagccataaagattgattccttttctaaatatgtctatttaataggatacatcattcttccttttattattatcactaaaatcccttttggaaaagacggatacaatccaaaaatactaataagcatctttattcttatttggacaaatgacacctttgcctatattgtgggtaagtctattggaaaaacaaagttatttgaacgcatttctcctaaaaaaactatagaaggctttgtaggcggagtattttttgcagtagtagtaagttatttcatttctaagtattacatcgaaattgcagaaggaaacatctatatttggatagttattgccataattgttggtgtttttggaacaattggtgatttaatcgaatccaaatttaaaagagtagctggtgtaaaagacagcggaaaaataatgccaggccacggaggcgtactagatcgactagatagtgttatatttgtagcaccaattgtatttttattttatcaaattttaaattatgtttcataaagaaggaaccaagactatcttattaggaattatttttatggtggttgcactattaatttctgattatttcattgacaataattggcttaaaatggcaattcaaatcggtgcgctgttaattttgattatcattttacaatttttcagaaatccgaaaagagtagcgataataaatgagaaccaaattttagcacctgtagatggtaaagttgtggtaattgaagaggtttatgaaggagaatactttaaagacaaacgcattcaggtttctattttcatgtctcctataaatgtacacgttactcgttacgcaataagcggacttgtaaaattcagtaaataccatcctggtaaatttttggttgcttggcacccaaaagcaagtgaagaaaacgaaagaactactgtagtggttgaaaacaatacttttggcgctattttataccgtcaaatagctggtgcattagcgcgtcgtattgtgaattacgctcaggaaggaatgcaagttgttcaaggtactgatgccggttttattaaatttggttcacgagttgatatctttttgccattaggtacacccattgatgtggtacttaaccaaaaagccattggtggaaaaacaattattgcaactaaaaaataatgaatgaaatagatttaaacactcaatttcaagaggccgtaaatagcgcttcattgatgactcaagcatctttaccgcaagatgtgcaactgcgtctctatgcttattacaaacaggctactttgggtactttagaaccaagacagacatctaactatcatttgagagatgcgtttaaaactaatgcatggatgcaaataagtcacctatctgccaatgaagctaaagagcattacatagacttaataaattccattttaaaaaaatagcactatccatgaaaaataatgcttatatattatccgctttagcaactatgactgttttattttcttgtcaagacaaaaaactaacagaagtagttgaagttccattgcccactgctcaagaaaaagtatctataggttttcctgaagatgtaaaagcagcgcaaggttcttttcaggtagaaaaattggaatataattatgacgccttagctcctactgtttctccactaactttagaaacacactattctaaacattatttaacctacactaatgacttaaacaaagccattgcaggaacgccatatgaaaatcagtctatagaaaacattctagcaaaattagacttaaaagacaccgaattaaggaataacgctggtggttattacaaccatagtttgtactggaaatcaatggcacccgatacaggtggtgttgcaattgatacgcttgcaggagtaattaaaagagattttggttcttttagtaactttgaaaatgcttttaaaaacgaagctacgagtcagtttggttctgcttggacgtttttagtcgttgataaatacggaaaattaaaaataactagcactcaaaatcaagacaatcccttaatgagaaatgctgttgttcctggaacacctattctagctttagatttgtgggagcatgcttattatttaggataccaataccgccgaaaaaactatattgattctttctttacggtaatcaactgggaaaaaatcaatgctaattatgaagccgcaatgagaaagaaatattaaacaataattttatatttaaaaatgctgatagaaacctcaaagaggaatttatcagcatttttttttgtatttataaattctagcttagtattattggttcggttacactattttaatagctcgtaattgtgctttattatgaattataactttctaaatttactataaaattcaaaactacactatactccaattttatctaagcgttaaaacaaaatcaaaaacaacactacaacgtgagagttgggtttattgttgataagttatcccgctaactaagagtaggatgctggtctaaaagcttttaaacctataaataaatgctaatatcgattaggattgtttcctttttcttaaatttgacaaaaaattaatccattgaataaatcactattcttcataggctgcttattgctgatttttagtactaaatcaactttggcgcaagcaccaaaaaaaattattgttgagcattctgattttgctgatattaatcaagtcgaaaatccagatgcttttttactgactggaaatgtacgtgttaatcatgacggaattgtattaacatgtaataaagcctattattttcaaaaagagaattacatcaaagcttttggaaatgtacaaatagtacaaggagatactttatttttaaatagtaaatatgccgaatataacggaaatgttaaaaaagcatttgccgctggtgaagcgtatatgagttctccagatgcaactttggtcacagatactattaattttgatcgaaatgtacaacaagtgtattacaacactcaaggaaccatcacgaataaagacaatacgttgcgttctaaatcaggaagatattacgtagccgaaaagaaatttcagttcttaacagccgttaccataacaaatcctcaatatgtaataaaatcgaatcatttagattactatagtaattccgggcactcttatctctttggtccatcaacaattactagtaaaaacaattatatttataccgaaaaaggcttttacgacaccaagaaaaatctagcacatttccttaggaaatcctatataaaatacgatgaccgactcatagaaggtgatagtttgtactacgatcgcaacagagaatttgcctcagcaacacgtaatgtaaaaattacagactcaatcaatcgaggtgtaattaaaggacattacggagaagtttacaaaaagaaagactctatgtttgtgactaaacgtgcattagcaattaactttgtcgataacgattctgtctacatacacggaaaaaaactcatggtaactggaaaagaaggcgatagaataattagagcttttaataatgttcggtttttaaagaaagacatgagcggaaaatgtgattcaatttattcgaactcaagaattgccttgacaaaattgataggaaatcctgtgttatggaatggtgacaaccagattactggtgatgtaatgcatttaataggaaacaataccacccgaaaattagattcgctaaaagtactaaacaacacctttttagtctctcgggacaccttgggaaccggttataatcaggtcaaggggctcaatttatttggtaaatttaacgatggtaaactccgtgatgttgacattataaaaaatgccgaagtaatttattacatgcgtaatgatagtaacgaactcattggaatcaataaaaatgtaagtagtaaaattaatcttattctcgaaaataatgctatcgaaaccatcacattttatgaccaagttgatggcgatatttatccagaaaaagagttacccgaaaatgcccgaaaattacgcggacttgtctggcgtggtgaggagcgcatttttactaaagaagaccttttttctgctgaagaaaatgagtataacgaaaagatgatttctgctgcaaaaaaagacgatgctaaagaaaacgttcctatgaaaatcaggaaagaaactttagattatgacaaaaagaagccgaaaaagaaacccaaaaagaaatagttttttattaattgtaatttctgatttacagtaaaaagaactaattttaatatacaaaagataccatacattgaacgaagattttataaaataccaagcacaaacatcaccatatccattagggatggaggtttcatacgctaaaggctcctatatttatgacactaatgacaaaaaatatttagattttgtcgcaggtgtttcagcttgtactttagggcatcaacccgcaagagtcaaccaagccataaaggatcaattagataaatattcacacgtgatggtttatggagagtattctcaaagcccagcagttgcctattgtaaattaatggcctcactcctaccagctccacttgacaaaacgtacttagtaaattcaggtactgaagcaattgaaggcgctctaaaattagctcgaagagtaactggtcgcagtcaattaatttcttgtcacaatgcatatcacgggaacaccatgggttctttgagcgttatggggtttgaagaacgcaaacaagtttttcgtccgcttattcctgacgtagcatttattacctttaataatgaggctgatttagataaaataacgactaaaacagctggggttttattagaaaccattcaaggaggcgctggttttattcagccagaaaatgattttctaaaaaaagtaagagcccgttgtaacgaagtaggtgccattatgattcttgatgaaatccaacctggttttggaagaacaggaaaattatttggatttcaaaactacgatgttgttccagatatagtggttatgggaaaaggaatgggaggcggtatgcccgtaggagcttttacagcttcatcagcaatgatggatctattgagtgacaacccaaaactgggtcacataacaacctttggtggtcatcctgtcattgcgtcagcttgcttagctactttgcaagaaataactgaaaccgatttaatgcaacagacgttagagaaggaaaaattgtaccgatcacttttggtacatcctttgataaaggaagtgagaggaaaagggttaatgcttgccgttatgaccgaaagtgcagcaataacaaatgaagtgattttaaaatgtcaagacaaaggacttatcttattctggttactatttgagggatgcgcaataagaatcacaccaccattaacaatttctaacgatgaaattaaggaaggatgtgccataatgaaggaagttatggatgaagttctactatcaactacccattaaatacaataattactagtagcgattaaacagtactgtgtattgttaattaaattgttcacaacaattctaatttttcttcacatcaatagtaatgatacctaattttaaataggtcaaattcaaaaaaacaaagcatgcaattaagcaacgaagaagaagactataacttatcattatccaaatttgagtctatgttgaaaaccaacaaagtactcttttttgactcggaagaatttgaagaaattatacttcattatctcgatatgggtaaggcggctttagccaaaaaagcattaaaattaggactagatcaacacccaaaatcaactggtttaaaactagttcaggtagagatgctcgtatttgacgataaattagaaatcgccgaaaaattactcaatgaactgtatgcaattgagcctaataatgaagagatatacatacaaaaagccaacatttattctaaaagagaccaacatgaaaaagcggttgaattcttaaaaatagcccttacttatactgatgattatgctgatgtctataacttaattggtatggaatatctttttatggacaatctagagcttgcaaaagagagtttcataaaatgtctagaggaagatcttgaagatcaatcggctttgtataatgtggtgtattgttttgaatttttagatcaaaatctagaggcgataacgtatttaaataaatacattgataaaaatccctatagcgaaattgcttggcatcaagtgggacgcttgtattatgatttaaaagattatgaaaatgccattcgcgcatttgattatgcaaccttaattgatgatgagtttttaggcgccttcatggaaaaagccaaagcttatgaacgtctaaaaagatacgaagaagcaattgaaagctacaatagaaccatcgcgctagatgacgctacctcttatgcgctgttgcgaataggaaaatgtcacgaacgtttaggaaatactgttttagcattaaaatattataatgaaacggtacacgaagacccccttttagacaaaggttggattgcgataactgatttttacttgcgtcaaaagaattaccaaaaagccttattttttgtcaataaagcattagcaatcgacaatcaaaatcgtttgtactggaagcgctatgctacaatcaacaaggaaatgaatttctttgaggaagctgaatttggttttagaaaagcagttgagtttggagatactgcattagacacttggttattttgggttgatattttacagtttttaggtgagtttgatagcggaatacaaacattattgcaagcatcagaatattttcctgaagaaaacgaaattgaataccgtttagctgggttgtattttatgacccaagaaaataccaaggctaaatttcatttaagcaatggattacgtctaaaatttgataactatgtattgattgaagacttatttcctgtagtatggacaaaaaaaatcgttcgcaattatatagataaatacaaaaaagaataatggctgtaactaataaaaaacgctttggtttactaggaaaaaatattagttattctttttctaaaggatatttcactgctaaatttgaaaaagatgccgctactaattatagttacgagaattttgacttagacgaaattagtgaatttgagggtttaataaaaaacaatcacgaagaattagctggtatcaatgttacgattccgtataaagaagcagtgatgccttttttagataaattatcaaaaaaagccaaactaataggtgccgtaaacaccatcaaattcactaaaaaaggcaaattaaaaggatacaatactgattattatggttttaaaaaagcaataaaaccattattaaaatcacaccataaaaaagcattgattttaggtactggtggtgcatcgaaaggcgtttgttttgctcttgatgagctaggaataacctatacttttgtgtctaggataaaaaacgaaaacactatttcttatgaagatcttgataaagatacatttgagagtcatacaatagtaattaacgccacaccagtaggcacaagccctgacatagctgcttttccgttaattccgtatgagtttttcacccctcagcacattgcatttgacctaatatataatcccccaataacgcagtttttaagtaaggcttccgccaaaggagcacaaactaaaaatggttatgatatgcttgtctaccaagcagaaaaatcatgggaaatatggaataaataaataattgaaaaatatagaaaaagctttcagtcttgaattagattgaaagctttttttatgctcaataataattatactaaaagcgtccctacgattttttaatactgtagtctattctcaatttttttatgagtttaatatcaaaacttaagtttaaaccaaaaaaaaagcgacccttgtgaggccgctttgaatgttttcacaacggaataatccttattgtgaattgcttcaaaattgtaagacaatattacgataaaatttttaatatccaattacggtttcccgtaaggttcttaattttcttatatttatatttagcaattgataagaataataagaaaatcatcatacaatgaagaaaatattaggattggatttggggacaacctcaataggatggtcatttataaatgaatcagaaaacgaaaatgaaacttcatcaataataaatacaggggttcgtattgtaccactgacttcagacgaagaagctgactttaaaaaagggaatactatttctataaatgctgatagaacattaaaacgtggagcaagaagaggtttacaacgttttaaattacgaagagatgcattgctagacattttttctaaaataaaattcattcccactaattatatttatgctgaaaatggttcaaataatactttttcatcttatcaattacgagcaaaagcagcagttgagaaaataagcaaagaagaattagtacaggttttactaatgctcaacaaaaaaagaggatataaaagtagtcgtaaagcaaaatcagcagatgaaggagatgcaattgacggaatgaaaattgccaaagaaatttttgaaaataagttaactccaggacaatgggtttataattcattatcaaatggaggtaaattcatacctgatttttatcgttctgatttacaaaaagaattagagaaaattattctctttcaaaatcaatttcattcagaacaaatgaatgataaattactacaagatattcaaggaaagactagaacccaaacatcacaatactttacaaactcaattaaaattccacttaccgaaaataaaggttccagagacgaagtaaaactacagcattacaaatggagatccgaagcattgactattgcattggatctaaaaatattagcttacataattactgaaataaataaccaaatcaatcaatcgagtggttatttgggcgctattagtgaccgtagcaaagaattatactttaatcaggaaactgttggacagtacctgtacaaacaattacaagcaaaccatcatagcaaattaaaaaatcaagtattttatcgccaagattatttagatgaatttgaagttatctgggaaacacaacttaaatttcatcctgaattaaccgataaattaaaaacagaggttagagacattacgattttctatcaaagaaaactaaaatcacaaaaacacctagtaagcttttgtgaatttgaaaaaggtcacaaagcgattccaaaatcttctccactatttcaagagtttagaacttggcagaatttgaataacattgttattaagaatgaaataaccaaagaaccttttgtattaaacgaagaattaaaaaacataattgcacaagaactgctgtttaaagaaagtatgaccgatgttcaaatgatggcgttttgtgatttaaaaaaaggaaaccatgctgccaatttcaaaaaaatagaaggcaatagaactaataccaaaatttttaaagcttttgagaaaattttaattctcgaaggttatgatgaattggacttttctaaactaaaagctttagatataaaacaaatttttaaatctgctttttccgatttaggaatcaacacctctattcttgattttgatccgacgattcaaggaaatgattttgataaacaaggttattaccaattttggcacttattatatgctgcagaagatgatgaaaaattgaaagcaactttaaaaaacaaatttggttttaaagaaaaccaccttccttatttactgaatattagtctacaagctgattatggtagtctgagtgccaaagctattaaaaaagtattaccgcacttgatggacggacatctttatgacaaagcatgcttaatgacaggatacaatcattcttcctcactaacaactgaacaaaataatgaaagagttttaaaagacacacttgaattgttaaaaaagaatagtctacgtaatccagtggttgaaaaaatactcaaccaaatgattaatgtaatcaatgcaattattaaagacccagaaatgggaaaaccggatgaaataagagtagaattggctcgtgaattgaaggcaaacaatgagcaacgaagcgatatgacaaaggcgatcaataaaagtacagccgaacatgacaaaataagacaactactccgcaccgaatttggaattgcaagagtaacaagaaacgatattataagatataagttatggaaagagactgagggaatctctatttatacgggcaagacaattgaagcttcgagattatttaccaaagactatgatattgagcatatcattccaaaatcaagattatttgatgatagtttttcaaacaaaacaatttgtgagcgccaattaaatattgataaaagcaataagactgcatattcttttttacaagaaaaactttcgccagaagattttgaccaattcgaaaaaagagtaaaaagtttgtttggtaaaataagtcgtaccaaacaaaataaactattgatggcagacaatgaaatccctgaaggttttattgaacgtcagctaagagaaacccagtacattgctaaaaaagctaaagaaattttactagaagtttctagaaacgtggctgctactattggtagtgttaccgataaattgcgtgacgactgggaattagtagatgtaatgaaagaacttaattgggagaaatacaataaattaggattaacctatgaagaaaaaggcaagaatggagagcgcttatataaaataaaagattggactaaaagaaacgaccaccgccatcatgctatggatgctattactgttgcctttactaaacctgcttacattcaatatttaaacaatttgaatgcaaaaacacaaggggataaaaattctctttccatagttggtattgaatcaaaatatttaaaaagagacaaaaataataagttgcgcttcatccccccgatggagaactttagagaagaagctaaaaagcaacttgaaagtattttgatttcgtacaaagccaaaaacaaagtagtaaccaaaaataaaaatacaaccaaaaaaagtggcggaacgcaaacaaaaatacaattgacgcctagaggtcaattgcataaagaaactgtttatggtaaattacaacgttatgaaaccaaagaagagaaagtaaatgccaactttacagcgtcgcatattgccaaagtagccaataaagcctaccgtgaagcactattaaaacgattggaagagaatgaaaacgatcccaaaaaagcctttacgggtaaaaacactttggtaaagacgcctatctacattagcttaaaagataatattattgttcccgaaaaagtcaaattagtttggttagaagacaattacacgattagaaaagacattacacccgataattttaaggatttaaaaagtattactaaagtaatggactctggattaaaaactattttagaacaccgcttagcagcgtttaacaatgatcctaaaaaagcattttcaaatcttgatgaaaatcctatttggcaaaaccaagaaaaaggaattgctataaaacgggttactattagtggcgtgagtaatgcgcaggctttgcataccaaaaaagaccatttgggcaatgaaattttagatcaacaaggaaaaccaatgcctgtggattttgtaagtactggaaacaatcatcatgtagccatatacagggacgaaaaaggaaatctacaagatgatgtagtttctttctatgatgcggtaactctagcaaaagagggtatgtcagcaataaataaaactcacaagaatggctgggagttcctattttccatgaagcaaaatgagttttttatatttccatctgatggttttaatcctcatgaaatggatttacaaaatcctattaacaataaactgataagtcaaaatttatttcgtatccagaagttttcaaaagtagactatggcaatacatctgttagagattatgtatttagacatcatttagaaactactttgaatgattcaaaagagcttaaaaacatagcttacaaatctttaaaaagcttacctcactttgaagggatagtaaaagtccgaattaaccatttggggaaaattgttcagattggagagtattaataaaacgaatgaattcaataggattgggttttaacccaattgataatataaaaacacaagaagttggctttagccaaaatgattcggctaaagccaatacctataataattaacattttacctctagctaaagctggaggcaattgattgacaatgaatgtcgatttttattaattcaataggattgggttttaacccattcggcacaataaaaacaaatagtgagggctttagccaaaaagagtacaacaataattattgatccatcacattcaataggattgggggagctttggataaaattaatctaatactcttgataaataagcatatttactaaatacaactaattatgtcctacatcaaaacctatattcattttgtttggagtacaaaaaacagatttccctttctggatagtaaagaattgcggcagaaagtatggcttcatattaaagaaaacgccaaagagaaaggaatctttgttgattttgtaaacggatatagtgatcattgtcattgcttggtttctttgggagccgatcaaaccattcaaaaaacaatgcaactaataaaaggcgaatcttctttttggatcaataaaaacaatttgtgtaaaggtcaatttcaatggcaagatgactattttgctgtgtccgtttcagaatctatgattgacagagtgcgcaactatattaaaaaccaagaacaacatcacgccaaacaatcctttcatgaagaatatgaggcgtttattgtaaagtataatttccctaaagagtagattttggctaaagtcaatttataaatatcaatttgttttcttccagctaaagcgggaggcaattcaataggctggagatagtctaaccctaaagtcatttaaaaatggtgacaatataaattttcaataagaatgggtttcaacccattcaacaataaaaacattccaaattggctttagccaaaacatattgcaaatcattaaaataggattattaatttaaaaccaaaaaaatgatcaaacgaacgcttttctttggcaacccagcctatctgagtaccaaaaacgaacaaatagtgatctcttatcctgataaagaacaagagactaaaacagttgcgattgaagatattggtgtcattgtattagaaaatcaacaaataacaatcaccaatggcttacttgaaaaattgactaacaataatgtagcactaattaattgtgaccagtaccatttacctatagggttattaatgccactcaatggtcatacagaacaaagtgagcgctttaaaaatcaaattaatgcttctgtcccactcaaaaaaaacttatggcaacaaacgataagtgctaaaatcatgaaccaagcaggcttgttaaaagaaaaaggaattccgtgtcgaaaaatggaaatttggtcaaaggaagtaacttctggagatgcactcaatcacgaatctcgagccgccgtattttattggcaaaatcttatcacaattgaaaattttactcgaggacaaaaaggcatcccaccaaataatctactcaattacggttatgctattttaagagccataaccgcccgagctattgtaagttcaggcatgttgccaacacttggcattttccatcgcaataaatacaatgcgtattgtcttgctgatgatataatggaaccctatcgtccttatgtagacttaatagtatgtcatataatggaaaccgaagattgttatgataagttgactactgaaatcaagaaacaattattgagtattgctaccattaatgtacttatagatggtaaaaatagtcccttaatggttgctatgagtcgcactacgcactccttacaagaatgttttgagggaacagcaaggaaaattttatacccagcctatagttaaccgcttttgacattagacctataaaacatgcatgatgaacattatacaagactaaatcaatatagaagtttgtggatattagttttttttgacctgcctactgaaacgcgaaaagagcgtaaaattgccagtggatttcgcaagaaattattggacgatggcttttctatgtttcaattttctatctatatgcgtttttgtgctagtagagaaaatgctgaagttcataccaaacgaattaggaatagtttgccagaacatggcaaaataggtgtgatgcaaataaccgacaaacaatttgggatgatggagcttttttatggaaagaaagcggtagaaccagacaaaccttcgcaacaattggagcttttttaaaaattagaattctaaaaaccaacaattgattgacatgcaacactaattaacaatcaattttcactttctaaataaactgataactcacaacatatcaaacgattgaatcgcggtatgttgggaattataagtaaaaatacaattttgaaagcaattcacaacacaagttatctactatgtggcaactaaaaagttgggaattataagtaaaaatacaattttgaaagcaattcacaactgcacttgaaggctgaaaaccattagaacgttgggaattataagtaaaaatacaattttgaaagcaattcacaacatttgaaaagaaaggaggcgatgatgaaatgttgggaattataagtaaaaatacaattttgaaagcaattcacaacacagcgttgtcgatcattttccccgcagggttgggaattataagtaaaaatacaattttgaaagcaattcacaacactgtaaaacttgataatgattacgacatagttgggaattataagtaaaaatacaattttgaaagcaattcacaactaaatcttactttgctataatcagatgtagttgggaattataagtaaaaatacaattttgaaagcaattcacaacttgatctgtataattagtaaacggcacaaagttgggaattataagta

SEQ ID NO: 1562 - DNA, 15470 bp, synthetic construct
  source 1..15470: mol_type = other DNA
  misc_feature 1..15470: note = Synthetic
gtaccaaactacacctgtttcatttacttggatatcggctaccgttggaacatctgcttgacagaaatcttgggtagtatcggttgtagttggtgttggagcatttcctactgtaattattacagcaagtcggatactgctttgacaaccagttacgacatcggttaatgaaccgtaataagttgttcctgttaccaaggcagttgttgctggaatcacggttccgcctgttgctgcagtgtaccagattactcctatttcatttacttggatatcggctaccgttggagcatctgcttgacagaaatcctgggtagtatcggttgtagttggtgttggagcatcgccaacagttatcgttattgctaatctggttgtgctttcgcatccagttactgcatcgattagtgttgcataataagttgttccagttaacaatgcagttgctgctggaactacagttccacccgttgctgcagtataccagattactccagtttcatttacttggatatcggctaccgttgggttatcagcctgacagaaatcttgggtagtatccgtcgtcgttggtgttggagcgtttcctactgttaccgttacggcaagtcggatactgctttcacatcctgttacggcatcggttagagaagcataataggtcgttccacttaccaatgcagttgttactggaactatggttccacctgttgctgcagtgtaccagattactcctgtttcatttacttggatatcggctaccgttggaacatctgcttgacagaaatcttgggtagtatcggttgtagttggtgttggagcgtttcctactgttaccgtcacggcaagtcggatactgctttcacatcctgttacggcatcggttaatgaaccgtaataagttgttgctgttaccaaggcagttgttgctggaactacagttccggctgttgctgctgtgtaccaggttactcctgtttcatttacttggatatcggctaccgttggagcatctgcttgacagaaatcctgggtagtatcggttgtagttggtgttggagcgtcatctacagctaccgtgatcgccaatcttgtatcgctttcacagttattcaaaggatcaaattgtgctgcataatacaccataccgtctacaagtggcgttgtaattggaagtaatagaccaccagttgctacagcataccatcttatattggtttcatttaatacgatagaagccaatgttggagcattgatcacacagaaatcttgggttacgtcagtcgctgtcggtggtgctaaaggattgatttggcactcatcacaaagaagtccgtcgttattatagttgccttcatagaagttatccatgataaagatattggcaaaataattatcaaaatctccatcactcattcctgtatcggaagagtcaggatctgtatcattttcgaaaagccttacaccttccaaacagcaaacacctcctggcaattggaacgtaaacaatagaatctcagtatcctgaacaaaattgatcatagaaccatcactagaaatcgcatggaaatcatttgaaggagaagctcctggtccataaacttgcgaattatccgtccatacacctcctgcaagggttgtaatcactaaaggctgattgcctgcaagagatggtattgccactgtaatttggctaccaccagcaataaagaaattattctgggtgaagtttggtaatgcatatacctcataggtgcacgtcactgggttgaacttgatggtaaactcaacttctggatctaccacacaagctggattcgcaggatttggatcacatggatttaaaggatttgaaccatttaatacttcggttccgtcgtttattccatcgccatcggtgtctggatttgttggatttgtaccaatggcaatttcttcctgattggttaatccgtcgttatcctgatcacaggttgcaaaattaggatttggtacacaaggatcattgtcatcaggatcgacaccttgattgacaccgtccccatcgtcatctacaggaccacatactgtacctgaattattataattttctccataatggtcttctaatgtaaagacattaccaacataattgccaaatcctgctccattcatacctggagctcctgaacctggatcggtggcattgttgaagattctcactcctggtacacaaccagcagctaatgagaaacgaaaaagtaacaattcggctcccgttacaagattaacttgtgaaccgttagttgcaattccatgaaaatcacttgtggttgctgccaaaggagcataaacctgtgaattatctgaccatggaccaccattaactgaaactactgccaacccggtatctggtgctgaagcaggaagtactacggtaatctgactacctccagccaagaagaaattgttctggctgaaatcaggacgagcatatacttcatacaggttggtttcgggtatatactttagggtaaggtctatatcttgcgaatagaaatctatcgcagcaaagaacgttagtcctaggattagcattttaagtataaaacttttcatacgcacttttataaaagttaaaattatcatatcaaacattttgtaaaatggtcatccaattaaggaatctgttctaccaaatcgttataattggcaagtgttccagtattcatcggataggttaccactatattcaaaatgatttgtctatcgttgttagcaccatcatatagtacttttccatccatattaatatctccagaaaaatacccttcggctcctgcataattcaatacattacctgaatttcctgaatgcgaaagcacttgggatccttgtatctgtcggtcattattaaccccatcatatttgattcgacggtcaaaatttgcatttccagctctcatggcattcataccacttatacttacacttggaattccggcagatgttccagaaaggacataaaagtcattgctatccattgttgtataatcaagcgtaacagtattattttctaccgttactgcttcagctatcatggttccgaaatggtttctatgtttgattgctactaggaaattctctggaagattagagattactaatgctccaccatctccagccacgatagttccatcacgacgcaataaagcagatgccgttttaaaaaccgaatgtggagcggcaacttctctaaattctaggaatacccagtctacaattgcagctcctccgcttacgcttaaaactgccgatgttgtcgtttcagcaccacctccatttacatgagtgaacctcatgttgagtgcactactgtaaggttggttgagcggaataagatccaatgttcttaaattatcacgcatcaatccgtttgatgttccgtaaagagccccttgcaacatggcttttaaatttagtgtcacatcacacaggttcgataggtttaccgtaacggctaatcgagttgcactttcacaaccttggtttaccaaaacgccataataggttgttccatttactaatggtgtgtttgctgcaagtgctgttcctccagtagctgctgcataccagattactcctgcttcattcacatctattgagttcaatgttgggttattataagaacagaattgctgtgttgggttgtctgtagttggtgtcgcagcatttccaacagttaccgttacagccaaacgagtagcactttcgcattcgccaattgtttgagaagcatagtaagttgtaccactcacaagagctgtattacctgctactacactaccgccagttgcagcggtaaaccaaacaatccctgcctcattaacttgaatatcattcaccgttgggttatctacaagacaaaaatcttgtgtagtgtcagtagttgttggtgttgtcgcattggctaccgttaccgttacagctagacgagttgcactttcacaacctgaagcaatatctgttagcgaagcataataggtagttccatttactagaggtgtgttattggctacagccgaacctccattggcggcattgtaccatgttactccagcttcattgacttgtatagcgctaacaagtggattcaagataagacaaaattcttgggtagtgtcggttgttgttggagttgcagcatttcctaccgttacggttactgccaaacgtgtagcactttgacagcttcctaaggtttgtgaagcatagtaggttgttccgctaactaaggctgtatttccagctactactgaaccgcctgtagctgcagtataccatgtaatcccagcttgattcacttgaatatcactcactgttggagcatctataagacaaaaatcttgtgtagtatcagtagttgttggagttgtagcatttcctacagttacggttaccgctaaacgtgtagcactttcgcaacctgtaccagcatctgttagcgaagcataataggtagttccgcttgatagagctgttccattggctacaacaactccgccagttgcggcactataccacgttattcccgtttcattaacttggatatcccctaccgttggtgcatcaataaggcaaaaatcttgagtagagtcagtagtagttggcgttggagcgtttcctactgttgccgttacggcaagacgagtagcacttggacatccaccaatggtttgcgaagcataataggtcgttccgcttactatagcggtatttccagcgattaaagctccgcctgttgcagctgtataccaaaccacacctgcttcgtttacttgtaagtcactaacagttggactatctataagacaaaaatcttgagtggtatcagttgttgttggagttgcagcattattcaccgttacggttactgcaagacgtgtagcacttgggcatccgccaatggtttgcgaagcataataagtagtaccgcttactaaagcagaagcatttgccacgaccgatcctcctgttgctgctgtgtaccaaattactccagcttcgttcacttgaatgtttcctacagttggagcatcaataagacagaaatcttgggtagtatcggttgttgttggagttgcagcattaccaactgtggcagtaatggccaaacgtgtagcactttcacaatcatcaataagttcaaattgtgcagcataataggtcgttccagaaaccaaagccgtagtatttagcaatggagttcctccacttgcagctgcataccatctaatattggtttcatttacctgcaaatcggctaaggttggtgcatctatgaggcaaaaatcctgagtcgggtcagtagttgtaggaactgcaacgggatttataagacacggatcacaaatagtaccgccgttattataattccctaagtaaagatcgtttagcgacaaggcattggcgacataattgttaaaatctccgcctcccatgcctgggtcacttgattggggatcggtcgtattgttaaacaaccttactcccgcagcacaacaagagccgcctggaagttcgaaagtaaataacaatagctctacgccagtaacgaaatttactgtagaaccattggttgacaaggcatgaaagtcatttgcaggtaatgctgctggagcatacacctgtgaattatctgaccaaggacctccgttgacatttgttattagaacagaagaattatcaacactactaggaagtaagatggtcacttgactccctcctgccaaaataaaattgttttgtgtaaaatcaggtcttgcatacacctcatagtggcacatggaaggattgaaagttacattaagttcgatttgctgagcatttgcttgctgtattccaaatagcataataaccattaggaaagccttcaggatattttttttcataatttataaaaggttggggttggtggggtaaaacttttttttctctataaattctttaaggcatctgctcaagcagtccgttgtaatttgtcagcaaattgagattcagtggataggttaaaaccgtattcaaaatcagttgcctgtcgttattggcaccatcatacaatacaactccatccatattgatgtctcctgaatagtatccttcagcattggcaaaatttaaaatcaagcccgtattgtttgggtgggatagcacttggctggccgtcatttgtcggtcattggctacgccatcatatttgatacggatatcaaaattggcattaccggagtacaaagccttgttccctcctattgtcgtcatcgacacttgtccagaaaaacctgggtttgaaaacaaatcatcatttgttaatgtggtaaaatccaatgttactgctgcatttgttaccgttacagccgtactagaaagtgcaccaaagtggtttctgtgttttatggcaatcaggaatgttcctggaaggtcaactgttaaagcaccaccatcagcagctactacatcaccgtctctttgcaaaagtgccgatactgttctcactatgttttggttgttggcagcttctctgaactcaaggaaaacccagtccacaattgcatcacctgttccatcgttagcatcaagcacagcttgagtcgtggtttcagttcctcctccatttacatgggtaaagcgttcgtttagtgagctactgtaaggctgtgccaaaggaatcaatcctttcacacgaagatcgtcacgcataagtccaccacctgctccaaaaagagctccttgcaacatcatttttgcggtaacatttgtactacataagtcggcaaggctaacagtgatcgctaatcgaacggtactttcgcaacccgttccggcatcagcgatagctacataataagttgtcgcatttgccaataaagtggttgaaggaagaagatttcctgctgttgcagcatcataataaactaaatctccttcatttacttgtaaactggcaagagttggaagcgtataggaacaaaaatcctgagtagtatcagtagttgttggcgtagcaactgaatttacagtaaccgtaacggctactctagccgattcttcaggacacccaattcttgctgaagcaacataatagattgtagtatttgttaatgatggcgtaacaaatggagcacctgccgctactgtttccaataatgttcctgcagttgcagcatcataccaacgcaattcatttccaacaggagtatcagctaatagtgacgctgtttcgccttcgcaaacttgagcatctgctgtagctggatccgtaatcaacggttgcccaggtgttctggttatgccaaaaaagtcaagattttgcaaggctgacagacttaccaaggatgcaaaacgaacactgatcctatctactggaacacccgggtttacaggaatagtcataatttcatctccttgaagagaaagcaaattcagcgtcaagagtgtacctaaattagaactaaaaacctggtttgctccgttaaagcccgttacagttatgttatttgcaatatttagatcgactaaagtttgagctaatcgaaggcgaacggcatactggtctgaaacatccgaaagcccttcaaagtaaacggtttgttctatagaagctgccacaccaagaatcccttggctcaaagtagaatgagtagcggggttagcatcaatcgcaaattcaggattttcaactcctgccgaagcaagttctagcagatccaaagttattcctgatccgctaaaagaagtgaaagctgctgtaccacaattggcagggtcctctacataataggcttcatacacatcgagtcgacgtatattgaataatcctagaagagatccgatttcattagtaaggcggatgcgatcataaggtgcacttggcgtgatggccaaaaaatactctccagccgcatttgtcactaccctgaggctattgccatcaaagtcagaactgtccgagctttcgccttccagtaccactgtgttcacatttttagcttgcacagtgaattcttgattgccaacaagcactacaccgccgacatctgcaagcaatccaccaaggcccccacctaataggaacggtagcagattgtcgtcggtggctatcttaacatagctggtagtgtttgccgctagaacgtcatcaaatttaatttcaaggtgtcccgagtaggctcctagacctagagctacacctgaacttgccctaattcgggctctcgttgtcatattttcatcaatagcatttgccgagtcgtccacttcactttgtgaagtaatggaggtggcatagattcttgtttgcgcttttacactgagtgtagggagaaacgcaaaaaacaataataataaaagaatcttggatttttggagggtagaattcattaccatagaatacatttttttaaaatttataactcagtttaaggggtaacttgggttatatttttttttgttgggtggggttaaaagaaggaatcttgatgtaaaagtagagcaatatttaggtgtctttgttttttggactatcagaattcgtgaattctactaggtgaaaacaactactaaatcattgataaacagttgttaattaagagataatgatttgtatttttttttgtcagtctattccttatattaaacaggaattctccctaattttttctatattcgtttcattcattgttagttaaaaatggaaactattttcaaaatgcgtttcaataagtttctagtaatgaaatttgcgtaaacaacctaagaagcagatttaaatttttaccattcaagttgaaacaactacaacgttgtagttggagtaaatgagtcgtttttgatagaaattaaataatttaaatagattgattaaacaaaaaactatgacagtaaacattaccccagttttccagtcaattagtgcgatgctaattaataccgatttgaatgccttaggtggttttttaagaaaggtcgatttttttactaatatcctttttaaggtggcagaggaaattccagaagacacctacaagcatgttagtggggccgatcccataacgtgctccttccccgaacattttcaatgtattgcagccgccgtgctgcttgaaaacagtaagttctactttctgctgatctatgtttccctcattgtactatccgttatattattggaacgaattaattataaaaagaaaagccggattcattcactgattgatgatcctaatgctgaatttggaatggagcatcaattgtcaaatggagaaaatattgacccgctagcagaagagtgtgaaaagaaattaatgtcaaacgaggtgaaggaagaattgctgaaaaagcttattcactttgaagaaggtacaaaatatacggacaaaagcctgaatctttcggcattggcggtaaaattaaaaaccaacacgaagtatttgtcctacgttatcaataagtacaaaaagaaagatttcaatagttatatcaacgagttgaggatccattacattatcagaaaaatggaatccaatcatgcctacctcaactataagattagctatctggccaacgaatgtggcttctcttctcatagtaaatttacggcagtattcaaatcgattgttggaatgtcgccttcgtgctttatggaacaactgtccaagagaaagaatgaaaacccttcaactagttcataattaacatcgacgaaaacatccaaaaattactattgttttaaaatcaaaagttctcccttaacacgatacaagtaaatactctgaactaattcagggtattttttttatgctaatttgaaaatgaggttttccgtaatttaaatttggatttaatgcaataaaaaaagcgacccttttgaagccgctttgaatgttttcacaacggaataatccttattgtgaattgcttcaaaattgtactgcaatactacaacattatttttaatgttggaatgaggaaaaccgtaatgttgctatttttttttgaattaaattgcgaaattaaatctttaattatgaaaaaaatattaggattggatttggggactaactcgataggttgggcttttattaatgaagctgagaatgaaaacgaagcctcatctattataaatactggagttcgtattgttcctcttactactgatgaagaagctgattttaaaaaaggcaatacaatttctataaatgcagatagaacattaaaacgtggtgcaagaagaggtttgcaacgttttaagcaaagaagagatgcattgttgaaaatttttactgaaataaaattcatacccaatgattttatttatgccgaaactggctctgcaacaactttttcatcttataaattaagagcaaaatccgcaacagaatttgttactaaggaagaattggttcaggtattattaatgctcaacaaaaaacgcggttataaaagcagtagaaaagcaaaaacagctgaagaaggagatgcaatagacggaatgaaaattgccaaagaaatttttgaaaacaatttaactcctggacaatgggtttataattctttatccaatggtggaaaattcattcctgatttttaccgttctgatttacagaaggaattagagaaaattgtgcgttttcaaaatcaatttcattctgatcaaatcaatgataagcttcttgaatacattcaaggtaaaaccagaactgttacttctcaacatttctcaagaacattaaatattcctcttgccgaaaataaaggaacaagagaagaaacaaaattacaacattacaaatggagaaatgaggctttggcaaatgaactggatttgaagattttggcatttattataactgaaataaataatcaaattaatcaatctagcggttatcttggtgccattagcgaccgaagcaaggaattatatttcaatcaggaaactgttggccaatttcaatacaagcaacttcagaaaaacgcacatgccgaactaaaaaatcaagttttttaccgtcaggattatttagatgaatttgaaaaaatatgggaaactcagtcgaaatttcatactgaattagatgaaaaattaaaatctgaagttcgagatattaccattttctaccaacgaaaattgaaatctcaaaaacatctggtaagtttttgcgaatttgaaaaaggacataaagccattcctaaatcgtctccattatttcaagaattcagaatttggcagaatttgaataatgttgtcgttaaaaatgaaactacgaaagagatatttgaattgagcgaagaattgaagcaaataattgcaaaagaattgcagttaaaagaaagtattacagatattcagatgttaactttttgtgaactaaagaaaggtatacatactgttaatttcaaaaaaattgaaggaaacagaactaatacatcaatctataaagcatttgaaaaaatattaattttagagggctatgacgaactagacttttcaaaacttgatactaaggatataaaaaacattatcaaatctgctttttcagatttagaaatcaatactggtattttagattttgactctaatattcaaggtaatgatttcgacaaacaaccttattatcaattgtggcatctattatattcagcagaagaagatgattttttgaaaaaaagcttgattagcaaatttggtttcaaagaaaatcacattccttttcttttaaatataaatttacaagcagattatggaagtttgagtgccaaagccataaaaaaaatattaccccatttgatggatggacatatttatgacaaagcttgcttcttagttggttacaaccattcatcatcattaacgacagaacaaaataatgaaagaattctaaaagacacattagatttaatcaagaaaaatagtttgagaaatcctgtggtagagaaaattcttaatcaaatgattaatgtaattaatgccattattgccgacccaacaatggggaaacctgatgaaattcgtgtcgaacttgctcgtgagttaaaaaacaacaatgagcaacgaagcgaaatgacaaaagcaattaacaaaagtacggcagaacatgagcaaatcaggaaattattacattccgagtttggaatccatcgtgtaacccgaaatgacattatacgctataaactttggaaagaatgtgatggaatttcattgtatacaggaaaaccaatagaaccatcaagactgtttacaaaagactatgatattgaacatatcattcccaaatcacgtttatttgatgatagtttttcaaataaaactatttgtgagcgacaattaaacattgataaaaataataaaacagcttattcctttttacaagaaaaattatctctcgaagaatttgaccagttcgaaaaaagggtaaagagtttgtttggaaaaattagcaaaactaaacagaataaacttttgatggctgacaatgaaattccagaagattttattgctcgtcaattaagagaaacacaatacattgctaagaaagctaaagaaattttattggaagtttccagaaatgtcactgcaacaattggtagcgtaactgacaaacttcgtgaagattgggaattagttgatgtgatgaaagaactcaattgggagaaatacgacaaattgggtttaacccatattgaagaaggtaaaaacggagaacgcttatacaaaattaaagattggacaaaacgaaatgaccatcgacatcatgcaatggatgccataacggttgcttttactaaaccagcttatattcagtatttgaataatctaaatgcaaaaacacaaggcgataaaaaagcaagttcagtttttggaattgaaacaaaatatttgagaagagacaagaataacaaacttcgatttattgaaccaatgccaaactttagagaagaagctaaaaaacaacttgaaggtattttgatttcctacaaagcaaaaaataaagtagttaccaaaaataaaaacataactaaaaaaagtggtggaactaatcagaagattcaattgacaccgagaggacagttgcataaagaaacagtttatgggaaactacaacagtatgttaccaaagaagaaaaagtgaatgcaaatttcactgaagagtatattcaaaaagttgcaaaaaaagaatatcgagaagccttatcgaaaagattacaagaaaatggcaacgatcctaaaaaagcgtttacaggaaaaaatgctttgaacaaaacacctatttatattagtctaaaagataccattgtagttcccgaaaaagtcaaaatagtttggctagaagccgattatacaatcaggaaagacataacacctgattttaaaatcgacaaagtaattgatgttggcttaaaaaccattcttcaagaccgtttgaatgaatttgctaatgaccccaaaaaagcgtttgcaaaccttgacgaaaacccaatttggcaaaacaaagagaaaggaattgccataaaacgagtaacaattagtggagttagcaatgcacaagctttacatactaaaaaagaccattttggtaatgaaattttagacgaaaacaacaacccaattcctgttgattttgtgagtactggaaacaaccatcacgttgctatttacagagatgaaaaaggcaatctacaagacgaagtaatttcattttttgaagctataactcgtaaaaatctaggattatctattatcaataaaaatcacgaaaaaggttggaaattcttattctctatgaaacaaaatgagttttttatatttccttccgaaggatttaatccaaaagaatttgacttatataatcttataagcaaagaattgataagtaagaatttattcagagtccagaaattttctaaagttgaatatgggagcgcttccgttagagattatgtatttagacatcatttagaaacgacaataaatgatgtaaaagaattaaaagacaaaacttataagtctattaaaagccttccttattttgaaggaattataaaagttcgcatcaatcatttaggtaagatcgttcaattaggagaatattagttatgataaaacgaacccttttcttcggcaaccctgcttatttaagcacaaaaaatgagcagttagtagtttcttatcctgacaaggaacaagaaaccaaaactgttgctatagaagatattggtgtcatcgttttggaaaaccaacaaattaccattaccaatggcttactcgaaaaactgacccataacaatgtagctttaatcaattgtgaccaataccacttacctattggtttgttaatgcccttgagcggtcataccgaacaaaccgaacgctttcggcatcaaattgaagcttccctacctttaaagaaaaacttgtggcaacaaacaatcagtagcaaaattaccaatcaggctggtttactcagggaaaaaggaattccgatgcgaaagatggaactttgggcaaaagaagtaacttcgggtgatgctttaaatcacgaagcaagggctgcggtttattattgggataaattatttgatattgaaggatttaccagacaacaaaaaggtttacctccaaacaatctattaaattacggctatgccattttaagaggaattacagctagggcccttgtaagttctggaatgctaccaacactaggaatttttcaccgaaacaaatacaatgcctattgtttggcagatgacattatggaaccttacagaccttttgttgatttgatagtttgccacatcatggaaacagaagataaaatagaggaattgacagttgaaataaaaaaacaattgttgagcatcgcttctattgatgtgctaattgacggaaaacaaagccctttgatggtggcaatgagtcgaactacaaattcattacatcaatgttttgaaggaagtgcaagaaagattttataccccgtttatgtatgacgaacattacaccagactaaatcaatatagaagtttgtggatattagtgttttttgatctgcccaccgaaacacgcaaagagcgtaaaattgccagtacgtttcgcaagaaattattggacgatggcttttctatgtttcaattctcgatctatatgcgtttttgtgccagtagagaaaatgccgaagtgcatactaagagaataaaaaataatctccccgaacatggtaaaattggcgtgatgcaaataaccgataagcaatttgggatgatggaattattttatggcaaaaaacctgtagaaacggataaaccttctcaacaattagaattgttctaaaactagtagaattcaaaaaatagttcctcacttgcattacaagaaataatacctattctttttcattttctacaataacccataacaaccaacatatcaaaca

SEQ ID NO: 1563 - DNA, 7912 bp, synthetic construct
  source 1..7912: mol_type = other DNA
  misc_feature 1..7912: note = Synthetic
taagaaccccgaaagcggaattgtttgtccaactgtaaatcgcagaataatctattcagactttgtactgaatgtaaatcttaaagaaaaaggctcccaggtggagcctttttttatgggtaaaaatgatcaggtatccgacatagattttttaaaaaaaaatctacacttaaaaataatttttttacgtcaactaaagtcaaaaaataagcaacaggaaaatatttttgtactttacaaatcagtctacaattttcaaggacctttaaaaattgtaaataaaaaaaagcgaccgaagccgctttaaatgtttgcacaacggaataatccttattgtgaataacttcaaaattgtattgcaatattagttaattttttagaataaaaaatattatgaaaaaaatattagggttagatttaggaagtacatcagtgggctgggcatttatccatgaatcagaagaaactactaaaattatcggcgcaggtgttcgggtggtcccgatctctacggatgaagctactgactttcaaaaaggaaatgccatttcgattaataaaaatagaactttagctcgtggagctcgaagaggcttacaacggttcaagcttcgtcgcgatgcacttctgcgtattttcaaatctaatggttttatttcgcaagactttaaatatgcggaagagggtaagtcaactacacatcaatcatatgccattcgtgcaaaatcagctacagaaaaagtgactcctgaagaattagtgcgcgtatttttaatgctaaataaaaaacgtgggtataaatcaagtagaaaaggacaagatgtgagtgctgatggaatagaaaatgtaggacaggctattgatggaatggaagttgccaaagaaatgcaagaaaaaaatatgacacctggagaatatgcgtttcaattattaacacaaaatcctaaagctaaattaccagatttttatagttcagatttagaaaatgagattctatctattataaaaaaccaatcaaattattattctgatttgccaaatgatttagactcccaaattaaaaataaaagcaaaaatgcaacttattatctatttagcacgacactaggaattccttatgctgaaaataaggggacacgagatgagaaaaaaattcaagcttatacctggcgttcactagctgcaaaacataaaattcaaaaaagtgaaatggcatttgttattggagaaatcaaggattctattgctaagtctagcggatatcttggaaacattagcaatcgaagtaaagaattagcctttaatcagcaaactgtaggtcagtaccagtataaaaaattgcaagataatgcacatgaatcccaacgtaatatggtgttcatgcgagcggattatatgcatgaatttgatcaaatctgggaaattcaaaaacaatttcatcctattttaacggaagaattgagaaaagaagttcgagatattaccattttttaccaacgaaaattaaaatcacagaaacatttaattagtttttgtgaattggagcatagacatagggttgccccaaaatcatcccccttatttcaggagtttcgcatgtggcagaatattaataacatcaatgtggtgagtgaaacatttgaccttgatgaagatgcaaaggaaggaatacatgatattttatcaaatgcaggaagattaaaagattccgatttactaaaggcgatgggtgcaaatcccaaaaaggacaaattaaattttaaggaaattcaaggtgacataacaagaagtgaatttgttcgagtgtttaagacaatatgggaagagaggggacatgatgtcaatacgctaagttcacctattcgaacaagcgatgttaaaagaattttacatgatttaacgctgcctgtcgatttacttgaattaaatatgaaactagccggaaatgaatttgacaaacagccttattttcagttatggcatttaatttatacggtcgaagatgatcaggtgttgatcgaaaatcttaagaaaaagttcaatttaccggaggaatatgccaaagccatgttaagcatacgattagaacccaattatggaagtttatccgctagagctatgcggaaaataattccacatctggaagctggcaatgaatacagtgcggcaactatttatgcaggatatgcttcacattccaaaatgtcattaacaaaagaggaaaatgattctcgaattttagcagataaattagaattagtcaagaagaattctctacgtaatccggtggttgaaaagatcttaaatcagaccattaatgtggtgaatgcgattatggaatctgaattatacggtaaacccgatgagattcgcattgaattagcgcgtgaattaagagctaataacgatcagcgaaaaagaatgacagctgatatagccacggcaacaaaggcgcatgaagatattcgacaaaaattgcgttcagaattccaattgaatcgagtgactaaaaatgatgtgatacgctataagctatggcaagaaactggttatatttctatctattcgggaaatcctattccagcttcagaattattcacaaataaatacgatatcgaacacataattcctcaatcaagattatttgatgattccttctcgaataaaacgctctgtgaaagaacattaaatatcgaaaaaggaaatcaaactgcattttcatttttgaagcaaaaatggaattcgactgaatttgatcaatatgtagctagagtaaaggaattaggaaaagataataaaattaaaaaatcaaaattagacaagttgcttttgtgcaatgaacaaattcctgaagacttcatagcacgccaattaaatgagactcagtatatttcaaaaaaagcgaaagaaattcttttgcaagcttgtcgaaatgtttattccacctcaggaagcatcacagatcgcctgagagaagactgggggttaacagatgtcatgaaagaattgaattttgagaaatacaaattagctggtttaacctttgaggaaactggtaaaggaggtgaacgattacagaaaatcaaagattggtcaaagcgtaatgaccatcgccaccatgcgatggatgcgattactattgcattaactcgtcaaggatatattcagtatttgaataacttaaattcaagggcggataagacgggtgccacgtatggtttagaaagtaaatacttagaacgaattgagggtaaattaagatttaaattacctatgcccactattcgagaagaattcaaaaaaacgctagagaatattttgatttcttataaggcaaaaaataaggtagttactaagaataaaaatattattaaaacaaaaacaggttcattagaaattagtcaattaaccccacggggtcaattacataaagaaacaatttatggaaagaaattgcaatatgatacgaattttgtggctgtaggattgaaactgaatgccgagttaattgcaaaggtggcaaagaaaaatgagcgtgaagcactattagcacgtttagaagccaatggtaatgatccccaaaaagcctttaccgggaaaaatagtttagcgaataatcccatttacttagatagtcggcagaaatataaggtagcggataaagtaaaactggtcactttggaagagctctataccaaaagagtttcagtaggacccaatttagatgtcaagcagattgagaaaattattgacccaggtgtaaagcagaaactactagatcgattaaattcttttgatggagaccccaaaaaagcatttatcaacttagatgaaaatccgatttatttagacaagggagaaaaaattgccatcaagcgtgtaacaatgaccggcgtaaataatgtagaagccctacatagtaaaaaagatttatatggaaaacagatattgaactctagtggaatacccattcctgcagattttgtgagtactggaaataaccaccatgtggcaatttttgaggatactgagggaaatttgcaagaggaaatagtttcattttatgaagctgtttcacgcgttaccataggagaatcaattattcgtaaaattcatgtaagtggctggaagtttttgtttacgatgaaacaaaatgaatttttcgttttcccagcagatggttttgacccagctgaaattaatttagaagatcctcagaattatgcattaattagtaagcatttgtatcgggtacagaaaatagccaaaaaagattattttttcagacatcatttagaaactagtgtcgatgatgtgaaagaattgaaaggtttaagctttaagagatctgggttaacagggataaacggaataatcaaagctcggattaatcatttaggtcaaatagttaaagtaggagaatattaaagatgattaaacggactttgttttttgagaatccagcctatttgagtttacaattagagcaattgttaattacttatccggaggaatttgtcaagccaataacaattcccatagaagatcttggcatcattatcatagaatcattgcatgttaccataagcttttccctgataaataagttaatgtcttatggggttggagtctttagttgtgatgaaagacatatgccatctggacttatgttgcaattggaggggcacactcaacagaccgagcgaatcaggacacagttagaggcatctcttccattaaagaaaaacctttggcagcaaactgtctcagctaaaattgtaaatcaagctcgcttattgcatacaaggggaaaagatgtagacaacttactacgctggagccgagaagtacaatctggagatcaaaaaaatcatgaagcaagagccgcggtccagtattggtcgcggctttttccatttgaagggtttacgcgccatccagaaggtgaatcaccaaatcatttattgaattatggctatagtattttaagaggtatcacagcgagggctatcgtctcatcagggatgttgcccatgctaggaatatttcacaaaaataaatacaatgcttttggtcttgcagacgatatcatggaaccttaccgtccttttgtagatgccttagttttggaattagtggacagtggagaggattttcatgaattgaaaaaagagtttaaaatacatttgatgagcatcatgcgaacagacgtaattttagatgggcaaaagagtccattaatggtcgctttgagtcgtacgacaagctctctttatgagtgttatgtgggaagaacaagaaaaattctatatcccttgtatgcatgatagattcgatgatcgattaaatcaatatagaagcatgtggctattcgtctactttgatttgcctacggaaactagaaaagaacgtaaagtagcggcagattttcgtaaaatgctaatcaaagacggttttacgatgtttcaattttccatttatttgcgcttttgtttttccatggaaaataccgaagtgcatgcaagaagaattcgtaaaaatctaccagagtatggcaaaatttgtttaataaaatttaccgatcgccaatttggaatgatggaagtcttctttggtcagaaagctcagcgaaatgaaaaaccgccccaacaactcgaaatattctaaaatgaaggcttgaattttaatcctaaatttactcacaattcacagtatataagctatttaggtgcttatatactgtgaatgcgtaggtaaaaatacaattttgaaagctattcacaacaaacgtaacgctttcaaactctgcggcactactgtgaatgcgtaggtaaaaatacaattttgaaagctattcacaacctccagtagtcgtaaactacaaccttgatactgtgaatgcgtaggtaaaaatacaattttgaaagctattcacaactacttcaagaaaatctgctaaaattgctgcactgtgaatgcgtaggtaaaaatacaattttgaaagctattcacaacgccaggtcattacaattgcaagctgaggagactgtgaatgcgtaggtaaaaatacaattttgaaagctattcacaacttcttcaactatcattgctgaattaggtaaactgtgaatgcgtaggtaaaaatacaattttgaaagctattcacaactgcgacaataaacgaagcacgaagcaaaaactgtgaatgcgtaggtaaaaatacaattttgaaagctattcacaaccgtaggcatctacgaaagaatctagagtgactgtgaatgcgtaggtaaaaatacaattttgaaagctattcacaactgcatactgaatggcatatactttggacttactgtgaatgcgtaggtaaaaatacaattttgaaagctattcacaacgaactgggaaggtcttttattagcttccgactgtgaatgcgtaggtaaaaatacaattttgaaagctattcacaactgtaaatggcccgatttttaatcgggttgtactgtgaatgcgtaggtaaaaatacaattttgaaagctattcacaacgaattcaaagcaaagaaaaaataatttaaactgtgaatgcgtaggtaaaaatacaattttgaaagcttaaatccattttaactgatcatttgatccaaactctttacaggctttaatcccaatttcagtccctctgaaatcataaagtcccaaccagaagcaaaatcattccgaatcaaaccatctaatatggcttctcgaatagcaattttgattaggccaatttcctttcccggaccgatattaaacacgtccataattacttcgcctgaaaaaacgggctgaaaactacgcaaagaatcatttgcctcaacttccttaagtttaatctctactacatcaaagtttcgtaaatactttttaaccttttcgccgtttttagaagtaatatcggctctacataaggtcatcaaagcttccaattcgtcacccgcctcaaaaagcaatctccttaaagctgagtccgtaatctcttctttggataaagcgatgggacgaaggtggagacggaccaacttctgaaccaatttcattttctcatttaaaggcaatttgaaccttttaaaaattgagggaacctgcctcgctcccatttcctcatggccatgaaaagtccatccttttttctggacaaatttctttgtttgaggtttggcaatatcatgcaaaatagccgcccagcgccaccaaaggtcattcgtgtttttagatatattatccaacacctgcaatgtatgatagaaattatctttatgccccttcccttcttcagtatcaatacccttcaaatgcatgaattcaggaaaaataatgggcaaaatttgacatgcatccaacaacaagaatccataggaaggccgatcagaaagaataattttatttaactcctccgaaatacgctccatcgatataatagctaatcggtctttctccgtagtcaaagcctcaaatgtttctgggaaaatgtcaaagcccaactgtgtagcaaaacgaaccgcacgcatcatgcgcaatggatcatccgaaaaagtaattccaggctctaatggagtcctaattattttagcttttaaatcatcaatccctccaaatggatccaataaagtaccccacgtgtttttattgatcgaaacagctaatgcattaatcgtgaaatctcgcctattttgatcatcctccaaactgccctccagtaccaaaggcttccgagaatcccgctgatatgattccttcctcgcccccacaaattctaaatcccagtcatctactttcaacatggccgtaccaaaatttttgaaaatagagaccgattgttccgacaaattaaatcgcttcgccacctcttcggctaatccaattcc

SEQ ID NO: 1564 - DNA, 7713 bp, synthetic construct
  misc_feature 1..7713: note = Synthetic
  source 1..7713: mol_type = other DNA
ttgttttaaggttttggttttgtggtggttatctttggttttttttgaagcgttgctaattgttgggggtttgcggtggctaaagctgttttgtggtggttctttatatagtatagtcttttggtatgtcgatgatactgttttgaatggtgtattcttttttataaatgttgtttcttggatgctgcgcgtgagggatagtagtggaaagcccacagcccgacgaaggaggtgcgaggacttgtaacggatagcccgacccgaggaggaacgacgacggggcacgcccaaaaaaaataaaaaacataccttatatatgatacttgttttatggggtttggggatctaagtttataaacttgtggggaaatattaaaagtaggatatttgtcgtttaaaaatagatagaaaggcaagattattttgtggattttatgaagttgttattgtctgaagtgatagtgggttattttggattgatttcttataaaaaaaaaattaatccttgtgcgtttcttaatttcgtatttattaattgaatttaaaagccgataaatgaaaaaagtactacttgccgaagatgattttgattttgctgatgttttaaaacaatatctggagctatataattaccatattacttgggctaaagacggggaagaagccttactcctatttgagaatgaaactttcgatatttgcgtgtttgatatcatgatgccaaaaatggacggttttacactagcccaaaaaataattgatatgaatcctgaaacaccatttgttttcttaactgccagaaaactcaaagaagacaaactaaaaggattgcaattgggtgccgatgattatattgtaaaaccttttgaagccgacgaattggtcttgcgattaaacaatattttgaaaagaggcgagcaaaaaaatcaaacaactttttcaggcgatgaaatagcaattggcaattatatttttgatccgaataggttagaattaaagttaggtaatcatacacaaaggcttacagcaaaggaagttgctattattttgttttttctaaaaaataaaaacaaacgcataaaacgaaatgatattttgcagcatatttggggaaatgacgatttcttttcaggaagaagtatggatgtttttataagtcgaattagaaaatatttctctagcgacaaccgaattactattgaaagtattcgcaatgtaggtttagaatttaagattataacctaaaaaaaaagcagacctataagccggattctgttctcgatattactaacgataccttatcatttatctaggcttgcaattactcacaagctccatctttctacccttcagcaacggacgagaagcccttaactaccgatatacttgaaatttcaccgcatagagtttacctggtttcactacagcattacctgtacatactttctgttgcacttgtcctaaccccaataaattggagccgacgggtgttacccgctatacttctctctggtgtccggactttcctcccccaataaattggcgacgataaggcggtctgcgctgcaaaagtagtttttttaggagccaatcccgctatccgttgcaatattttttcggcgaaaagcctcaaaaaggattttcactactatcggggctagggcattgcggtaataaaacaacatttttacaaaatacctaaataaaaaagcgaccctttagaggccgctttaaatgttttcacaacggaataatccttattgtgaattgcttcaaaattgtagtacaatactacaactttttttttatatataataaaaatgtatctaaataatattaattatcttacatttatagttaaaaataaatctagacaactagaataattaaaatataagcaagtacaatgaaaaaaatattaggattagatttaggaacaaatagtattggatgggcgtttataaatgaggcagaaaacgagattgaagtgtcttcaattgtaaatacaggcgttcgcattgttccacttactacagatgaagaatctgatttcaaaaaaggcaatacaatttctataaacgcagatagaaccttaaaacgtggcgcaagaagaggtttgcaacgattcaaacaaagaagagaagctttattagaaatattcagcagaataaaattcattgcgactgattttgtttatgcagaaactggtgcatcgacaactttttcttcgtatcaattaagagctaaatcggctgttgaagccgttacaaaagaagaattagttaaagttttattaatgcttaacaaaaaaagagggtataaaagcagccgaaaagcaaaaactgccgaagaaggcgatgcaattgacggaatgaaaattgccaaagaaattttcgaaaacaatttaactccaggacaatgggtatataattctttatcgaaaggtggcaaatttattcctgatttttatcgttcggatttgcagaaggaattagagaagatcgttggttttcaaaatcaatttcattcggaacaaatgaatgataaattattggaagacattcaaggaaaatcaagaacattaacttcgcaatatttttcaaaaacattaaatattcctcttgccgaaaataaaggaactagagaagaaaccaaattacaacattacaaatggagaaatgatgctttggcaaatgagctcgatttgaaagttttggcatttattattactgaaatcaacaatcaaatcaaccaatccagcggttatcttggtgctattagcgaccgaagtaaagaattgtatttcaaccaagaaaccgttggtcaatttcagtacaaacaacttcataaaaatgcacacgccaaactaaaaaatcaggttttttatcgtcaggattatttagatgagttcgaaaaaatttgggaaacacaggtgaaatttcatcccgaattaaatgacaagctcaaatcagaagttcgagacattacaattttctaccaacggaaattaaaatctcaaaaacatttagtaagtttttgcgaatttgaaaaaggacataaagcaattccaaaatcatctcctttatttcaagaattcaggatttggcagaatttaaacaatgttgttgttaaaaacgaaactacgaaagaggtatatgaattgagtgaagagttgaagcaattaatcgccgaagaattgcagtttaaagaaagtatgaccgatgttcagatgttaactttttgcgaactaaagaaaggaactcataccgttaatttcaaaaaaattgaaggaaacagaaccaatagctccatcttcaaagtatttgaaaaaatacttgaagtggaaggatatgaaatggatttttctaaaatgaaacctttagaaataagagaagctgttgctccaatcttcgaaactttaaatatcaatactgctattttagattttgacccaagtattcaaggcaatgatttcgacaaacagccttattatcagttgtggcatttgttatattcggcagaagatgatgataaattaaaagaaactttaaaaaacaaatttgggttcaaagaaaaccacattccttttcttttgaatataaatctacaagccgattacggaagtttgagtgctaaagctatcaagaaaatattaccgcatttgatggatgggcatatttatgacaaagcttgtacattagttggttataatcactcatcatcattaacaaccgaacaaaataacgagagagttttaaaagacaccctagaattactaaagaaaaacagtttgcgaaatcctgtggttgagaaaatccttaatcaaatgattaatgtgattaatgctattatgaaagaccctgcaatgggaaaaccagatgaaattagggtagaactagctcgtgagttgaaaaacaacaacgaacaacgtagcgaaatgacaaaagctattaacaaaaatactgccgaacacgaccaaattaggaaattattacacactgaatttggaatagcaagagtaactagaaacgatattattaggtacaaactttggaaagaaactgatggtatttcgttgtacacaggaaaaccaatagaaccttcaaagctatttacaaaagactatgacattgaacatattattcccaaatcacgtttatttgatgatagcttttcgaacaaaaccatttgtgaacgccaattgaacattgacaaaagtaataaaactgcctattcctttttacaagagaaattatcacccgaagaatttgaccaatttgaaaaaagagtgaaaagtttgtttggaaaaataagtagaaccaagcaaaataaacttttaatggcagataatgaaattcccgaaggatttattgaccgtcaattaagagaaacacaatacatagccaaaaaagccaaagaaattttattggaagtttctagaaatgtaaccgcaactattggaagtgttaccgataaattgcgtgaggattgggaattggtcgatgtgatgaaagaactcaattgggagaaatacgacaaattaggtttgacccatattgaagaaggaaaacatggagaacgtttgtacaaaattaaagattggacgaaacgaaacgaccatcgccatcacgctatggatgcgataacggttgcctttaccaaacccgcatacattcaatatttgaataacttaaatgctagaagtataaatatcaaagaaatttcagaagctacggataaaaaatctaaaattattataggtatagaaaccaaatatttagaacgggacaaaaacaacaaattacgtttcattcctcctatggaaaactttagagaagaagctaaaaaacaactcgaaagtattttgatttcctataaagccaaaaacaaagtagttaccaaaaataaaaatatcactaaaaaaagtggtggaactaatcaaaaaattcaattgacaccaagaggacaattgcacaaagaaacggtttatggaaaattgcaacaatatgttacgaaagaagaaaaagtaaatgcaaattttactgcagagtacatccaaaaagtagccaaaaaagaatatagtgaagcgctattgaaacgattactagaaaatgacaacgaccccaaaaaagcatttacagggaaaaatacattgaacaaaacaccaatttacatcagtttaaaggacaatattgtagttccagagaaagtcaaaatcgtttggcttgaagccgattatactattagaaaagacattacacccgatttaaaaattgacaaagtaattgatattggtttaaaagccattcttcaagaccgtttagcggaatttggtaatgaccctaaaaaagcattcataaacctagatgaaaacccaatttggcaaaacaaagaaaagggaattgcgataaaacgtgtgactattagcggtgtgagcaatgcacaagctttgcataccaaaaaagaccattttggcaatgaaattttagacgaaaacggcaacccaattccagtagattttgtaagtactggaaataatcatcacgtagctatttacaaagacgaaaagggcaatctacaagaagaagtagtttctttttatgatgctgtggttcgtaggaatttaggcttgtcagttattaataaaaaccatgagaaaggttggaaattcttgttctccatgaaacaaaatgagttttttatatttccatcggatggctttaatcctcacgaaatagatttattaaatcctaataattatcatttgattagtcctaatatgtttagggtacagaaaatttctacaaaagattatttttttaggcatcatttagaaactactgttgaagataaaaaagagcttaaagaaatttcatttaaacgcttaggaataaatggaataaataatataacaaaagttagaatcaatcatttaggtaaaattgttcatttaggagaatattaatttctagattctaaattaaataggattgggctttagcctattcaacaaaaaaataggaataaacaaaaaaggctttagccaaaatatttcggctaaagcctttcttaaatcaattattatccgcctccatttaaaaatggaggcaattgaaaaaggagtatagaattctaaaatcataatagatacaattgataaaaaattaaaattgagataaattcaaattcatagaaatgggttttaatccatctaacaatataaataatcgagatttactttagccaaaatatttcataaaccatttttaaatcgcaaaatatgataaaacgcacccttttttttggcaatcccgcttatttaagcaccaaaaacgagcaaattgtaatttcttatcccaacaaggagcacgaaaccaagactgtggctattgaagatattggcgtaatcgttttagaaaaccaacaaataaccattaccaatggtttgttagaaaaactaaccaacaacaacgtggcgttaattaattgcgaccaataccatttgcctattgggttgttaatgccgctcaacggacatacagaacaatcggaacggtttaaaaaccaaattaacgcttctgttccacttaaaaaaaacttatggcaacaaaccattagtgctaaaatcatgaaccaagcaggattgcttaaagaaaaaggaatcccgtgccgaaaaatggagctttgggcaaaagaggttacatcgggcgatgcacttaatcacgaatctagagcagctgtattttattggcaaagcctgattacggtaccaaattttaccagaggacaaaaaggaattccgcccaataatttattaaactatgggtatgcaatactgcgagccattactgcaagagccattgttagttcgggcatgttacccactttgggcatctttcatcgtaacaaatacaatgcctattgtttggctgatgatattatggaaccctatcgcccgtatgtagatttgatcgtgtgtcatattatagatacagaggattcatacgatgagctgaccatcgaaatcaaaaaacaattactcagcattgccacaattgatgtatgcatagatggcaaaaatagccccttgatggttgccatgagcagaacaacacattccttacaggaatgctttgcgggagccgcaagaaaaattttataccctatttatgtatgacgaacattacacccgtttaaaccagtatagaagtttgtggatattagtattttttgacctgcccaccgaaacgcggaaagagcgtaaaattgccagtgaatttcgcaagaaattattggacgatggtttttctatgtttcaattttcgatctatatgcggttttgtgccagcagagaaaatgccgaagtacacaccaaaagaataagaaatagtttgcccgaacatggcaaaattggtgtgatgcaaataaccgataaacaatttggtatgatggagcttttttatggaaaaaaacctgtagaaacagacaaaccttcgcaacaattagaacttttttgaaaaataggatttagaaatattagacctaccagaatatcaacacacaaacagaactgttttttaatttcaaaataagcatataaccaccaacatatcaaacgattaactcgcggtatgttggtaattatgggtcacataaattttatggggattaagcaaaaagtttttccattctaaagagaaagaatttcacatc

SEQ ID NO: 1565 - DNA, 6585 bp, synthetic construct
  misc_feature 1..6585: note = Synthetic
  source 1..6585: mol_type = other DNA
aaattagtctcggacaatagtcgcacataattcaaacgctaaactatctggggaaaagcaaagtgctatgtctccctagccaatcgtaatccgatgcaccgctgggactaaaatccctgtatttcccccttgtctaatcaagctcgatctctccttttaagattttcaaataaatctacgttttaaagtctaatattttgattaataaaattttagtgctgtttttgttttagctacaataatagtagaaatgtaatgctactaattttcttagtccattttcaaactaaagactaccttgttgctcgaacctaataagtattaagtttaagtgagccttgttagtctgaaatttttaaaaccgacaaatagaatagaagtagatgtggagttttaatcggtttagagatgccaaaagtatttaggtagaagaaataagatggtccttattcttggcctggtcatgagccttcgggggtaataactgaactgccagatttagaaggtgcatatctatgggtatttcaatatcaggatggatttgtagtatatgctgcaggcattacaaattcgactaaaaataggtttaggagacatacccgtgaatacaaaaagggcaattatacagtattagatgttcgacttgccgcaaatggagagcgacaagaaatttggcatggctggaaatatgcgaagtcgcatcaggaagaatttatggtgcgtgaggaagaaattttaaaggctgttgaaagtcaattaggttcctttagggtttttgtagcaccgatttctgatcagcgcaaaagagagagaatggaaccggcaattatgcaacatatatattgcagtcaagagccatggtcggatttggctgaccgaggaatgctcttaaatggtcgatacaatgctgaaatgcctattttaatcgaaaacaaatgtgatttcaatatttatggacttccaaagaaattggaaatataagaagggaagtataataaatacaaaaagcgacctaggccgctttaaatgtttgcacaacggaataatccttattgtgaataacttcaaaattgtactacaatattaactaatattttagaattaaaaaaatcatgaaaaaaattttaggtctagatttgggaagttcatcagttggatgggcttttattcatgaagatgaaaatacatcgaagattattggtgcaggcgcgcgagtagttccaatatcaacagatgaagctaatgatttccagaaaggaaatgctatctctattaataaaaatagaaccttagccagaggagctagaagaggacttcagcggtttaagctgcgcagaaatgcaatcatgcatatttttaaatctaatggctttatttctcaggattttaaatattctgaacagggaaaggggacgacacatcaatcatacgctattcgtgcaaaatcagctctggagaaagtgacccctgaggagttggtgaaggtgttattgatgttgaataaaaaaagaggttataaatctaatagaaaggggcaagacgctagtgcggatggtgtagagaatgtcggtcaaactattgatggaatggaagtagcgaaggaaatgtatgctaagaatttgactcctgggcagtatgcatttagcttgcttcagaaaaatactaaagcaaagctgcctgatttctatagctctgattttgagaatgaaattcttcgaatcattgattctcagttaaggtttcattctgatttgcctgaagatttaagtagccaattaaaaaataaaagtaaaggagctacctttttttacttcacgaatacgctcaatattccttatgcggaaaataagggaacaagagatgagaaaaaattgcaagcctatacttggcgcgcattggcattgaatgaaaaaatcaataacgaagagttggccttcattatcggtgaaataaaagatgggattagtaagtcaagcggttatctaggagatattagtaatcgaagcaaggaattggtttttgataacttaactgtaggtgaatatcaatataagaaattactccaaaaccctcatcaatcacagcgcaatatggtttttatgcgttctgattatttgcatgaatttgaacgtatatgggaaactcaaaaagaattttatcctgttttaacagataaattaaagaaagaagttcgtgatgttacgatcttctaccaacgaaaattaaaatctcaaaagcatttaattagtttctgtgagttagatcctcagcaccgtgtagctcctaaatcatctcctatttttcaagaatttcggatgtggcaaaatataaatgacatcaaagttacaggcgaatcttttgaatacgatgaggatgtgcgcaaaggagttcatgagattctttctaatgcaggtcgcatgaaggatactgatttattaaaagcaatcggtgcaaaccccaaaaaagacttcttgaattttaaggaaattcagggcaattctactaggagtgaatttttgaaggtgtttaaatctttatgggaggaacaggggaacaatattaatttacttggaacaccacttatgtcctctgatgtttcaagaatccttcaggatttatccttacccaccaatttattggatttaaatctaaaccttgaaggcaatgattttgacaaacaacccttttatgtgctatggcatcttttatacacagttgaagatgatgaaacgctaataaaaaatcttgaaaaaagatttaatatgccaccggtttatgcgaaggctttattgaacgttaaattggaaccgaattatggcagtttatctgctagagccatgcgacgcatgttaccgcatcttgaagagggcaaggactatagtgaggcagcaattttaggagggtacaaatcgcattctaaatcatcgttaagtgtagatgaaaacaatgctcgggaattaaacgataggttagaattagtaaagaagaattctctgcgtaacccagttgttgaaaagattttaaatcagaccattaatgttgtcaatgcgataatggaatcaagtcagtttggtaagccagacgaaattagaatcgaacttgctagagagttaagagccaataatgctcaacgaaaagaaatgacatctgcaatagcaaaagcaaccaaggatcatgaggatattcgtcaaaaattaaggtctgagtttaatatttctagggtaacgaagaatgatattatacgttataaactttggcaagaggctggatacatctcggtttatacggggaaccctattcctgcctctgagttgttcacgaacaaatatgatattgagcatataataccacaatcaaggttgtttgacgattcattttcaaataaagtactttgcgaacgcgccttgaatattgagaaggggagccaaacagcttcctcctttcttaaacagaaatttagccctactgactttgatcaatatataggtcggataaaagatctgggcaaagaaggaaagattaagaaaactaagttagacaaactacaattgaccgatgataaaattcctgaagattttattgctcgacaattgaatgaaacacaatttatctcgaagaaggccaaggagttattgcttgatgtatgccgaaatgtcgtaacgactacaggcagtattaccgatcgtttacgtgaagattggggcttgaccgatgtcatgaaggaactgaactttgagaaatataaattagtcgggttaacttatgaggatactgggaaaaatggtgaaaggctacccaaaataaaagattggtctaaacgaaacgatcataggcatcatgctatggatgcaattaccattgccctcaccaagcaaggctatattcagtatttaaataatctgaattcaagagccgacaagaatagcacaacttctgggttagagtcaaaacatttaaaaagaatggaggatggcaagttgaaattcaaagagcctatcccaaatattcgtaatgagtttaaaattgctttggagaatattttaatttctcataaggccaaaaataaagtagttacccggaatgtaaataaagttcagactaaatctggagtgattgaaaaaactcaattaacacctcgaggacaattgcataaagaaacggtgtatggtaagcgatctttttatgagacagaatgggcttcggtaggtttgaagatgactgttgaattgattgctaaggttgccataaagagagaacgcgaggctttactaaatcgattaatcgaattcgataatgatcctaaaaaggcttttacgggaaagaattccttgcttaacaatccaatttatttagatagtggtaagaaatatcctattgctgacaaggttaaattagtcggtttagagacgatttatacaaaaagagtcagtgttggacctgaactggatcagaaaaagattgaaaagattatagatcctggagtgcgacagaaattgcttgatcgtttagtcgaattcaatttagatgcgaagaaggcatttgcaaacttagatgagaatccagtttacctagataaggctgaaaagattgcgattaaacgtgtaaccatgtctggggtaaataacgtggaagcacttcacaccaagaaagacttgcacggccatgagattttagatgctcatggaaaacccattccagtcgattttgttagtacaggcaataaccatcatgttgctattttcgaagatttagaaggtaatcttcaagaagaaattgtttctttttatgaggctgtttctagggcttcaataggtgaacccattattaagcggcaacatgcagaaggttggaagttgttattcaccttaaagcaaaatgagtatttcattttcccaggtgatgattttaatcccaatgacattgacctgttggatcagaaaaattatccactaatcagcaagcatctgtatcgagtgcagaaaattgcgaccaagaattatatgtttaggcatcatctagagacaaacgttgatgatgtaaaagaattaaaaggtttaacatatataagcattcgaagtcttggaccacttgttggtgttgtgaaagtacgtataaaccatataggccaaatagtcaaagtaggagagtattaatgataaagagaacgctgctgtttgaaaatcaggcttacttaagcctgaaagacgatcaattacttgtcacgtatcctcctgaagttggggctcccagagccgttccaattgaagatattggaatcgttgtaattgaatcgctgcatgtaactatgacgagtgccttgtcaaatcgattaatggagcaaggagctggggtgttttattgcgatgctcggcatatgccctctggtttactgcttccattggaggggcatacgcagcaaacggaacgaataagaacgcagctagatgcaagtcttcctttaaagaaaaacttgtggcagcagacagtttcagcaaagattcttaaccaagccttcttgttaaaatctcgagattacaaggttgagaatttattgctttggagtaaggaggtgcaatctggagataagaaaaatcatgaatctagggcagcggtttattattggtcgaatttattcccatttgatcgctttattcgggacgcagagggtgaatcccctaaccatctcttaaattatggttatagtattcttagaggaataactgctagggccatagtttcgtctgggatgttgcctatgtttggcatttttcataaaaacaaatacaatgcctttggtttagcagatgatattatggaaccatatcgcccctatgtagattccttggtattggatttaatcgatagcaaaacggatttggagttactgaccaaagagttaaagattcatttaatgaaaattcatagtatggatgttttgttagatggacaaaagagtccactgctggtagctatgagtcgcacgacaagctccctgtttgattgttttgcagggaaatccaagaagatactttatccaacctatgtatgaggggtatgatagtcggttaaaccaatatcggagcatgtggttgtttgtctattttgatcttccaactgaaacgagaaaggagcgtaaggttgcagctgcttttcgaaaaacgttgattaaagatggcttttcgatgtttcagttttctatttatcttcgtttttgctcttctatggaaaatactgaagttcatgcgaaacgagttcgaagtaatttacctgaatatggcaagatctgtttgattaaattcaccgatcggcaatttgggatgatggaagtgttctttggacagaagcctcaaaggaatgaaaaaccacctcagcagctcgaattattctaaaaatgagcagttgatttttaattccatttttacctgcaattcacagaatatcagacagttgaatgcctgtatcctgtgaatgcggtagtaaaaatacaattttgaaagctattcacaacatttgcaaggatgtgttctagtttgtactccctgtgaatgcggtagtaaaaatacaattttgaaagctattcacaac

SEQ ID NO: 1566 - DNA, 5488 bp, synthetic construct
  misc_feature 1..5488: note = Synthetic
  source 1..5488: mol_type = other DNA
aaaaataaaaaaacataccttatatatgatacttgttttatggggtttggggatctaagtttataaacttgtggggaaatattaaaagtaggatatttgtcgtttaaaaatagatagaaaggcaagattattttgtggattttatgaagttgttattgtctgaagtgatagtgggttattttggattgatttcttataaaaaaaatatttaatccttgtgcgtttcttaatttcgtatttattaattgaatttaaaagccgataaatgaaaaaagtactacttgccgaagatgattttgattttgctgatgttttaaaacaatatctggagctatataattacgatattacttgggctaaagacggggaagaagccttactcctatttgagaatgaaactttcgatatttgcgtgtttgatatcatgatgccaaaaatggacggttttacactagcccaaaaaataattgatatgaatcctgaaacaccatttgttttcttaactgccagaaaactcaaagaagacaaactaaaaggattgcaattgggtgccgatgattatattgtaaaaccttttgaagccgacgaattggtcttgcgattaaacaatattttgaaaagaggcgagcaaaaaaatcaaacaactttttcaggcgatgaaataacaattggtaattatatttttgatccgaataggttagaattaaagttaggtaatcatacacaaaggcttacagcaaaggaagttgctgttattttgttttttctaaaaaataaaaacaaacgcataaaacgaaatgatattttgcaacatatttggggaaatgacgatttcttttcaggaagaagtatggatgtttttataagtcgaattagaaaatatttctctagcgacaaccgaattactattgaaagtattcgcaatgtaggtttagaatttaagattataacctaaaaaaaagcagacctataagccggattctgttctcgatattactaacgataccttatcatttatctaggcttgcaattactcacaagctccatctttctacccttcagcaacggacgagaagcccttaactaccgatatacttgaaatttcaccgcatagagtttacctggtttcactacagcattacctgtacatactttctgttgcacttgtcctaaccccaataaattggagccgacgggtgttacccgctatgcttctctctggtgtccggactttcctcccccaataaattggcgacgataaggcggtctgcgctgcaaaagtagtttttttaggagccaatcccgctatccgttgcaatcttttttcggcgaaaagcctcaaaaaggattttcactactatcggggctagggcattgcggtaataaaacaacattttcacaaaatacctaaataaaaaagcgaccctttagaggccgctttaaatgttttcacaacggaataatccttattgtgaattgcttcaaaattgtagtacaatactacaactttttttttatatataataaaaatgtatctaaataatattaattatcttacatttatagttaaaaataaatctagacaactagaataattaaaatataagcaagtacaatgaaaaaaatattaggattagatttaggaacaacatctattggatgggcgtttataaatgaggcagaaaacgagattgaagtgtcttcaattgtaaatacaggcgttcgcattgttccacttactacagatgaagaatctgatttcaaaaaaggcaatacaatttctataaacgcagatagaactttaaaacgtggcgcaagaagaggtttgcaacgattcaaacaaagaagagaagctttattagaaatattcagcagaataaaattcattgcgactgattttgtttatgcagaaactggtgcatcgacaactttttcttcgtatcaattgagagctaaatcggctgttgaagccgttacaaaagaagaattagttaaagttttattaatgcttaacaaaaaaagggggtataaaagtagccgaaaagcaaaaactgccgaagaaggcaatgcgattgacggaatgaaaattgccaaagaaatttttgaaaacaatttaactccaggacaatgggtatataattctttatcgaaaggtggcaaatttattcctgatttttatcattccgatttgcagaaggaattagagaagatagttcgttttcaaaatcaatttcattccgaacaaataaatgataaattattagcagacattcaaggaaaatcaagaacgcagacttctcaacatttttcaaaaacattgaatatttctcttgccgaaaataaaggaactagagaagaaaccaaattgcaacattaccaatggagaaatgaagctttggcaaatgaactcgatatgaaaattttggcatttattattactgaaatcaacaatcaaatcaatcaatccagcggttatcttggcgatattagcgatagaagtaaggaattgtattttaatcaggaaacggttgggcagtatcaatacaaacaacttcaagaaaatgtacacgctaaacttaaaaatcaagttttttaccgtcaggattatttagatgaatttgaaaaaatttgggaaacgcaagcgaaatttcatcccgaattaaatgacaacctcaaatcagaagttcgagatattacgattttctaccaacgaaaattaaaatctcaaaaacatttggtaagcttttgcgaatttgaaaaaggacataaagccattccaaaatcgtcccctttgtttcaagaatttaggatttggcagaatttaaacaatgttgttgttaaaaacgaaactacaaaagaggtatttgaattgagtgaagagttgaagcaattaatcgccgaagaattgcagtttaaagaaagtatgaccgatgttcagatgttaactttttgcgaactaaagaaaggaactcataccgttaatttcaaaaaaattgaaggtaatagaaccaatacttctatttataaagcttttgaaaaaatattggaagtagaaggatatgaaatggatttttctaaaatgaaacctttagaaataaaagaaactgttgctccaatcttcgaaactttaaatatcaatactgttattttagattttgacccaagtattcaaggtaatgattttgacaaacaaccttattatcaattgtggcatttattatattcggcagaagatgatgataaattaaaagaaactttaaaaaccaaatttggtttcaaagaaaatcaccttccgtttcttttgaatattaatcttcaagccgattacggaagtttgagtgctaaggctatcaaaaaaatattaccgcatttgatggatgggcatatttatgacaaagcttgtttaatggtaggttataatcattcctcatcattaactacagcacaaaataacgatagagttttaaaggataccttagaattactcaagaaaaacagtttgcgaaatcctgtggtggagaaaatccttaatcaaatgattaatgtgattaatgctattatgaaagatcccgcaatgggaaaaccagatgaaattcgagtagaattagctcgtgagttgaaagcaaataatgaacaacgaaaaaaagctacttcggatattaataccgcaactaccgaacacgaaagaattagaaaattattgcattccgaatttaatatacctagagtaactagaaacgatattattagatacaaactttggctagaaactggaggaatttctttatatacaggaaatccaattaaagcgtctgatttattttccaaaaattatgacatcgaacatattattccaaaatccagattatttgatgatagtttttcgaacaaaacgctatgcgaaagacagctaaatattgacaaaagtaacaaaacagcttattcctttttacaagaaaagctttcagaaaatgattttgctgcatatgaaaatagagtaaaagatttatttaaaacaggaaaaataaaaagctatacaaagtacaaaaaactcttaatggcagataacgaaattccagaaggattcattgaccgtcaattacgagaaacacaatacatagcaaaaaaagccaaagaaattttattggaagtttccagaaatgtaaccgcgactattggaagcgtaaccgataaattgcgtgaggattgggaattggtcgatgtgatgaaagaactcaactgggagaaatacgacaaattaggtttgacccatattgaagaaggcaaaaacggagaacgattgtctaaaataaaagattggacaaaacgtaacgaccaccgccatcacgcaatggacgcgataacggttgcctttacaaaacctgcatacattcagtatttaaacaatttgaatgctaaaacacaaggtgaaaataaagctaattcaattattggtatagagaacaagcatttatatcgagataaaaacaacaaattacgtttcatttctcctatgaaaaactttagagaagaagccaaaaagcaactcgaaagtattttgatttcgtataaagccaaaaacaaagtagttaccaaaaataaaaacaccactaaaaaaaagcggtggaaccaatcagaaaattcaactaacacctcgtggacgattacataaagaaacggtttatggaaaattgcagcaatatgctactaaagaggaaaaagtaaatgcgagttttactgaagactatattcaaaaagttgccaaaaaagaataccgtgaagctttgttaaaaagattggaagaaaatgacaacgaccctaaaaaagcatttacaggtaaaaatgctttaaacaaaactcccatttatattagtttaaaggacaatattatagttccagaaaaagtaaaaacagtttggttagaaaccgattataccattagaaaagatattacacccgatttaaaaattgataaagtaatcgatgttggtataaaaagaatactccaaaatcgtttgaacgaatttaatggagatcctaaaaaagcatttgttaatctgggcgaaagcccaatttggctcaacaaagaaaaagggattgctataaaacgtgtgactataagtggtgttagcaatgcacaagctttacacaccaaaaaagaccatttgggaaatgaaattttagacaaaaacggaaacccaattccagtagatttcgtaagtacaggaaataatcatcacgtagctatttacagagacgaaaaagggaatttacaagaagaagtggtttcattttatgacgctgtcattaggcgaaatcttggattatcagtaataaataaaaaccatgaaaaagggtgggaattcttattttctatgaaacaaaatgagttttttatttttccttcggatgattttaatcctcacgaaatagatttattgaatccgaataattatcatttgattagtcctaacatgtttagggttca

SEQ ID NO: 1567 - DNA, 10559 bp, synthetic construct
  misc_feature 1..10559: note = Synthetic
  source 1..10559: mol_type = other DNA
gggcggggttcaaagcggcactgaggtgccgcactccaaaaggggtggggtgatgatggtcacggtcgcgcggggcggtaggtgtacgagtaaggaaagagagtgaaatcgtactcgtacacttgctcttacactcgagtcgtgaggggaggcatgatggttttgtgcgccaatgctttgcttacggatgcggggtcggccagtttccaatctcctttggggtcgggaaccatcttgggataaaggatcattccgttctcgcccttgatcctcacaaggggtggcttgggtggcggcttcatccggggagtctctcctctccggacaagggattcaagctgattgatgcggcgactcggtgaccgccaaggattcttttgagccgcgtgggtttccgtgagtctgtatttgcacccacgagcctaattagccgaaattgttggttcggtcgttctccattgcctgaattgctgaaagagcaagcaccaggaaagccaccgaacttcgagaataaaaaaaccccaggcgcagggtagcggctggggcaggttgcaatgcagtgcctgcgaataaatcttgttgcgtaaaacccacaagcacggattgattacactggtccaagactatgcaattcggcatatttgtcaacgcgcaaactgcggtacgcggtaattcatgcgcacaaacgttggaaacaggaggtatgcaatgaagatcatcgggcttgatgtggggacgaattcagttggttcggcttggatcgacactggaaacgggctcatccataccggagtttctattttccccgccggaattgaagcttctagcgagcgaggaaggggtgatccgaaaaaccaggcgcggcgtagagccaggcaaacccgccgcagaatccagcgactagcccttcgcaagaagaagctgcgggaggttcttgttcaacacgacttgttacctggtgatgccattcaacgaaaagccttgttcgatcaccctacgatcactccatggcacttgcggcgcaagggcctttacgaggaactgactccctacgaatttggaagggtccttacccatttgaatcaacgccggggaaccctcggtgttcgcgtcgagcctcatgaggaggcagacgaggcaaccggcaaaaaaccgaaagatgaggcggaaaaagaaaaacaaagcaccaaagagggcattgttcgcgccatgaagtggctgaatggacgaacctttggtgaagcgatggccgaaaagttggacagccttcagatccaagcgaacaatcttaagaaaggaaacttttcgcctactcccattcgcaatcgcaacaaaagctatgagtacatcgcggatcgaagcatgatccacgatgaatttcagcgcttgtggaagaagcaatcatctttcaaagggcctcttgccccactcctcaccgatgacttgcgatccctcctcgaccagcctgaccccagtcagtatggcgacgcacagatctggcgctatggagggatcttgttcgggcagcgcaagtattactggaatatttcttcgctcgggaggtgtgagctggagcctacagatcggggctgccccgaaggcgatagccgtgctcagtattttagggtgctatgctttgcgaatacgattcgtatcgaacaacgtgatttcggtattcgcgcactaaccccagaggaacgggcaaaggtgattgcggccatgcgctcatcccccagaatcacacccgcaggaataaaaaaggcgctcggtatcgataagaaaagcctcaaggcgaagggagagtccgaggactattaccggttgaacctcgatcaagacgaaaaggcggacatccatggcgattggttccaatcctgtatcgtcgtgccggtttggggcgagaaggcgtggagccatcttgacgaaagaacccgcagctcaatcaatcgcgccgttctcaagttccaaatcgaccaaccgggcgacgaggcaaaattgcgtcaaggcgcggcgacctggtggaagcttgaccctgaacaaattgagcgttttatcgcggcatgggctaaaagtccgtccgccgaccggcggctgaatctgtccgcgcgggcgatttccaatctactgccctaccttgagaatcctcatgacatcggcggcgaacagccgggttggcatactgtaacgacggccaggcaggcttttgcggaagatcccggcaatcgggccactccagagcagcgggtgcgttatgcgtggcagatcaatgatcgggtaaagcaacttttacatgaagcatcgggtggagaaaccgataaagttgcccgctggcttgccctgcgtttttccaataaatatgatcgacacttcgtggccaagcaccccggcaagttgcctcctccgccgatcctctccaatcctgtggttcgaaaagcaatttatgtcgttcgggatcatattcaggcctatatggatcaatacgggcaaaagccggaccggatcgtgattgaattggcccgcgatgcttcaaaaaccaagacagcccgtgatcgggagttgaagctgatcaaagaccgggaagcgaaacgcaaggaaattgtagacaaatacaaattaagcggggagtcaccatctcagcgagagaaggcgattcggcgggttctcctctgcatgcagcaaaatcgtttgtcggcctacagcaacacttgcatcaccgagcaggttgcggccagaggctacagtgacgaacacggcccgttggaaattgatcacatcgtgccgcgctctcggggtggggaagacggattgaacaaccgcgttctttgttatgcgcatgagaaccgggaaaaaggcaaccagaccccggtcgagtggcttagcaaggaggcctttgaagggcttgagtcgcgcttcgagaaatgtttgcacaagccggacaaaacttccccggccacggcttacttcactaaaggagggcgaaaactaaaatggaaaaacctccatcgcaaaggcggcgagattaacgaggactgggccgaatcccagttgaccgacaccgcgtatgcggctcgtgaggtcgctacataccttcatgccgctctctttcccgatgagccaattgaaaggaaaggcggctgccgacggatccttttcaccaatggtgccatcacggcggaacttcgtcgagattgggggctttccgttactcatggtcaagaaaaggatcgcgccgatcatcgtcatcacgcgatcgatgccgcgattatcgccatgaccagttccaaagttgtctacgaccttgcgaatgcccgaaaagatcttgagagcagggttcaggagtataagcgggccggaaaagatccctcgcaattaaaacggcatccgatcctaccgccgaaaccctggtccgaccttaaagccctttatcaaaaagtcgttgatcccatgtttgcccgcaatccagagggcataccaatctgggcggttgcccatactccggtgaagcggcgcatttgtggcgcctttcacatggagacattgttcggaatgatgaattctgaaaaggggcactttaccgtgcgggtaccgattgctgaattggccccagcctactttgacctgtcccaaaagcaaaagcaggaccttcttatgaatcgttatcctgtcgcacaggatgatccccctcttgggcgtaactcctatctgattcgtgatccttcgcttcgagttatattgagaaatcagcttcttgcgcttggtgtcgatgtagacacctgctcgaaaactgctctcaaggcagcccttacatcgaatgccttttcactccctagcggcgtacccatcaagaaggttgtatgctatcgaactattgccgaaccggtaatctatgagtacaccagcgctgttgatcctgagcatcgcgaggtcaaccgtgtctatatgggcagaaatacccaccatgtagaaattcgagaaacgtccgaaggcaaatggaaagggtgtgccataaccatgaatgacgttgccgcacagaatgccctgaagctaaaggcgttacatgactgtaaaatgaggtacccagatgaaagcgaacgaaatctcagaaagcaatgccttcgtcggactcagctcgattttcccttagtcaaccgaagagacactcaggatggaaggttcgtcatgtccctttgtgaaggcgagacccttctcatgaagaatcctgaaaccgggttgccagacgtctttgcggtagtcaaaattgctgtgcaaggacctaaaattgcctttaagcatcattcgatacaaaaaggacccgacaagcctgaaaaaacgtccaaggatgtactagtcacttcatcatcaatcccattgattgagattacaccgggcagtcttctcgggaagcatagtcttccgaacggttcacctcccagaaaagtcaaaatcacccctctaggctcaatcacatttgttgaccgagattaagtatgctgaagaggaccatcgatatttccgagggtccggcatttcttcgcgtggaaaatcgtcagcttgtgatcgagaagaaccgcgaagttgccgggatgattccctgcgaggacatcgggatgctcattgtcgcgagccgtgcggtgaccatgacgacagcggtcgctgaagccctttgtgaagctggctccgttgtggtattctgcgggtgcgacaatatgccttcaggcatgctcctcccgcttgagggtcatcacttgcctcaggaacgcctgaatttacagataggcgcgaagctccctgcgaagaagcgaatgtgggcgtccattgttagcgaaaagctccgccgacaagcccgaaatttaccggatgaccatgtggccgcccgtcaaatccttgcgttggtaaagaagattcgatccggagatccggagaatgttgaggggcaggcgagtcgggcctattggccggcgttcctcggcggtgattttcgtcgcgatcccaaaggattaccacccaacaatttactcaattacggatacgccatccttcgagcggcgacggctcgggcgatcgtgaccaccggactccatcccggatttgggcttcaccaccacaatcgagccaacgccttctgtcttgctgatgacttgatggagccctttcggccttgggtcgatgaaattgcacggcaactttatgttgaaggctggacccatgttaccaagcccgtcaaggcggccatgcttgggctcctgtcccaaaccgtatatcaagaagatcaatcaagccccttaaccattgccctccagcggttcgccttctcctacgtctcgatcctcgcaggaaaggaagatgccctgattatcccggactggaaataccgaccttagccgtgcaactaagtgattatcgcgccatgtggattcttgtcatgtttgacttgcctgtggataccgacaaggcgaagcggcaatatgtgctctttcgtaaatttctgcttcaggatggatttaccaaacttcaattctcggtctatgtcaggcattgcgcgagcgaagaaaatatgcaggtccacctgaaacgaattgaggcccacataccccccgatggtgaggttcgtagcctatggctcaccgaaaagcaatttgcgcgcatgcgaacgttcctcgggaaaaggcgaaaacccgcgccctccgtgcctcagcaacttgagtttttctgaagacggagggcgctaagccccacccattcaacgccttgcttcggaaagagtgtaatcaatccgtgcctgtgggcaatccgcaacgccaagttcataggagcgagaagcatcatagtgtaatcaatccgtgcctgtgggcaatccgcaacgagcagggagagctttccgcgtggagggaagtgtaatcaatccgtgcctgtgggcaatccgcaactcctcagccttcgccgccaaaaaagcggaagtgtaatcaatccgtgcctgtgggcaatccgcaacaagcgatgccaagcgttgccgaaccgggcgagtgtaatcaatccgtgcctgtgggcaatccgcaacacggtgaacgagcgcgggttcaaggacgcgagtgtaatcaatccgtgcctgtgggcaatccgcaacacgggctacgaccggcgaggcttcttgggagtgtaatcaatccgtgcctgtgggcaatccgcaacaacacccaggcggcaccctgcttcgcttcagtgtaatcaatccgtgcctgtgggcaatccgcaacattgctgtgctcctggttgaaccgccggaagtgtaatcaatccgtgcctgtgggcaatccgcaacgaggtcaagggcggcatggatagccgcttgagtgtaatcaatccgtgcctgtgggcaatccgcaacggggcatggacggaggaggagttgacggcagtgtaatcaatccgtgcctgtgggcaatccgcaaccgagcggaacatcgcgacacaatggcccgagtgtaatcaatccgtgcctgtgggcaatccgcaacggagcgggggtacgggaaggcaaccagcgagtgtaatcaatccgtgcctgtgggcaatccgcaacgatcacatgccaagcattcggagcctcgaagtgtaatcaatccgtgcctgtgggcaatccgcaactgaaaaggcgttcctggcgtatgccgcgcgagtgtaatcaatccgtgcctgtgggcaatccgcaacatgtttttgctggctggctccggcccttttagtgtaatcaatccgtgcctgtgggcaatccgcaacgccgtcctctcagtcatcacccttgccctgagtgtaatcaatccgtgcctgtgggcaatccgcaaccgcaaggcgggggagagggcgggtttcttagtgtaatcaatccgtgcctgtgggcaatccgcaactgtttgggattcatccctaaaatacaattcagtgtaatcaatccgtgcctgtgggcaatccgcaacgctggacacgatgacgacgaatatcgcgtagtgtaatcaatccgtgcctgtgggcaatccgcaacttcgccatcattcttatcatggcggcgttcagtgtaatcaatccgtgcctgtgggcaatccgcaacctcaaacaacgcgaccggattcgggaccgtagtgtaatcaatccgtgcctgtgggcaatccgcaaccgcaacggtggagctatggtgacggcgccagtgtaatcaatccgtgcctgtgggcaatccgcaacgacgatgtcgggggggagatcgaggaggcgagtgtaatcaatccgtgcctgtgggcaatccgcaactggagaggagggagggggaggggtagaggagtgtaatcaatccgtgcctgtgggcaatccgcaactatgccttccccgacaagaacaacggcattagtgtaatcaatccgtgcctgtgggcaatccgcaaccccggtgcgctcccaccggagtgcggtttagtgtaatcaatccgtgcctgtgggcaatccgcaactaaatgaaggttggacgaatcgttcggacgagtgtaatcaatccgtgcctgtgggcaatccgcaactggcgcgcctggcggcgatgaggcggcggagtgtaatcaatccgtgcctgtggcgtgaattttcgaggtgtttactgaccccctgcaagttggctcggggcgtcgagtcgagggagaggggggcgctcggagtccgcgttgtggccaccgcgggtggggttgtgaggtgggggaagaaggtagaagtcgagtacgattaggattgcgattaggagggggagggtgttggggtgggaagggtgtgggaggttgaggagggtggctggtggttatgggggtaggttttgtttagaggggtgggtggagtgggcggggttcaaagcggcactgaggtgccgcactccaaaaggggtggggcgatgatagtcaggcggtgtcctgaacactgatggggggattacgagtaagagtaagagtgaggtcaggaggggggctgggattgggcgagggcttggcgggtggcgcgtttgcggtgacggacgatttcgccttcgatcatgtagatgacatctttggagatgttggtggcatggtcggcgatgcgctcgaggttgcgggagacgttgaggaggctgaggagggcgctgaggtgttcgggatgtttgcggatttgctcttcgacgatgctgcgcgggcgggagaggtggcgggggaggggagctagattgggtagttaagggccctgatccccggtaggaaccgcgcttgccaaacaaggcgttcggagtaggatattgagtatggaatcagaaattatctttcacgtggaggaagatgttgcggaaggtgggtttgtggcgcgtgcgcttgggcattccatcgttaccgaagcggattcgtgggaagagttgcgaagcaacatcaaagaagcaacactttgccacttcgatgaagggcaagctccccgaatcatccggttgcatcgggttgtagacgaagttctcgccttggtatgaaactgccgcgtgatgtatcggcatcggctttggaacaaagcctaaagaaggcgttcggctatacgttcacgagacagattggatctcattgccgattaacgacatcggaaaagggggtacaccacatcacacttcctgcgcataatccacttaagccgggaacgctgcggtccattttgcgagaggttgcctcgcgtcagaacctcaccactgatgaggttctatctttgctgaatttgtgagatgggtatgggggtaggttttgtttagaggggtgggtggagtgggcggggttcaaagcggcactgaggtgccgcactccaaaaggggtggggcgatgatagtcaggcggtgtcctgaacactgatggggggattacgagtaagagtaagagtgaggtcaggaggggggctgggattgggcgagggcttggcgggtggcgcgtttgcggtgacggacgatttcgccttcgatcatgtagatgacatctttggagatgttggtggcgtggtcggcgatgcgctcgaggttgcgggagacgttgaggaggctcaagagggcgctgagatgttcgggatgtttgcggatttgctcttcgacgaggtcgtagttgcgggcgcacatggcgtcgacttcgtcgtctgagaaccagttgtcgcgggcgaggttggcgtcgcggttgatgagggcgtcgaggctgcgggcgaccatttggacggttttttcggccatgctgctgatttcgaattcgacgttgggctcggggagggagcagagggcgacggcgcgcttggcgatggtgacggcgaggtcgctgatgcgctcgaggtcgtggttgatcttgagcatggcgacgatgtagcgcaaatcgtgggcgacgggttggtggagggcgaggattttgaggcattcctcctcgacgtcgacttcggcggtgtcgatgaggtggtcttcctggatgacgcgtttggcgagggcttcgtcgcgttcgaggacggctttgacggcgttgcgcatgttttcctcgacgtgggcgccgagggagaggatttgctttttgagtttgtcgacttcgcggaggagatggatgggcatgggtggactcctaagttgcggggggtcagccgaagcgtccggaaacgtaggcttcggtttgggggttggagggggacatgaagattttttcggtgagatcgtactcgatgagtttgcccatgtacaggaaggcggtgcggtcggagacgcgggcggcttgctgcatgttgtgggtgacgatgatgatggtgaattcttttttgagttcgtggatgagatcttcgattttgccggtggcgatggggtcgagggcggagcagggttcgtccatgaggaggatttcggggcggttggcgatggcgcgggcgatgcagaggcgctgcatctggccgccggagaggccgaaggcgctttcctggaggcggtctttgacttcgtcccagagggcggcgccgcggagggagcgttcgacgacgtggtcgagttcggattttttgttccgtccggcgacgcggaggctgtagacgatgttttcgtagatggatttggggaaggggttggatttttggaagaccatgccgatgcgtttgcggagggagatgacttcgaggagggggtcgtagatgctgtggccgctgatgaggatgtcgccggtgtggcggatgccgtcgatgaggtcgttcatgcgattgaggttgcggaggagggtggattttccgcagccggagggaccgatgagggcggtgacctggcgttcggggaagtccatggtgatgtcgtggagggtctgggcgcgtccgtagaagaagttgtagttgatgacctggatctggtgggggttgccgccgtgggcgtgggaggtgtcgcgggcggcgacgtccatgcggggaggggcggggggggggggggggggcggggggggggggggggtgggggcggggggggggggggggtgggggtggggggggggggggtgggggcgggggtcaaagcggcaccgcggt

SEQ ID NO: 1568 - DNA, 18325 bp, synthetic construct
  source 1..18325: mol_type = other DNA
  misc_feature 1..18325: note = Synthetic
ctgacattcagacgtaactccttgcctggttcataatcctttatgttccaatcttggagggtatatactttttgtgcataagcgcaagttagtgcaagcgcgaattgtaatgtgataaatagtttcttcataattgtttattctttgccgtgatagatcgcataatgatatttgataatctggctgcaaaaatacaaaaaatatcagattctttaacggaagtaataggataaaattccgattatcataatattgtcctattattggataatattttgagctattggtaactgtttattttgtacctttgccgacaaaatcgcaacacattactttcacacgtatgaacagaaaaagaatattggctctcatcgccgcgttaataacgattggggtgacaaaggctcaggatactattgatatatggaaccttccgcccctcagcatagagcaaggacgttataccaccgactgggataacctgagccggcaatataatacgcctgcatggtggcgtgaggcaaaactgggtgcatggtctcactgggatccgcaatcagcggcagaggatggtgactggtattcgcgttgtatgtatatggaaggtcatccccaatcgaaattccatcgcgagcatttcggccatccttcggagtatggctacaaagaactgtgtcgcgattggaagacggacctttgggaccctgaagacttgatgcaactctaccagaagatgggagcacgctacttcttggcattgggcaatcatcatgacaattttgattgttggaatagcaaatatcagccttggaattctgtcaatatcggtccgcatcaggatattgtaggcatttgggagaaggtggcaagaaagcatggaatgcctttcggcataggtttccataacacccctgctcgcacttggggacagttcatgcctgtcagatacaccagcgataagcagggcgacaaggcaggcgttccctacgatgccatgctgacaaaagctgacggttacaagcccaatgccgatgggacggacaaatggtggaaggggatggatccgcaagatttatatggtcctattcatcacgacggacgcaaatcgttagagagtccgtttgccaaccaattcatgtggcgtgtggacgatgcaattcgcaaataccagcccgacatgatctactttgatgaccatgccggcgactcgcaagtggatatgggcatagatatggggcttggcaaactgacgcctcagattatcgccaatttctacaatatcgcagacaaacgcacagaagggcgcaaggaagtggtagcaacattcaagggtgtcggtgggcgctacaacagttttcagcgtaaccccgaaatggttggcatcgtggatcgctcattggtaaaaagcacagagctttacactgaagacgacatcatggcttttcctttccagacagaagttagtctgcaggactggcattatcagcaaggcggcagttatcgcagcgctgaggaaataatcactcgtctgatgcagaatgtgtcgcgtaatggctgcctgctcctcaatatcacacagcatgggcgtggcaatatcgatgatgaagcacgtcagatatgtctggacttcggtcgatggattgatatcaaccaagaggctatttacagcgcacgaccattcgatgtatggggtaataacgatgtcatctatactcgtcagggcggtcatatctatgccgtcatcctgcatccctcatccgatcccatcgtcctgcctgcactctccagtcaatctgcttctgtagggaaaatcacaaaagtggaattggtggagaacaatcgtgccgttcctttcatccagtcgccagagggattgacacttcagctgggcgagcctttgcgttcggaaggcatccaagacatgaagctggcaatgggatataaagtggtaagaatcagtcacgataaggcatggtttaacgatgacgacccaggtgtgcgcactttcggatgggaccgccgttgcaacacccatgaaggcgatttcaacaacgacctatccttcagcaaccaggccggcgacacttggaccgtaactcttgaagcccgaaaattcagcatcatcgcaccgcaaggaatggggcagggcatcttggaggtactcgtcgatggcaaacacgtgggggaggtgtcttttgtcaagcagcgggaagtaaagcatcagtccgtcgtcttcacctcgaaaaagctgcgcaaaggcaaacacgaaatacaactgaagaacaaaaacggaatggttgccatcgatgcaatcatcattcaataaaacatcatcatgaaacgtattattcttttcacgttcttcctcacatcactgtgtgtacacagctttggaaaagacaaattcgaatcacccaaccatcagttgagcgctgaggtgaatgggcagtcagtgacgttatacgacaaaagtaagcagatggtgacacgtatccatctcggcttgataaccgataagggaaatcttgattcaggtttggtgctgaaactatcgactgccgcaaagacaatcaaggccgactataccatggtcacaggcaagagaagtcattgcacgaaccgcgcaaacgaaaagacttttacttatgccaatgcaaacaatatgacccttgaggccatcgtcagactctataatgatggtgttgccatccgctatcgtatcccgcaaggcgtgaagataacagacgattgcacctcattctatgtggcagatggtaaggacagatggatagctccttacgactttggcaacgaacaacctttcccacacgacacagaaggaaagactgtaaaagacagaaatctgcgtgatgtaaccaatggccaatggagttatccagccttggtggagccacaaaaggggctgtttatgctcattgcggagtcagatctgcgaagtaacgacagcggctcgtatcttgtcaatgccgacaattccgagcaatacaaggttcaactggtaggtccgtctgctttctgcgatggtttgtcaccttggcgtttcgccattattggctctttagcagatgtggtcgaatcgactctcgtcaccgatttggctacaccaagccagattgccgacacaagttggattcagcccggtgtcagttcctggatctattgggcatataatcacggttccaaggattatacgttggtgaaacaatacatcgacttggctgcacagatgggatggccctattgtctcgttgattgggaatggcctgagatgaccaacggaggtgacatcaacgacgtgatggcatacgccaaacaaaagggagtcaaaattaacctgtggtacaattccggcacatcgcttgtaggacctcacgccccacagccacaagaccggctgaataaggcagagagccgtgaacgtgagatgcaatggctggaaagcattggagcaagtggcatcaaggtcgacttcttctcgcccgacaacgatacaatggtcaattattacattgatatactcaaagatgctgcccgtcaccatctgctggtcgatttccatggttgtaccatacctaatggatggcagcgcacatggcccaacatggtgagcatggagggcatctatggtgcagagtggtacaacaactatgagctgatgaccaccttggcgccaccccacaatgccaccgttgtctatacacgcaatgtcatcggtccgatggactatacgccaggcacattcaccgacagtcagttcccccacaccaccaccaatgcacatgaactggctctgcctgtgctcttcgagtcgggcattcagcacatggccgatcgccccgaaggctatgagtcccttccttttgaggcaagacaagtctattcacacctgcccgccgcatgggacgacaccaaactcctcgcaggctatccaggcaagagtgccgttgttgctcgccgttcagggaaaacttggtacgttgcaggaattaacggcacagatgaagaaataaatcttgctttcacactgaagcggctgaatctcaagcccaagaaggttctgttgttcagcgacggcgaggcagagcgcgacatcaaagtttccagccccactctgagcggtgacaaagtctgcattgcttgccgagcacgtggcggttttttaatggtgatgtaatatgccgaaaatctcaaagagacacgctttatatatgcccaaaatctcaatgcgtaccattcgtcaagtttaccacatccactttttctctatcaatgtgaccttacccccccacattatacacctttttgagttttttgccgttgcagattatatgctttttcgagaaattattttgaggaaaacttgtttttcaccataaaaatgagtgacctttgtagtcacaaaaaaaaggattgttttatgtgcacagaaggttccggtgtgcacttaggacaaagaaactggaattaaaaaaagatttcctctcaaaaaaattggaattaacgaaaatactttctatctttgcaacgtcagaacatttgtttttgactatccgggtagaatcccgcgtggggtaaggctttatcgatactgcccattttatagagagccgtcgttcaacgattgctctttatttttgtttgtacttcttcatgaagttcttaaaataagattggccaagcgaaaagatcatggggacaggtgtttgacttcttgtcaagtgagaggaatcaaatacctgtccccatgattcccagagttaagagttgtcggctttcccaatcgcgaagcgataattctaaattctaaactcttaattgccgaaggcaacaactctaaattcttaattctaaattctaaacttaaaatttatttttatgaaaaagaacgaactttggaaattcgtgattcagacggccatctcgattctgtctgcaatcgctacggcactgggagtaacaagctgtatggcatagaaaatcagtagaccgtaaaacagcgtattatgcacaaaacgactgaaatgtgcacgtctcagtcgtttttgtgcattttttttggctgtgtgcgcaaaaagtagtacctttgcggtcgattttgaaaaaaatcacccgttttaaaacgaaaatacattattattttataattatggctttaaaaattgtagtacttgctaagcaggtacccgacacacgaaacgtgggtaaggacgccatgactgccgaaggcaccgtaaaccgtgctgccctgcccgccatcttcaatccagaagatttgaacgccctggagcaggcccttcgcctgaaggagcagaacccaggctcaacagtaggaatcctcacgatgggtcctccacgtgcaggagaaattatccgtcagggactttatcgtggcgctgatacgggttggttgctgaccgaccgtctcttcgctggtgctgataccctcgctacatcttacgcgctggctactgccatcaagaagattggcgatgtggacatcgtaatcggtggtcgtcaggctatcgacggtgatactgctcaggtaggtcctcaggtggctcagaagctgggcctcaaccaggtgacttatgctgaggaagtgctgagcgtaaaggatggtaaggctactatcaagcgcgtcatcgacggtggtgtggagactgtagaggctcctctgccagtagtaatcaccgtgaacggaagtgctgctccttgtcgcccccagaatgccaagctggtgatgaagtacaagcgcgctacctgtcctatggagcgccctgctgagggtaccgcttacgactatctgtacgatgagcgccctgagctgacactgaaccagtggagtgttgctgatgttgatggcgacgtgaaccagtgcggtctgaatggctcgcccaccaaggtgaaggctatcaagaacatcgtgttccaggctaaggagtcgaaaactttgacggcttcggatgctgatattgagggtatgatcaaagaattgttggaagagaaaatcattggctaataagatatgaataatgtttttgtttacgtagaaattgaaggaacaactgttcaagaggtttctcaggagttgctgaccaagggtcgcaagctcgccaatgaactgaacgtagagctgcacgccgttgttgccggtacaggtatcaagggtaaggtggaggatcagattctgccttatggtgttgacaagctgtttgttttcgacgctaaggatttgttcccttatacctcggctccccacacagatattctggtgaacctcttcaaggaggagcagccacagatttgcttgatgggtgctacggttattggtcgtgaccttggtccacgcgtatcgtcatcgctgacatcaggtctgactgctgactgcacagagctcgagattggcccttacgaggataagaaagagggtaagacatacgagaatctgctctatcagattcgtcctgccttcggtggtaacatcgtggctactatcgtgaaccccgaccatcgtcctcagatggctaccgttcgtagtggcgtaatgcagaaggctatctatgatggcgcctgcaagaaggaggttgtttatcccgaggtaagcaagtacgtcagccccgaggctttcgtcgtgaaggtgctcgaccaccacgtagaggctgccaagcacaacctgaagggtgcgcctatcgtggttgctggtggttatggtatgggttgcaaggagaacttcgacctgctgttccagttggcaaaggtacttcatggtgaggttggtggtagccgtgctgccgttgatgctggctggctcgaccacgaccgtcagattggtcagacgggtgttaccgttcatccaaaggtgtacatcgcctgcggtatctctggacagattcagcacatcgctggtatgcaggactctggtatcatcatctctgtgaacagcgatcccgatgcgcctatcaacaagattgccgactacgtgattgttggtactgtagaagaggttgtacccaaactcattaagtattataagcagaacagtaagtagcctcacccccaacccctctccgcttggagaggggagtatatagattctgtgtgatggtaggcaaatggtttgagacaagtgctcctgacaggtatgaattgttgaaggatttcgcaaaaagaaaccgaaaggagatgacagaaagtgaaacggtgttgtgggaaacattgagaaatctcaattgtggataccatttcagaagacaacatccaataggcgactatatcgcagatttcatttgtctgaaaagaaaaacttgtcattgaagtcgatggtggttatcacaacgagccaatacagcaacaagacgaccaagtgcgtacagaatttatggaaagaaaaggctacactgttattcgctttaagaacgaagaaataagcaacaacctccaagaggttattatgagaataaaagaacaattgtttaacgaataaaaatgaagctcccgacccatctccctttgaaggaacaagtctattcactcccctctgctgaaagaaaagggtttcgctgatgcgaaagaatatgactacgctcccgttgacctgggcgatgccatcgagaactacaagcagattctcgacatcactggcgacgtggctgccaacatcatcgagcctaactctgagagcgttgacctggaaggtccacacctcgagaacggccgtatgatctacgcctctaagacttacgagaacctcgacgccacccgcaaggctggcctgtggggtgtaagtatgcctcgccgttacggcggtctgaacctgcctaacgccatcttctctatgctgagtgagatgatttctgctgccgatgccggtttccagaacatctggagcctgcagagctgtatcgacacgctgtatgagttcggtagcgaggagcagcgccagaagtacatcccccgcgtttgcgctggtgagggtatgagtatggacctgactgagcccgatgctggttctgacctgcagcgcgtgatgctgaaggctaccttcgacgagaaggagaactgctggcgtctgaatggtgtgaagcgtttcatcaccaacggtgacagcgacatccacctcgtgctggctcgttctgaggaaggcaccaaggacggacgtggtctgtcaatgttcatctacgacaagcgccagggcggtgttgacgtacgtcacatcgagcacaagctgggtatccacggttcacctacctgtgagcttacctataagaacgcaaaggcagagctctgtggtagcacccgtctgggtcttatcaagtacgtgatggctctgatgaacggtgcccgtctgggtatcgccgctcagtcagtaggtgttgagcaggaggcttacaacgagggtctggcttacgctaaggagcgtcagcagttcggtgataagatcatcaacttccccgctgtttacgatatgctctctcgcatgaaggctaagctcgacgctggtcgttcactgctttatgagacagccgcttatgttgatatctacaagtgcctcgaggacatcgagcgcgaccgcaagcttactcccgaggagaagcaggagttgaagaagtaccagcgcttggctgatgcattcacaccactggctaagggtatgaactcagagtacgccaaccaaaacgcttacgatgctatcagcatccacggtggttcaggtttcatcatggagtacaagagccagcgcctgttccgcgacgcacgtatcttctctatctacgagggtaccactcagctgcaggttgttgctgctatccgctacatcaccaacggcaccatgctcaacaacatcaaggacatgctggcaggtctcgaggttagcgatagcctgaagaacctgaaggcccgtgttgagaagctcatccccgtttacgaggaggctctgaacaacgtgaaggcccttgagaatcaggacgctcaggacttcctggctcgccgtctctatgacatgactgccgagctggtaatgagcctgctcatcatccgcgatgcttctaaggctcctgagctcttcgagaagagtgctaacgtctatgttcgcatggccgaagaggacgtacttggtaagagcgcttatatcaaggccttccaggtagaagaccttgccaacttccgcgctgcagaagaggagactgctgctgagtaagcaatcccaatatctatagaaaaagagtatcccgaaaaggatgctcttttttttgtgaaaacagctagtcgctgccattgagcctaaaacagcttgcgaaacagcctgaaacacgatgcgtttaagcctcaaacgcaatgcgaaatagcatcaaacgcaacctaaaacagcatcaaacgcaacctaaaacagcctcaaacgcaaaacactaggccgagagtcctctgtcgccctctgaaattcgggtaaggatctccacaaccgttacctacacatccgccccacggaggagtggaaggtgcaaccgaatcgttcggcaatgaaagaagacgcttgtcctagcaaagagcacctgacaagtacccgacaagtacccgacaagtttgatgttatcaatcccaatatcatcaaacttttacagataattggtgagcaagagatgacagtgaaagttctgatgtcatcatttggccttaaagatcgagaaaacttcctgaacctgtatctcaatcccgccatcaacgagggctatgtccgcctactctaccctaactccccccgtcatccccgtcagaaatacctgctgacagaaaagggaatgacagtatcaaaaaaggcgaggtagtcacctacccctccttgaatgttttcacaacggaataatccttattgtgatttgctaaaaattagtgttgcaaaagtaaacatttcttatcaaaacgccaaataattcgaaagaaatttgtacttttgtggcagaataactaaaaacactataacatgaaaaagattcttggattagatttaggaacatctagtataggttgggcattaataaaggtcgaagacaacaataaccctacagagattctagatatgggagtcagaattgtaccccttgcagagaatgagggagataagtttactaaaggtcaagatattactgtaaacgcagatagaacaagggcaagaggtgcacgcagaaattatgacagataccaattgcgtagacaagcacttactgagaaaatgcgtcaattggaaatgcttccagatgaacacctcattaaacttcctatgatggaattatggcaactgagggctgatgctgttacgaaaaaaatttctcttaatgaacttggacgaattctgtatcaccttaatcagaaaaggggatataagcactcgcggacagatgtcaacgactctaaacaaagagaatatgtaaaggaaataaataatcgctatacaaaattgcatgaatcaaaaatgaccataggtcaattctttgcaaataaattggttgaaaccgcagtcgtacaagacggaaaaatcttttatatttttagaattaaagatcagatctatccgagaaatgcttatgaggaagagtatgatgctatcatgaaatgccagcagaaattctatcctgacatattaacagatgatataattgatgaaataaggaacagtattatatactaccaacgtgatttacgctcatgtaaacatttagtgtctgtttgtgaatttgagaaacgctgcttctatgatgcagatggaaacataaaacgaaataaaaaggacaaaattatttatgatggtccaaaggttgctcctcgtacatctccattatttcaagttttcaaagattggcagtcaatcaataatcttcgatttcataatcgtagaaacggatatctatatataacaagggagcaaaaggaacaaatagctgccttcatggataatcatgagattcttaaactcaaggatgtccaaagtctgctcaatattacatcaaagtctggatggtattgtgacaaggcaataaaagctggaattaaaggcaattcaacaaaatgtgctatattagcatccctatcttcattaactcattcaaaaatagctgagattactcgttttaatctcgaaacagaaactactaatatcgtagatgaagaaactggcgaaatgttagtgcgtattaggaatacatatcaaaacgaacctttatatagactatggcatatcatttattcgattaagaatgataacgaaagaggaaatgcaatttctaaatttcttaaagagtttgaagttgaagacgagactgttattaattccttgaaagaaattgattttgtcacaccaggttatgcaaatctttccgcaaaagctatttgtaagattctaccttacatgatggaaggattagattatagtgactcctgcgaatatgtgggatacaatcattctgatagtttaacgaaggaggagaatgaaaagcgagaactccttgataagattccagccttaaagaagaacgaactacgtcaaccaacagttgaaaaaattctgaatcaaaccatcaatgtatttaatcaaatcaatgaggatttaagtaaagatggagagcggataagtgaagtaagagttgagttggcacgtgagctaaaacaaagcaaagatgagcgcaatgaaactgaaatcggtattcgaaagcaacaaaagttaaatgatgaatacgccaagattttaaaagaagaaggcgtaaggccaactcgaaatagaatactcaagtatcgtttatggagagaatctaataagtcttgtttctattgtgagcaacccatcagttttcatgagtttctggatttctcagagacagaacgtgaacatatcatacctaagaaattaatgtatgatgatagttttgcgaaccaagtctgctcttgtcgaaattgtaataaagagaaaggcggacgtactgcgatggactacatgagaaccaaacaaaatctgcaattctatcttgacaaagttgacaaaatgtttcaagaccacaagattagtggaaagaagcgctctcatcttctggcatcatatgatgattacctatttcgaaaggaaaacggtaaagagacaaaagatgatattttgatttgggagaaacctatagaaagacaactacgtctttctcaatacatatctcgtaaagcacaagaactattaagaatggcttgtcgtgatgttactgtaacgacaggagaaataaccgctctaattagacacacgtggggatatgataccatcttacatgatcttaatttttcttcttataaagaagcgggattaacagagcttgttaaaggtgaagattcaggcaggactcgtgaaattataaaagactggtcaaaacgtcttgatcatcgtcatcatgcaattgatgctttggctgtagcgtgtacctcacgctctattgttcaacgtataaatactcttaatgctagtagagaggaaatacgtggggagataaaagctccaaggaaagaatggaaggatagtaatctgttacagcaatggataaaagaaaagatgccatttgatagacaatatgtcttacacaaggtagcttcaattttgatatctatgaaagcgggaaaaaaagcaacggttcctggaaaaagaaagatttataagaaaggtaagccgattgttatacaaacaggtcttagaataccacgtggccaattgcatgaacaaaccgtttatggcgcaataaatcaatatgataaagggcaaaaagtgatgaagattgttacccgttataagatgggagtaggttctatgggttacgtttttaatgggaaagaaacctgcgatgtcataaaaaagaagaatcgctatgaaatagtggatggaattcaaaaagctttagattatatcgttgataaacatattagggagattgtcaaggcaaggatgaatgaagcgtttcctgaaggagagacatatctcaccgaagcagagaaagcattagcagaaggcaaggcatatgatggtaaagctagatgtcaaaaggcgttagaccaattgaggacattaagcgaaagaccattatatgcagataaggataagcacattacgattaagaacgttcgctgttttactgggcttagcgctgttcaagaactaagatacaatgataatggcaagccaatatcatatgttcttaccaaaaataatcatcacgttgcaatttatgtggacgaaaaaggtgagcctaaggaaaatatctgttctttttggcaagtggttgaacgttcaaggtacaagtttcctttaatcgtaaaggatccaaagaatctttgggacgaaattacgcaacgcgaaaaggatggagagaaattcccagattctcttatccagtctttgccaccttctaattggagttttattgaaagtctccaattaaacgatatgtttataatggatatggatgatgatgattatataagaaacattgagacgaacaactatgaagaattgggaaagaatttatatagggtacaaaatatatctacattagattatttctttagattacatacggatacaacttcaataacaacacatgatgctgcattatgcaaaaggtttatccgaataaaaagttttaagtcatactttgcccataatccacataaggtgcagatttctttgttaggtaaaatagttcaaagttcataatgatcaaaaagaccctatgttttagcaatcctgcctatctctcattgaggaatgctcagttagtaatcaaactacctgaggtggagaaggctgacattctcacagaggactataagaaatccacagaggtgacacgacccatagaggatattggtgtagtggtactcgacaacaaacagattaccatcacacaaggagcattagaggctctgcttgaaaacaactgcgccgtcattacctgtgattcaaatcacctaccggtagggctactcctacctttggtgggcaatactactcaaaacgaacgattccgtgaccagttagaagcctcgcagccgcttcgcaagcaactatggcaacagaccatgcaatataagattcgcaatcaggcagccgtacttggcaaatactctaatacagagaccaaatgtatgcaggtatgggctaatgaagtgcgtagtggtgaccctgacaactatgaggctcgcgctgccgtctattattggaaaagtctgtttggtcatatccctggattcataagagatcgtgaaggtgttgcgcccaataaccttctgaactatggctatgccatactgcgtgcagttgtggcacgctcactggtagccagcgggctcctccctaccctcggaattcatcatcataatcgttataatgcctattgtctggctgatgatatcatggagccatatcgcccctatgtggatcaattggtatatgacatcaccgagcaatatggcgttaatgtggaactatcaaaggatatcaaggctgaactattgtcaattcctacccttgatgtggtgataggtggtaagcggagtccattgataatagctgctgctcagacaaccgcatctctttacaaatgttttagtggcgaactacgaaagattgcttatccagaaatgacatagcaacatattttatgattgcagaacgatttagcgaatacagggttatgtggctcttagtacttttcgatttacctacagagacgaaaaaggacaagaaagaatatgcaaagtttcgcaagcgtctcatggaggatggtttcactatgttccagttctctatctatgtacgtcattgcgccagcatggaaaatgctgaggttcatcgcaagcgtgtaaaagctatattgcctgagttcggaaaggttggcattatgtgcatcaccgataagcaatttggcaacattgaactattctttggaactaaaccacaacagccaaatgcgccaggtcagcaactagaactgttttagaatctttagtactgattttaattatttaatcattctacgccctattttgagtcaaaattgacgaaggggggcgaataatagaaacggagaatctcactcatctcatgggatcctccgttcttgcattggcattttttcttttctaacaatctttgcaactacttggcattcaacagattccacgaatcgtgatgtttatgccactgcaaaggtactaatttttcagcaaatcacaacaccagttaatagacattataaacggcaaagatgtttatgccactgcaaaggtactaatttttcagcaaatcacaacacaggcggcggcttgatgggcaaggacttggatgtttatgccactgcaaaggtactaatttttcagcaaatcacaacggtggacgtgacggtatcttcggcacaggcgatgtttatgccactgcaaaggtactaatttttcagcaaatcacaacgatgccgacgaactgctgcgcttcaagcagatgtttatgccactgcaaaggtactaatttttcagcaaatcacaacatgaacgaagagaataagatacctctgccagatgtttatgccactgcaaaggtactaatttttcagcaaatcacaacatagcgggttgcatccgcagggcgtgaacagatgtttatgccactgcaaaggtactaatttttcagcaaatcacaacgggttgtggatattattctgttttattgagatgtttatgccactgcaaaggtactaatttttcagcaaatcacaaccaagcggcaagcgggcaacgcgcgtgacgcgatgtttatgccactgcaaaggtactaatttttcagcaaatcacaacctcgcacggtgtgggtgaatcatcaagcatgatgtttatgccactgcaaaggtactaatttttcagcaaatcacaaccaagggagtacgcacccagaagatggtatgatgtttatgccactgcaaaggtactaatttttcagcaaatcacaacgagtattcccaatcgccatcgtcgggacttgatgtttatgccactgcaaaggtactaatttttcagcaaatcacaacagttcggacttgattgaacggatttattcgatgtttatgccactgcaaaggtactaatttttcagcaaatcacaacaaagtaccttgcgccctctcgcgtcagcatgatgtttatgccactgcaaaggtactaatttttcagcaaatcacaacaggtcagaacggagtatcatcgttgtagcggatgtttatgccactgcaaaggtactaatttttcagcaaatcacaacctgcgaagtcatggctaccataacgtcgtagatgtttatgccactgcaaaggtactaatttttcagcaaatcacaactaccactcatcggagctaactactggattcgatgtttatgccactgcaaaggtactaattttttagcaaatcacaacacgagaagattgtctatacggagagtgacggatgtttatgccaatgcaaaggtactaattttttagcaaatcacaacggttctgcatgggcgaatttgtaatcaattgatgtttatgccaatgcaaaggtactaatttttcagcaaatcacaacgaagtttaatttttcagcaaatcacaacgaagttcgtcttgactatttctttgtgcctggtgtatatgccactgcaaaaatactaatttttcagcaaatcacaactcgcatcggttgcttccttgaattaggctgattttcagccacagcaaaaagcatgaaagaaaacaagatttagaaagatttccgctcaaaaatttggaagataacgaaataatccctatctttgcaacggcaactaaatagaagcacttttaaactccgcttcagatggatagccccggttggtccggcaagcaaggccattaaagcggagttcctttttgtagtaattcttctgttgcagagaaagtgtagtcgtcaataattgcatacggcttgtagggaccaccattcttcatcttcccgcatagccagaacagtcctcacacctatcttcctgtcaaagtaggcaaagtacgcactttcgccatgcttaccttctgctactgtccgccagccaatatattcacctttttccaaataactgcgaatatctttggccaaagcgttcttgatagcattaaacttattgtctcgtgatgctttgcttacaatggtctttaggtcggtttttgttatctctacctccatcgtaataccgttagtaataataaaacgcaaaggatgatctttcaagtcatcggcctgagcaagtacctcagcccgaagccgtttgctttccttgtagtattcatcttcagttctcttcataatgcaaaggcactaacgagtctattccatgacgaccattttcatttcaatatcatcgattggcctgtcggcgcgaccagtagctgtgccttgaatcatctcaaccacgtcgagaccttcctctacctcgccaaacacggtgtattgcccatcaagatggggagtgccgccaacagtggagtaaatcttcagctgttcatcagtcagtcctgatttacctaccttactctcagcttctgctaccagtttgtcttgaagttcctgaagtccctcgcgatttctgtcacgacgcatctgcataatctcagtacgatgctctgatgcaagatcattaaatactgcctgtactttctgcattctcagttgcttggagaactggcgaagctgaccttcgttgtatatatctccccaaacaatatagaactgtgaaccgctgctacgacgctctggattcacctcatcaccctgacgggctgcagctaaagcaccacgcttatggaacagattgtccttgatctcagcttcaagcgtatagtctggaccacctacacccagcatctttccggctggtgctcctttagaatcagggtcaccgccctggatcataaagttcttgataacgcgatggaagagcgttccatcataatacccctctttcgccaacttcacgaaattatcgcgatgaatgggagtctcgtcgtataggcgaactacgatatcgcccagcatggtttgaatctttacttttgtcataacaatcctaatattttgtgcaaaggtacaaaaaaaagagcacattatcaaataaaaaacaagaaagccctgactcatttctgaatcagggcttcacttctaaaagatggcggcctcctactctcccgcattgcattgcagtaccatcggcgcaggcgggctt

SEQ ID NO: 1569 - DNA, 15164 bp, synthetic construct
  misc_feature 1..15164: note = Synthetic
  source 1..15164: mol_type = other DNA
  variation 7216..7304: note = n is a, c, g, or t
  variation 2203..2224: note = n is a, c, g, or t
gcactctatgggtcagtggatacaggacggtgagcgtaccatctttgagacctgcatcagcgtggagaacccggagaagaagctgctcttcccatctgacgcagagaacctggacggcctgaacttcctcgctggcaaacgcatcgacgaggtgaacaagaatgcagagcttggcacacgtctggcacacgtggatggcggagtgcctaacatcctcatctccattgagcgactggacgcatataactacggacagatgatatacttctttgagaaggcctgcgctatctccggtcagttgctgggcgttaacgccttcaaccagcctggcgtggaggcatacaagaagaatatgtttgccctgctggagaagcccggatacgaagaggagacgaaggctatcaaggcaagactgaacgcataggcatccgttcttgtatgattccgtcccatacggttctgattatatgataagaatccacctatacacaatatgaatcttaagaaacagtatatagcaaacgtagagcgctactcgaaagaggaggcgctctatttgcgttgtggctggtcgggagtgaagctgcctaaaatcagcctgggcttctggcacaacttcgggtatgacaatccatacgaacgccagcgtgaattagcgcactatgcctttgaccacggcatcacgcacttcgatttggcaaacaattacggtccgccctacggcgcggcagaagagaacttcggcaagatgatggacgaggatttccgtccttatcgtgatgaactgttcatcgccaccaaggccggctacgatatgtgggagggtccatacggcaactggggctcaaggaagtacctcatgtcgagcctgaatcagagcctgaaacgcatgagactggactatgttgacctgttctacagtcatcgctatgaccccgagacgcctctcgaggaaacacttcaggcactggtggacatagtgaagcaaggcaaggctctctatgttggtgtgtcacggtggccgctcaaggcgctgaaaagagcgaaagagtatcttgcggcgcgtgatgtgccactgctgatatatcagggacgactgaacctcatcgaccgtgagccgcaggaagagggcatccttgactattgtgcagacaacggcatcggctttatctccttctcgcccttagcgcaaggactgctgacagacaagtatctgaacggtattcctgctgactcgcgcatgacacacagcgcctacctgaagcccgatgcgctgacaccggaacttctcgcacagctcagggagatgtcagacaaggctaaagctgaaggctcaacgcttgccgacaaagcattacgctgggtattagagcaaagaggcgtcacctccgtactcgttggcatcagcaagacagagcagatggagcgcaacctcagggcggtattgaactgagaaattgagaattgagaaattagaattgagaattatgattactggagaacctcattagtaggagtaatcaaggggctaatatcgcgccagccaattctcaattctcaactctcaattctcaatttgattatagtgcgggatgtctgctaatacctgccacacattctgtgcggcatcatagcggaggcatacatgctgggtgccattactgataatgaggtaatgaacccgcaagagcatattataagtggtgacctgtgtcaccactttttttgtcagtgccacagtctcggccttatactctatcgccatcaacggatggcggtcacggtcatagagtatcgtgtcaacacgcagatgttttcctcctacgcgcagctccacctcgttggccatcagcgcagcaggataacctttgtggcttataaggaaatgtacgaaatgctgcctcacccactcctccggagtcagcgagacaaaacgatgacgcaggatgtcaagcacttcaagtttgccatcctgcgtctcgcgtatatgaatgtcatcatacgggggtagattcatatcttgggatacttacgcagccagccgtccagacgcaggcgcataacgccgaagaaagcctcgccgaagatgccgcctgacatcttgctggtgccctcacggcgattgatgaagataacaggaacctccttgattttgaagcctatcttataggccgtatatttcatctctatctggaaggcatannnnnnnnnnnnnnnnnnnnnnaccttgcggcgatagcacttgaaaccggctgtggtgtcatggatatcaaaacccgtgacgatgcggacgtactgcgaagcgaagtatgacatcagcacacgtcccataggccagtttaccacgttgacgccagagacatatctcgaaccgatagcgaggtcatagcctccgtcgggattggcatcagtcttcggagcacaggcggcataaaggcgcggaagatcctggggattgtggctgaagtccgcatccatctcaaagatatactgatagttattcggatgctccaacgcccacttgaaacccttgatataggcggtgcccaagccaagttttcctgaacgctcctccagaaacaactgcccctggaactcgcttgccataaggcgcttgacaatgtctgctgtgccgtcaggagagccgtcatctatcacaaggatgtggaaagactgctccagagagaagattgcacgtatgattttctcgatgttctccttctcgttgtaggtaggaatgattattatgctgtcgctgcttctcatcggtttgataccataaattattgctgcaaaagtacgaaattatattaaattggcaaaaggatttacggcttttttgcggatatatcaaatgtaattgatttttttttcgtaattttgcagcctgtaaatgttattaaccgaattattgaccgtctgtggcaagggcgctccaacgaaggccttgctccgaatgatggacaagaggacagcacgcaggtcatgcattgaaggacttacggcgagttctcttgccctgtattatgctgctgccacaattctgcgtgccgcaaagggcagcaaggacaccgcttccgatgcaggaaccgccaagggcaccgacactccctccaccatcttcatcatgcgcgatgccgacgaggcaggctatctctatcaggatctgtgccgtatgttgggcgaagacagcatcctatacttcccctcgtcctacaaacgcgccgtgaaattcggccagcgcgacacagcgggagagatgctgcgcacagagacgctgacgggcctcagcaaccgtcagggagcatcgtgcaccatcgtcacctaccccgcagccctcgcagagatggttatctcgcggtcagagctggacgacaggcaaattacgctcagcaaagggcagacaatccccatcacagacgtggagcatcagctgcgcgaactgggctttatggagcgcgattacgtctatgaacctgggcagtttgccattcgcggctccatcatcgatgtctattccttcagcagcgaggatccataccgcatagacttctttgacgatgatattgacaccatacgcaccttcgatgttgagtcacagctgtcaaaggagatgctggatgcaataaccatagtcccccacctcgacaagacagcgtccgagaaggtttcgctccttgagctgctaccccccgactcgctcatcatcactcccgatatgggttacgcgacggatgccatagactatatatataaggagggctactcccagcaggccatgtctgaccgtctgtctaatgccaccgaagtggaaaaggccgacatcatgcgcgaactcaatgcggagcgcaacctatgtcccgcctcacgtttctcacaacaggcggcacagatgcggtggatagagctgcgcccatcagcatcggcagactgttccgtaacattccacacgctgccacagccgctgttccacaagaacttcgacctgctggcacagacgctcttcgactatcacgcccggggatacaagtgctatatcgtctctgacagcacaaagcagcatgagcgcctggctgagatattcaacggaatacagataggagacggatgcgtcagcgatttccttaacgactggcgcatcagcggttcgctgcacgagggtttcatagatgacgacatgaagatgctgctcttcaccgaccatcagatctttgagcgtttccacaagtaccagctcaaggcgcagtcggccaagcgcggcaagatggcgctgacgctgaaggagttgcaagagatggagccgggtgactttatcgttcacgtggacttcggcatcggcaagttcggtggacttgtcaggataccgggcatcaatggcagcaacgatttccaagaggtcatacgcatcatctatgccaagggcgacaaggtggatgtaagcatccattccctatacaagatcagcaagtaccgccgctccgacaccggcgagcccccgcgcctgagcaccctcggcaccggagcatgggaccgcatcaaagagcgtgctaagaaacgcatcaaggacattgcccgcgacctcatcaagctctatgccaagcgccgccacgaaaaaggctttgctttctctgccgacacatacctgcagcatgagcttgagggctctttcctctacgaggacaccccagaccagatgaaggccacgcaagaggtgaagcacgacatggagcaggcacgcccgatggaccgcctcgtctgtggagacgtgggattcggcaagacagaggtagccgtccgcgctgccttcaaagccgcctgcgacaacaagcaggttgccgtgctcgtgcctaccacggtgctcgccttccagcactacaagacattctccaagcgactggacggactgcccgtcaccgttgactacctcacaagagcacgaacgcccaagcagacgaaggacgtgcttgagagactcgcaaacggacgcatagacatccttgtgggcacacaccgtatgctcacgaaggccgtgaagtggaaagacctggggctgctcataatcgatgaggaacagaaattcggcgtctcgaccaaagagaagctgcgccagctgaagaccaacgtcgatacacttaccatgtctgccacgcccataccgcgcacgctccagttctcactcatgggggcaagggacatgagcatcatgcgcactcccccacccaaccgtcagcccatcgacactatggtggcgacattctcacccgaactcatcagcgatgccatcaacttcgagatgagccgcgacggacaggtctatttcgtctgccatcgcatagccacgctggagaagatgcgcaccatcatagagcgccacgtgcctgactgccgcatagccatcggtcacggccagatgaagcccgaggagctggagaaaatcatcatcggcttcataaaccacgactatgacgtgctcctctccaccaccatcgtggagaacggcatcgacatacccaatgccaacaccatcatcatcagcgatgccaaccacttcggactcagcgacctgcatcagatgcgcggacgtgtgggacgcagcaaccgcaaggcgttctgctacctcctcgcgccaccgttagcctatctacccacagagagcaggcggcgcttagaggcactggagacattcgcagacctcgggtcaggcttcaacctcgctatgcaggacctggacatacgcggtgcgggcaacctgctcggcgccgagcagtcaggcttcatggaggacctgggctatgagacatatcagaagatactctcgcaggccgtcaacgaattgaagaacgatgagttccaagacctctacagggaacagatagaggaaggtgaggacctgacaggtgatgacttcgtggacgattgcaacatagaaagcgacctgcagatgtatttccccgactcttacgtgcccggcagcagcgagaggatgatactctatcgcgagctggacagcatacacaccgatgccgacctgcaggcttatcgcaagcgcatggaagaccgcttcggccctgtgcccccagagggagaagagctgatgatggtagttctgctaagacgactgggcagacgcctgggatgcgaacgactcatactcaagcaacaccagctgcagatgcagttcgtaagcaacgaggatagcatgttctacaaaagcaagttctttgagggcatactcgcctacgtgcaggcacatcccaagatatgcgacttcaaagtcatcggcggccacaaccgcctcataattaaaaatatcccaacagccaccgccgcaacccaagtgctgaaagaaatgggggaaagagtgaagagtgaaaagtgaaaagtgaagaattattcttccaaattgagaattgagagttgagaattgagaattatgattacatcagcaccccactgataacataattttaattcttcactcttcacttataattcttcacttttcacttccttttcttgcatatctcaaaacttaatcgtacctctggcttcgccgcgctcggtgcttgcaacgctttcatcaagcgaagcgactgaaagaaggtactccgtcttggatatgcaagagaaaaaacaagctttttctcttgcatatctcaaaacttaatcgtacctttgccagcagtaatcataatacataattcataatttgataattccccatcccattccctccccccttggggggaccgtggggggctttaattcgaaaaatatgttagacgtaaaagaaacactcagcgatgctgaagagcgcatggaaatggcagccatgttccttgaggaccagctctctcacgttcgtgcaggccgcgccaacatcgccatcctcgatggcatcaaggtagattcctacggcatgaaggtgcccctcaatcaagtagccaccgtctccactcctgatgcgcgcaccatcgccatcaagccttgggacaagaaggccatccgcgagattgagaaggccatcatggacagcgacgtgggcatcacgcccgacaacaacggtgaagtcattcgcctcgccataccgcagcccaccgaagagcgcagacgcgagctcaccaagcaatgcaacaaaattgcagagaaggcaaaggtggaggtgagaaacgtacgtggcgacatcaaggacaaactcaagaaggccatcaaggannnnnnnnnnnnnnnnnnnnnnnnnnnnnnnnnnnnnnnnnnnnnnnnnnnnnnnnnnnnnnnnnnnnnnnnnnnnnnnnnnnnnnnnnctcgacaaactcatcgaagagaagacaaaggaaataatgacagtataaggggagagtgtgcaaggccttgtagtaaaaaacaccggtttctggtacacggttcttcttgatgatggtgctacgattgcctgtaaggtgaaaggaaacttccgccttaagggtattcgtagcactaatcctgttgccgtcggcgacatcgtaaacgtagaggaagggtggattacagacatccacgaccgccgcaactacatcatacgccgcgcctcaaacctctccaagcagagctccatcatcgccgccaacgtagatcaggcagtcctcatcgtcaccatcagtcaccccgagacaagcaccaccttcatcgaccgcttcatagcctcagcagaggcatatcgcgtacccgtagtattattatttaataaggtggatctccttgacgccgacgaactgcgatacctcgccctcatgcaaaacctctacgaaaccattggctatgccacgctgcgcgtatcggcaacagaggggacgggactggacagacttcgggaactactgcatggcaagatttccctctttagcggaaacagcggcgtgggcaaaagcaccatcatcaatgccctcgtgccaggagccaacctcagaaccgctgccatcagcgaagcccacgaccaaggcacacacaccaccaccttctctgaaatgataccactgccctcccctactgcgacaggagaggggtacatcatcgacacaccgggaatacgcggcttcggaaccttcgatatagagaaagaagagctgacaagctatttcaaggaaatcttccacttctccaaggactgccgcttctccaactgcacccacacccacgagccgggctgcgccgtgctgcaagccatagaagaacatctgatagccccttcgcgctatcagagctacctctccatcctcgccgacaaagacgactccaaatatcgcgcggcatattgaacaggcatcatctgttgcgccatttcctcacacgcaacgcgatattacgcctcagacactcgctatacagccacggctcacagctatgcacatcgcccacattgagaatacccaatatgggtttatactccgatgcactgtatccggcagtcaccaacacattatgctcaggtgagagtgtcaccgtgatgctgtcatgcagcgtggccggagtatcgtccgtacgccagttcacaggattgatacacataacacatggctcgctgacaatggggctgatgtacctcacatccttcaccgtgttatagcaaatcgtcacacccacatctgcagaatccttcgcagcacgtatgtgccgctgccctatcgtgtcagcaggagtcaccttatatcccaacacgtatgccgccacaagatggtcatacgtatcatcatccatatacttcagcagttcaacgacagccttgccaccctggctgaaccctgccagcaccaatggccgcgatgcgtcacggtgacgcaggaagtagtcaaaagactccttcacgtcgttcatgggctgaacagtgcgattggaaattgtgtcctcattgagcgtagcccatgtctcaagcgtcgtatgcctgtaatacggggcatagaaattatttccctgccccatataggccgccactttcctctgctcaatgttcatgtgtgcgcggtgttccgcattccacacatcggcataatggcacacgcgtccaagagagtctttccaatcaaactcccacgttgacactatgtaaaacacatctgcaccggtaccaagcgaatcatcacgctccacataccacatcgtactgtcgtcatacaccggagcacacggcatctgtgcattaacaccaactgccatcaggcaaaaaagtaataagaaattccacttcatactatcgtttgcttttcttcatctattttaaccatcctccgtcccttctctcgtgccttctccccccttctctcgtgccatgctattttcatcgcgtggttccctccccctctcttcactcttcttgtctcatgcgtgcaaagataccactttaccatgaaacagccaagcgtttcacgagattttatcagtttgtgaccatctatcttatcattgtaacgtactttaggcaggcatgcagatagcaagcgtatatgtgttcttgtctgtcaaggtctgcatacttacgataagcaaacaaaatgacggtagctcatgcctcctgaaccgcaaagagaagaggtggatgttagaatcaaaagctgctacagctttatcaagacaacaacataattcttcacagatgaccgacacatgaggtctgccagtgaagagttacatgaattgtattcatcaataaaccttcctacgctgataataagttgtccagcgttgggtacatccattcggtctgtatatatttcccaattattggaaaacctttctcgctgaaatcctgatgtacaaaaaaagcccaccgttataggtcgatgggcaacctgaatgttttcacaacggaacaaaatccttattgtgatttgctaaaaattagtgctgcaaaattatattttttttcctataaatgcaaataattcaagaaaaaaatgtaactttgccacataaaaattgcgaaacactgtataataaaacctaaattcacattaatctttcttcttttatgagcaatatcttaggtttagacttaggcaccaccagtatcggttgggcattgataaaaaccgacataaacaatataccctgcgaaattcaagacatgggagttagaagagtacctttggcagaaaatgaaggcgacatgtttgccaaaggacaatctattactgtaaatgcagacaggacaaaaagcaggggaattcgcagaaacaatgataggtatcaactccgcagagaagctctgataaaaaagttacaaacacttgaaatgatgcctaatgaatccttgataaacttacctttaatggaactgtggggactgcgtgccaattccgcaacaaaggaagtttcgcttcaagaattaggacgggtcttgtatcacctcaatcaaaagaggggatacaagcattcgcgcacagaaaacaacgattctaaacaacgtgaattcgtcaaaggggtcaacgagcgttactccctgctgcatgactctaacatgacagtcggtcaatactttgccaagcaactatccgacactgctgttacaaaaaatgggaaaacatactacacatacagagtaaaggattttatattacctcgcaaggcttatgaagaagaatatgataccatcatgcaatgtcagaagaaatatcattccgaggttctgacagacgaaatcattgactttataaaaacacatatcatcttctaccagcgtgatttgcgctcgtgtaagcatttggtttctgtgtgtgattttgaaaaacggtacttttacgataaagatggtcatctcaaacgtaacaaaaaggatgagattgtgtacaacggtcctaaagttgcaccacgcacctcaccgctattccaagttttcaaaatatggcagtcagccaacaacatacgctttcacaacaagagtaaagattaccttgacataacgtgtgaacaaaggcaggcaattgctgatttcatggacaaaaatgagaagttgaaacttgatgatgtaaagcatatcttagagttgaatggagtctccgggtggtattgtgacaacgcaataaagaatggaatcaaaggtaatggaacaaaacaagcgattgtcaatgccttatcatcacttcctcaaaatataattgcagaaatcacgcgattcaatcttgaaatggaatcaacaggcattgctgataccgagactggggaggttctcatgaaaattaagaaaacatatcaacgtgaacctctgtataggctttggcatatcatatactctatcaaaaaggacgaagaacggaaaaatgctatagaaaaattcttgttgtcatttggtgtgagcaatgacaacgtggcacaaaagctctctgacattgatttcactacacccggctatgcaaacctctctgctaaagctatctgtaggatactgccctacatgatggaaggaatagaatatagtgaggcatgcgaatacataggtataaaccattctaacagtttaagcaaggaagaaaaccaagagagagaactgatggattatattcctcaattaaagaagaatagcctccgacagccgactgtagaaaaaatcctcaaccagactatcaacatcttcaacggaatcaatgcagaattatcccaaaaaggtgaacgtattgatgaagtcagagtggagctggctcgcgagcttaaacaaagcaaagaggaacgtaatgatgcaagcaaagaaataaaggctttagaagataaaaacaaggaatataaagacaaaatcgaaaaagaatacaaactaaaagccacacgcaaaaacctattaaggtatcgtttgtggatagaatcaaataacagttgcttttactgtgaacagcctatcaaatttaccccttttgccaatgaaccagaagaggagcgtgaacatatcctgcccaaagccctacattttgatgacagttatgccaatcaagtgtgctcatgtcagaaatgcaacagtgccaaaggaggacgtactgcactggactatatgcgtacgacacctaatcttcaacattacatcgataaggtcaacaaattgcacagagataacaagataagcagcaaaaagtattcccatctattggcatcctacgatgactaccaaaaacgtaaagagacaggcaaagagacgaaggaggataaactgatatgggaagcgcccattgaccgtcaactacgtctgtcacaatacatctccaaaaaggctatggagatactatctcaagcttgtcgcgatgtagtagcaaccagtggaaccgtcaccgctatcataaggcatgcatggggattagatacggttttggaagaattaaacttaccagtctatcgcaatgctaatctgaccgaattcgttgaaatcaatagaaaagggcaaaagagacagaaagaaactatcaagaactggacgaaacgggaagataatcgtcaccatgccattgatgcactggtagtagcatgcacctcacgctctattatacagaagataaacacgctccatgcatcaaaacaggaaatgcgcaatgagattaccagtgcaagaaagaagtgggacgaggacgacatccttagtcaatggatacgtgagaagaacccatttaacagacaatacgtactgcaacacatttctgccatattcatatcaatgaaagcgggaaagaaagtaactgtgcctggaaagaggaaggtttttctgcatggcaaaccccaaattattcagacaggactgagaattccccgtggaccactgcatgaggaaggagtatatggatctatcaaaataaatggcaagaaagaaatagttatacgatacaaactgggcaaaggaacaattggctttctctttagcggtaaggaaaagtgtgaggtaaaaaagaacaaggcaggcaaatacataatggaagacggtattgctaaagtccttgacagcatagtagacaaacacatcagatcattggtagaggaaagacttaacagaacatttcttcaaaagggtgagacttatcgttcagaagcagaaaaagccttggaggaaggcagagaatacaaggatgaaaaaagatgtaaagaggcattggaacaacttaaagggcttgacaaagatcctatatactctgacaaagataataaatgcatcattcgatatattcgatgcaagacgggtctcaaagcagtgcgaccgttgagatacaatgaaaacaacgaacccatagcatacgtactgaccaaaaacaatcaccatgtagcactctatcgagacaggtcaggtaaagttgttgaaagcgtttgtactttatgggatgctgtggaacgaaccaaccttgactttccatgtatcatacgtaatcctgaacaagtatggaaagacattatgattagagaaactaacggagaagtattctctcccgaatttaaggaatctctaccaaaacccgacttgacatttatggaaagcttacaacagaacgagatgtttgtattgaatatgagtcaggacacattggaagaacatatttcaacaggcaactatagcataataggacaacatctctatcgcgtacaagcactgtccgaaggcgattacatcttccgactccatacagatcctggaactttacgaaactcggagaccagtgcatgtaagcgtttcatcagattgtcattaaagaaatttgttgaatcccaacaccagaaagtaacaatttcctttttgggcaagatatccattgcacaatgataaaaaagaccctttactttggcaatcctgcatacctctccctacgcgacaaccagctggtgataaagctgccagaggtggagagtaatgacactgtacccgattcattcaaggctgacatggtgcgcaccatacctattgaggatattggggtggttgttatagacaacaagcgcatcacgctaacctctgccatattggaagccttgcttgagaataactgcgctgtgataacatgcgataagcgttcgatgcctgttgggctattgttgcctcttgcgggaaacaccactcaggcagagcggttccaagaccaaataggtgcatcgctgcccctacgcaagcaattatggcaacaaaccgtaaagcagaaaatcctaaaccaggcagaggttttacagacatacagccatgcaagtatcaaaccgatgcaggtaatgacggctgaagtaaggagcggtgacacggagaacaaagaagcccaagctgctgcctactactggaagaatgtctttgttgatattcctgacttcgtgcgtggtcgtgagggcgacccgccaaacaatctgctcaactatggctatgccatactgagagccatcatagcgagagcgttggtaagtagcggtatgctgcccaccttgggcattcaccatcacaacagatataatgcctattgtcttgcagatgacatcatggaaccttacagacctttcgtcgatgagctggtaatacagattatggagagcgtggatgattactccgttcttacccgcgacatcaaggccaaactcctgcaaatacccgtactcgatgtctatatggacggcaagcgaagtccactaatgattgctgctacacaaacctcagcatcgctctatagatgcttcgctggcgaagacaagcagataacctatcctcacttctgaaaatggaactttcacgctttagccattatcgcatcatgtggatactcgttttcttcgaccttcccactgagacgaagaaagaccgcaaagaagcggcactcttcaggaagaacctcctgcgcgatggcttcactatgtttcagttctccatctatgtgcgccattgtgcgagcagagagaacatggaggtacacataaagcgtgtcagagccttcatacctgagaaaggacaggttggcatactcaatatcacagacaagcaatttggtgatatagagattttctatgggcaagcggcaagcaaaccaactaaccaacccatacagttagaactgttttgatttcttgttgccatcaaaaaatcctgacccgcaaaggccaggatttcatttattgcaccattttttattttcgccaaaccattgcattcttctgatgttcaacgtgttgcaccaattaagttgtatttgatggtgcaaagg

SEQ ID NO: 1570 - DNA, 14109 bp, synthetic construct
  misc_feature 1..14109: note = Synthetic
  source 1..14109: mol_type = other DNA
ggaatcattgatataagaaaaaagtccaccgtttaaggacgatggacaaggacctaatgttttcacaacggaataatccttattgtgatttgcttaaaacgatttagaataaaatatctctataaaatagcttttttaaaaaaaatagatgtaaatttgtggattgaaagtgttaaatgatttcatcttttaatactataaaaggaaaaaggcgagtcggtttcccttcccaccttgaatgttttcacaacggaataatccttattgtgatttgcttaaaattagtaatgcaaaattacatttaaatattgatactaccaaataatttagaaaaaaaaatgaagaacatattaggcttagacttaggaacgaccagtgtaggttgggcattaattaaagtagatgataaaaataaccctatagatattcaagatatgggagttaggatagttccacttgcagaaaacgaaggggataagtttactaaggggcaggatataactgttaatgcggacagaacaagggcaagaggacaacgtaggaattatgatagatttcagcttcgtagacaagctcttacagaaaaattacgctcgttaaacatgcttcctgacgaacatctcatcaaactccccataatggagctatggcaactcagagcgaatgctgcaacacagaaagtttctctaaatgagcttgggcgcattctatatcacctcaatcaaaaaagaggatataaacactcaaggacggatgcaaaggattccaaacaaagagcatacgtaaaagaaataaacaatcgttacggtgaattgataaagtcaggtatgactatcggccaattctttgcaaagaaactatcggaaacagctgttacatttgaaggtaagactttctatgtttataggattaaagaccaaatatttccacgtaaggcgtacgaagaagaatatgattatataatgaaatgccaacaagctttctaccaagaaattctaacgaatgacgtaattgatgaaatcagaaataggatcatatactaccaacgtgacttgcgttcatgcaagcatttagtatcggtttgtgaatttgagaaacgttgtttttacgatgccgaaggtaacgtcaaacgaaataaaaagggtgagattatctatgatggtccaaaagtggttcctcgcacatcgcctttatttcaaatctttaagaactggcaatcaataaacaatcttcgattccataatcgcaaaaacgaatatttgtatataacaaaagaacaaaagcaacaaatagctaatattatggacattcataaggtgttaaaactcgaagatgtccaaaacgtgcttgatattacttctgagtcagggtggtattgcgataaagctataaaagcaggtattaaaggcaatacaaccaaacatgcaatactttcagtcttatcttcgctacctcaatctaaaatcacagagttaacccgttttaatctcgaaacagaggctacgaacttggtagacgaagaaactggtgaagtgttggtgcgcataaaatccacttatcaagaagaaccattgtatcgattgtggcatattatatactccatcaagaacgatgatgaaagatttcacgccattaccaaacttcttaaagaattctgtatagaagatgattctattgccaatgcattgaaagatttggactttgttactcctggttatgcaaatctttcggcaaaggctataagtaaaattcttccttatatgatggaaggtatagactatagtgattcctgcgcatatgtaggctataatcattctgacagcatcactaaagaagagaataaaagacgcgaattacttgatcaaattcccgctcttaaaaagaatgagttgcgtcaaccaacggttgaaaagattttgaatcaaaccatcaatatctttaaccagataaacgccaatctaaaaaagaatggagagcgtatagatgaagtgaggatagaattagcacgcgaattgaagcaaagtaaggatgagcgtaaggaaactgaaaatggtatacgaaagcaacaaaaaatgaatgatgaatatgccaacatcttaaaggaagaaggcatacgacctactcgtaacagggttttaaaatatcgtttgtggagagagtcgaatgaaacatgtttctattgtgaacgccccatcaatttcaatgaattccttaaattctctgatattgaacgcgaacacataatacctaagaaactgatatttgatgatagctttgctaatcaagtttgttcttgtaggaaatgcaataaagaaaaaggtggaagaacagcacttgactatatgcagactacaccaaatttacaaatgtatcttgataaggttgacaagatgtttcaagagcataaaatcagcggtaagaaacacttacacctcctagcatcatatgaagattatctaatccgaaagaaagaaggaaaagaaaccaaggatgacatcaagatatgggaaacacccattgagaggcaactccgactctcacaatacatctcacggaaagcacaagaactattaagaacagcttgtcgtgatgtcattgcaacgagcggaagtatcacagatctcataaggcacacatggggatatgacaccatcttacatgagcttaattttgattgctacaaaaaggcaggattaacagaattcataaaagatgagaaaacagggaagattcgggaagtcatacaagactggacaaaacgcctcgaccatcgtcatcacgctattgatgctttagctgttgcatgtacatcgcgctccattatccaacgtataaatacccttcatgcttccagagaagacatacgtaaggaaatcaaatccacaagaaaggaatggcaagagaatgacttgcttcagcaatggataaaggaaaagatgcctttcgataggaaatatgtcctgtataaggtcgcttcaatccttgtttccatgaaagctggtaaaaaagctaccgtgccaggtaaaagaaaaatctataaaaatggaaagccaacaatcatacaaacaggcatgagaataccacgcgggcaattacatgaacaaacagtttatggagcaataacacagttctccaaaaacaataaaggtaaagttcttcagactaaggaaattgtcactcgttataaaatgggagtaggctccatgggatatgtttttagtggaaaagaaacttgcgatgttattaatgacaaaaagaataaaagccttgtaataattgacggtatagaaaaagccatcaattatattgtagatagacatataagggatgttgttaggaacaggctcaatgaagcattcccagaaaatgaaacatatcgctcagaagcagaaaaagcattagctgaaggaaaaaaatatgatggtaaagaaagatgtcaaaaagcattagaccaactaaggaaattaagtgaaaaaccgttgtatgctgacaaaaacaaaaacattataattaaaagtgcacgttgttatacaggtcttagtgcagttcaaccattacgctataacaataatcatgagccaatttcatatgttcttacaaagaataatcatcacgtagctctttacaaagacgagaatggcaaattccaggagtgtatttatactttctggcaagttgtggaacgctctaaattcaaactccctttaattataactgacaccaaagcactttggaatgaaatacaacaaagagaaaacaaaggagatacgttcccagattcattaatacaatctctgccattaccaaattggactttcatagaaagtctccagttaaacgatatgtttgtcatggacatcaatgatgatgattttgaaaactacattgctactaataactatgaggagttggggaaaaaactatatagaattcaaaacatatcatctggtgattattttttaagattacatacagatactacaacggacaggaataacgccaaactgacggagaaattcttacgtaaaagccttatgggattcttatcctctaatcctcacaaagtatatatatctttattgggaaaaataatccgaaataccgaatgattaaaaagactctatacttcagtaaccctgcctacctctctttgcgagacgcacaattggtaataaaactgcctgaagtggaaaaggcgaagaaccttactgacgactttaagaagtctgcagagataactcgccccatagaggatattggcgtcgtggtgcttgactggatttagtgaatacagggttatgtggcttttagtactattcgacttgccaacagaaacgaaaaaagatattcgtgaatatacaatattcagaaagaacttactaagggatggatttaccatgtttcagttctctatatatgttcgtcattgtgcaagtttggagaatgcagaggttcataaaaaacgagtgaaatcttttctgccaagatacgggaaagttgggataatttgcataacagacaaacaatttggaaacatagagttgttttatggcaataagccacaagtccctaatacgccaggccaacaacttgaattgttctaaaaaacgtgagttcgatgtaagacttatgcaattacgtttgcatgagtcataactgcccttttgtgggaggtggtgaaggaagtgaaacagagtacttatttccgcctcgtaaatgatacacttagacagcgtaaacgatacatttagacaccaaaaacaatatgtttgtgaatcccaattctcagacagtcagatttcgtcgaattcacattaaaaagagaattccatcgttttaaatggaattctctttttcataaacatcatttttctttttctatttatccttgcaaatagttgattattagcactttcctctaatcgagatgtttacgctattgcaaaggtactaatttttaagcaaatcacaactaaggagaagattgcatacaagtgtaagatgatgtttacgctattgcaaaggtactaatttttaagcaaatcacaactcagcgcgtcgtcgtcacctgcaaggaatggatgtttacgctattgcaaaggtactaatttttaagcaaatcacaacggaggtatgccgttcttcagcaggtaatcagatgtttacgctattgcaaaggtactaatttttaagcaaatcacaaccaagaccttctgccagtcaggacaactatagatgtttacgctattgcaaaggtactaatttttaagcaaatcacaactagtcctgtctcttctgctcgatgtcagcgatgtttacactattgcaaaggtactaatttttaagcaaatcacgacaatggcacaatctgatagcgtgccgacaaggatgttcatgctgttgtctgtaccctcggagctatggagcaagcagcttctctgctataatctcagccatgcgcttcacacccttctcattcggatgaatgccgtcgggctgcaccatgtcctgaccatcggcaaacagtgtatgcaggtcgattacctgcaacccatactcacgagccacctcctgctggataggaataatgttgttttggatgatggaatcattgatgttccatgtcgacttaaaggcaggtatcggtgtgcaaagatagatctgaggctttgccggctggactgcctttgccttcttgccttttttcttcaccggctgagccagatcaggacgcagagccttaatcatctgctgcaggtcttgtttgaagtcagccccgttcttccagttctggggcttcgagtcgttggtgccaagtttgataatgacaacatcagggttgaatgccaatgcgtctttccatgccgtttcattcatataagggaagtcacccttgttaagcatcgtccgcgcactcaccccgaagttcttcacccaatagccatcgcccagcttctgctgcaacagggcaggatagccgaactgtgttgccatgtcgatgccatgaccgtcggtgatgctgttgccgatgcaggcgactttcacggcaccgggctttggagtcttacgtgcgttcagccagttgccaatgtcggtgagcatctggtcgtgatacttaaaccaagtaccgaagccaaagccatggtcacctgtaggatagatatacatggcacactcgttgcccgcattacgcatggctgaatagtatgctacgccattggtgactggaggcaccagccggtcgtcacttgccatgatgataagtgctgggggtgtcagatgacgacgaacagcattctgcgtggagaagtccttcaccagcgccgggtctttctgtccttctacgccaaggaagttgcggcaagaccatttatgcgacaccttctcgtccatggaaatcaccggatagaacaggatggagaaatcagggcgtacgtcgaagtcggcatgtgtggagatgaccgatgccagatgccctcctgccgagaagcccatgatacccacatcgtgaggattgattccccacacggcggcagagtcgcgcacaatgcggataccattctgcacatcactcatgggcaaggtacggtcgccattcggcagtctgtagttcaccacaaaataggcgatgccctgattgttgagccattcggaagccaaatagccctcatgtgtgttcgagagaacagagtagccgccaccgggaacacccacgatggctttgcccgaaggagccgaaggaaggaaacaaaccatctgcgcctttccgtcatcggtcaggtcaatcgtaaactttctcgccgtctgtgcctgcaccagcgttgtgatgagcaacaggaaaaataacgtcacttttttcatcattctgaaatatcttttaatttactacttcaaggataagtattcttgtgcagtgcttccttcacctgagccatgttactacgggagacagggatggattcacgactatgcatcatgagcagttgcatggtgccagtgcgagagacaatctgctccacctgtccgagattgacaaggaaggcacgatggcaacgcacaatcatcgggtaggccttcagcgtgtcttccatttgcttggaggtggctcgtagcatatcaacatgcacctggtcatcacgccactgatagactttcacgtaattgcccaccgcttctatatataataagtcgggaacgtgaagcgtcaccgtctcgctggttgaacctgtgaggactaccgtggaggatggcgatatgtcatgagtggacagcttctgaagctgctcattcagaagcttggtttcctctaactccgctgccaggtaacggctacggaacttgaaacgccaatagagaccgatggcgaacgaacagaatgcgataataaggagtgtctccagaaagttgctccacgacagctgattccccgctacacggtcactcaacaggaaatgacggtaaaggcagatcatcaaggctaccagaatggtgttgatgatttgaaaataaagattgcggcggatgaaaaagttgacgtcatcaccagatgattgcgtactttctccctccatattgcaaggcatccggacaagaaacttcatgatggaatcagtcagcaggcacaccatgacacccagcacaaagatgatgaaaagatgtacatacgcctgccactgccacacctctaagccgaatggcttgaatacagccaacgcaagcgccacgaaagcagcactgacgacacgaacacgaattatatcttttttcccttgattcattgtttggcaaagatactacaatcccttcatatcaccaaaccattcgtcacttttcattccatttatccctatatattttccattcatcacattatcgtgcagaatatcccagaaacttgcagagacagatgccgggacataactttgcagcagaaatcacgcaggaaaagactgctaatgtataacaacattaataacagatgattatgaaaagaagaactatcattggaatcatttttattgtggcagcacttttgaagctggcagacatgtggggaatcgttcagttagactggctatggcaacatcaatggacgatgtacctcggtgtgttccttattctcttcatcggcgtggaactcgtcatcagcagttaccgccataaccctgaacaatggttgcagcgacctctgcctacaggtgaagagggaaagcgcatctgttgcagtgttcactacggcggagacgaatacatctaccatggcgaaccgttccacggtgcccgccttgatgctttctgtggtggtcttcgtctggacttgcgcgaagctgtcatcactgaagacgaggagatagatatccataccttcatgggaggcattgaactgatcgttccaaaagagatcaatatcgttgtgaaaagccgtagtttcataggcggcgtcagcaaccatgccggcatgagtgtcaagaatggcgctcccagcttgcatgtcatcgccagcaacttctttggaggtgtcagcatcagggataaagactaagctatgcaatcaataaaatgaactttaaaaaagatggaattgtaattattccactgaagatacgactaaagggataaaaagataaacaacaaagagatttatgaaaatgaaaagaagtagcaaaagactggttgcactcatggcagctatgatgatttgtctgacgttccatgccaagacacaggatgtggttggaaaggtgattgacaagaacaacaatccggttccgttcgtgaatgtggttctattgtcactgcccgactctgccttcgttcagggagcagtgaccgatgaacagggtatgttcaagattgtgacgagccttcatgagggactgctgaagctctcgagtgttggctatgagactcttttccttaatatcaatactaccaacgaactgaccatccagatgatggatgacacacagatgctcggtgaagtggtggtgaagagccaactgccccagactcatgccaagggcgatgccatgcgtaccaccgtcgcaggaacgatactggagaaagccggcacggtgagcgatgccttgtcgaagattccgtcattggaggctgagcgtgacggtgccgtaaaggtgctggggcgtggcgatgccgaggtatatatcaacgggcgccgggtacaggacaacagcgaactctctcgactgcgctccgaccagatacagcatgtggatgtggtacagaatcccggtgcccgctatgctgcctcaacaaaagctgtagtgcgtatcacgctgaaaaaggctcagggtgaaggcattagtttccaggacaacctcgaaggtgtatatcagtatggccatactttgaccaataacctcgacgtgaactaccgcactggcggtctcgacatcaccgcctctctgtgggcaggtcgctatggtcacgccaagtcattacaggaaaacaccctgacctactatactgggccagataagatcgagggtgtcagtacgcaggagtcgaagaacatctggaaaggctggtcgccacagttgcaggtcaactacatggtgaacgagaaccacagtttaggcgcgttttacaaatacgaccgtcaccctggtagcgacttcaacagcatgttctataccgacagttatgagaacagcattttcaaagagcgctctgaaagccatatcactcaggaagacaagttcacgaagcacatcttcaatgcctactacaatggcaaggtgggacaactgagcatcgacctgaatatcgacggtctgttcgacgacacccagtcacctggcaacaccaatgaagtgacgacggaagcaggtggcagtcctgtcaatcgaagcatcgaaagcaacaccatcagcagcaataacttctgggcatcgaaactcatcttcggctatcccgtctggaagggcaatctctccctcggtggcgagtacagttacaaccaccgtacggatgcctacgacttcaatgccaccgatgctgttcccgtgaagactactgacacagagatcaatgagaaatcagccgctgtctttgcagagtatggccgtcagtttggcaaggtgttcgcccaagtggggttgcgctatgaacacctgacgaacgactatttcaatttcggcaagaagcaagatgaaatgtgtcgggattatggtgactggtttcccactgccgttatctctgcccctatcggcaaggtgcaactctcactgtcctatcgccgtgatattgagcgtccgccatacgccaacctgaccagctcgacggtctatatcaatcgttacacctaccagagcggaaacccgtatctgagaccaacctacacccacagcgtcgtgctgaacactgcctacaagtggatgaacctgacacagccaggaggattacgaccgcctgacggtcatcgcctccgcacgtcccaccataggctgctggcatcccacatgggcagtcgttgccatgttccagaactacaagtcacctacagccactggaaaggttatcacactctcgcagccttggctcaacggttcctggcgaaacaccatcgaactgcctcatgacttacgtttgaatgcagacatagagtgggctacgaagggtgagtacaacaacttccacatcaccaagccacgcatctttggcagcattggtcttcaaaaggactttagtctgcgccgtctcggttcactgactgccgacctgcgctgcatcgacctcttcaataccaacaagaccgatgccatcatctacggttatcgtgacctgactgtccataatccagcccgtcgcaccttcctgctcgaccttacctggaagttcaacgaggcacgttcgaagtaccgcggttctggtgcaggcgacaagcagaaagcaagaatgtaagtgaaataggtacgaaattcgactctttaaccaaattatttcgcgaaatcaatgtggatttcgcgattgctgctcaacatcttaatgttgaatgtagcctatgcccaagacaaacagccagctggcgtgagaatggaagtggctgaggcagagactgacaacggcgattattctatcttcacttataaagacacggacgatagcttcaactattacctcagtctgggccgtatgaggaatttcttaggggcagatgaaatcctcggtatgtcagtaaaaaacgctaaagagattactatctggctcggctccacttgcgatgaagcccttgataccattgaatcctttcttgacctcttcgataaggatgtagatacctccgtcgagttcaagggccgttccgtctctggtggcggtgccattggtgattccaccactacgacctgtgttgtgaagaagaaaccactggtcggtaaacgtctggaattcctctttaccagtggcaagaatgagactaaggcctaccttacaaagtccgtactcaaggaactccgcatgaatttcaagacagacattaagtttcatcctaaaaaacataacaagaaatgaaaaagattattattatgatggtaatagccctgatggctacaaccaatgtgagtgcacagaatgcatttgaaccaaagcatgacattgcaataagcgttggagcttggtcgaattctgacattataaatgtctttgaggacatgttaaccattatgctgactggaagcaatgtcgaaacgtcatcgtacttcggtcccatctctctggaatacttctaccatctgaatcgtaccatcagcgtgggtgctatcgctgcctatggacacatgaaacagaatttctactttgataaagatagaaagaataaggacggttctttaacgaacaactatttcacattattgcctgccgtgaagtttgactggctgcataagaagaacttcggtttgtactctaaactcggtctcggtgctacccttcgtagtgagaaaattgaatttaccggtgactctaaaaaaggtgagaccaacagcaatgtgcacgtcaactggcaggtttcacttcttggtgttgaggctggcgcagagaaaatacgcggtttcattgagttgggtaccggtgaacagggtattgccctcattggtgtacgttacaagttccaataatctttatgacatttctccccttcaatgggaggaaaacggctaacatacagacagccgctcactgattaacttcggtgggcggctgttttgtatgatgagagtagtcttgatgttattcgctgaagatctctgtgagcttcttatcaagttctttgctgcttacgattcttcgagacaggattgtgccatcgggggcaaagaggattttatggggaattcctgtgactccatagatgctcataggcttggattcgtatatctggggaaaggggatgcccatcatcttcacgatgctgtcagacttctccggtgtatcgctgacggtgattcctatcaccttcagtcctctgtccttgtatttctcatacaaggcaatgacgttgggtatatcagccttgcaaggagcacaccacgatgcccagaaatcaaccagcacatagctgccttgacccacgaaatcagagagtgccacagctcgtccttcaggcgacttccccttcagttccttaaacatcttgccctcatcggtttcctgcgccagcaacttactctctttcagacggtccatctttggacttgactgcaagtcggaagagagtttttctataagccctatcaattcagtgggcgtgaatatcaactggcattgtccgataagatagggagacaaaggatggtcgggatggctgctgacgatacggctgaccacttcatacattttcttataataggtggttacatccatatccatgttctgtaccgagagtttggccatcagttcatcattcattggtgtaccgccaatctgtatgaggtagtgtaagtccaaatcacacaaaagatttacggttccgctttccaagacaaattcccttatccatccgggccttccctgctttgtgatgcagcaaacggcaggcttgtcaagcgttccacttgcagggacgatgtttccgtccttgacatgcagcatagttatcatcctttgcttctctgcatcaatgaccatcagcgtatcatccggtgccgcatttgccaccgaaccttctatcctccaactgaatgtctgagcatgacttgccattgagacgagggcaagcaatgtgactatgataattttcctgttcattcctttcgtttcctttaattgtcccgttgcaaagcaactacaaagttagcgacttctgtagtaattaccgaaggattcccctggcatctgcctgacatttggatttctttaaccatgttttttagttgataactattagctggtgtggcagaactgcaaagccacatcgctcaccgacttctgcactgagaccagataagaaatgaataacaaagaatgaagaatgaaaagtttgagtttcattaattatttctttattgatgcgactattatcgaataatttctgtatttttgcagagtgaaactaaagcattgtagaattatgacacagattttagtgacattggacgaaggcgtaaccacacagcatgttcgaaaagccattgagttgcttcgcggtgtagtgtcgaccacagtgcttaagaccaaggatggcactaacgataagacacttcgccaacagaaatacgtgaaggaatcgctcgaaagagcatttgacgaaatggagcgggcacgtcgtggagatcacaagatgatgacagacgaagaattcttggacgaactgaaagcagagggtatctcatgaaagttacttttattttgtctgacgaattccttcgccagttcaaacgtcttgccaagaagtattcttcgttggttaatgattatggcattttaaaaaaagagttgtgtaagaatccattccaaggcgatgacttgggaaacggtgtgcgcaaagtgcgcatgtctatttcttcgaagggcaagggtaaaagtggtggtgctcgcgtcatcactttcaatgtcattcagcatgaagatgaagccattgagattaccttg

SEQ ID NO: 1571 - DNA, 11195 bp, synthetic construct
  misc_feature 1..11195: note = Synthetic
  source 1..11195: mol_type = other DNA
ttgcgtcccatccttcagcaaaccctgcacaatctggagttggcaccgccggagctcgccgccagcgggccggccgcccgtggggatgtggccaccctgggccagcaccgcgtctggctggaggcccgccacccggatctggcgccggtctacgagcgcctcagtggcgagatcacctggctgcgcacccgccgggaagaggccctgcgccttcccgcacaggaaggagaggcctgatcgccactggctcgctcctttcttccaattgaacaaggaggcctgacatggctcgccgagtgttgtgggcggacgatgagatcgatctgctgcgtccgcatgtgctcatcctggagaagcagggctacgaggtggtgggcgtgaccaatggcatggacgccctggagcgggtgcgtgccgagagctgggatctggtgctgctggacgagatgatgccgggcatgaccgggctggacaccctgcgggagatcaagaaggtggaccccgccctgccctgcgtgatggtgaccaaaagcgagtccgaatccctgatggaccaggccattggccgccagattgacgactacctgaccaagcccgtcaaccccagccagatcatcgcggtgtgcaagcgcatcatcgagcgccagcgcctgaccggacgcaatttgagcgagagctacatgcagggactggcccagatgggccgcaccctggccatgggtgccacctggcaggatttcctggccatgcaccagcagctctgcgcctgggagctggagctggatgagcgcccggagctgggatttggccaaaccctggcggaccagcggcgggagtgcaaccacgagttcgcccgcctggttgaccgccactacctggactggatcaacggcaaggatggtcccgtgcttagccccggcgtagtgcgccaggtggtggtgcctctcctgcgggagaagcgccccgtgctcttctgcgtcattgattgcatgcgcatggaccattggatggtgctggagaagacactgcgcgagaagttccgcgtgcgccgcgaggtgcaggtgagcatcctgcccagcgccacgccctattcacgcaacgccattttcgccggcatgcacccggcggacattgcccgcgcccacccggagatgtgggagcgcaacatggatgacgagggcaacaccaaccgtcacgagcgccagttcctggaccaccagctgcgcttgaacggcatcgagttcaagcccgcccacaagtacatcaaggtcattgatctggcagaggccaacgacaccctgcgcaaggtggacaacctgttcaaccaccagttcgtgagcatggtgtggaacttcgtggacatcctggcccacagccgcaaccagaatgacattgtgcgcgaaatggtgcccgacgaggccgcctaccgcagcgtggtctccgcctggttccgccacagcgccctgaaccagatcctggaagccttccgcgaaaagggctacaccattgtcatcaccagcgaccacggcagcgtgcgcgtgcagcggggagcgcggatctacagtgaccgcgatgccacacgcggcctgcgctggaagctgggacgcaatctgcggctggaggacgaccgcagcggcatcttcgtggacaagccggagacctggcgtctgccccatggaaagggcagcgagaccatggccttcgccacggaggatcagatgttcctttacggcaacaactacaaccactacctgacccagttcaaggacagcttccagcacgggggcgtctccatggaggagatgatcctgcccgtggcggtgttggagccacgctgatggtggagcggctgttggaggatctggcagccacccgggactgtggacgcgacattgcccacggtctgcggggcggcgagatcctgcttctggacggccccctgggcgcgggcaaaaccagcctggcccagggtctggcggcgggccttgaggtgaagggcgccgtgaccagccccacttttgcgttgtgcaaccggctgctggggcgtttggagctgcatcactacgatttgtaccgcgtggaaagcctggaccagctgcggcgcatcggcttcgaggaaagcctggagtgcgacgccgtggtgctggtggaatggccccgcctggccctgcctctgttgcgcggccgggtgcggctgctgcgtctggatcatgaaggggaagcccggcgcctgcgcatggaggagttggacgcaaaggaattgccagagctgctggaagcctgagcggattcgcatggagaaaaaaagggggccgcgcggcccccttttcacattctgatgggcgcttcctagaagcggaaggccaggcccaagcgggcataaccgccggacagatcgtactcgatggccttgggcgtgccccattgcaggctggtgtccgtcaggtccaccgggccgtcaatgggcggcaggccacgggcgatgcgcagggcattgtcccgggcgtgctgcagggaggcggagatgagcggcgcgaattcatagcgcgtgcccggctcaccaatgacttccacttcctccagctcaagggatgtggcattgcgcaacacctgggtggtgctgccctccagctcgccaaagttcatgtggttgtagcccagatccaggatgaagctcatggggccaagctcatactcggcgcccacgaagaggcgggcactgagggcggaaccatcgtagtccgcctggatgaggtgctggacatccagctcctcgctcaattcctcggcattgggatcgaaggtgatgcccatttgctggtacatgccgctggcggtgatgttcgccagacccaggcccagacccgcgtgggcgtggaagggcaggttcaagtccttcaggctgtaacggcaggtggccatcatgttgcttacttccagctcctccgcggcgtagatggaactctgcgtggtgccgttggtgaacaggaagatgttgctggtggaggccgcgccggccgtgtactccagacctgccaaaagacgcgtgcgctcgccctgcatcagcaccttctccagggcaagacccatgtccggacggttggtgagctccggcacattgaggtagggcgcccacacgccttcaaaaccacccagattgccttgcgcatcccgcacccaggtgccatccacgccgaagtaggcgttcatgccgcgcacctggtcgttcaggccttccaggcccgccagatgatccagcccacccaggaagcgcaccgtgtagccggtgaagaggcccgtctgggcgtgggcggcaagaaccagggccagactggtggccgcaagggtatgcaagcggggcatgaatcctccgggttagagacaagcgctccaaaggtaggaaggggcctatgcgctgtcaaccgacaaagtgccggaagcgcttttccattggcgctttccagggaccaggcccgatggcgaattgcccattccccaacggaaaagcgcacccgcttgcccgccggatgcgctccattgctgccagtgttttcctaggccagctggcggcaaatggcctgcaccaggttgtcgaagatctccgcgtaggcgggatcctggctgacaatgggctggccgcgatccccgccttcgcggatgcggatgtcaatgggcaactccgccagaagcggcacctgctggcgctccgcttcccgcgcgcctccaccttcgccaaaaatgaagtggcgcttgcccgtgtccgggcactggaaccagctcatgttctccacgatgcccaggatgggcacgcccaccttgcggaacatggtcacggctttgcgggcgtcgatgagtgccacttcctggggcgtggtcaccaccacggcgccggacaggcgcacacgctgggccatggtcaactgggcatcgcccgtgccgggaggcatgtccaccaccaggaaatccagctccggccacagaacatcctgcatcagctgggtcagggcctgcatgaccatgggtccgcgccagatcatggcggcgtcctcttcaatcaaatggccaatgctcagcatgtgcacgccgtgggcttccagcgggatgatcttgttgtcctgcacgaaggggcgctccatgctgcccatgatgagctgcacgctgggcccatagatgtccgcgtccagcaagcccgtgcgatagcccgccgccgccagcgccaccgccagattgctggccacggcgcttttgcccacgccgcccttgccgctggccaccgccaccacatgcttcacctgttccagcagcttgggcatggtgttggggtctggggcgccatggccatgaccgtgtccatgcccatggtgatcatggttttcactctcaccatgtccgccggtcagacgggtgaagacctgcaggcgcccgtggatgcggctttccagcacggcacgcacggcctcgtccaggcgtccggggatggccggatccttgctggccacttccaggtggacatccacgccttccggcagcacttccacatccttcaccatgccgaaggagaccagatcccggttcaaaccggggtaatgcacctgcttcagcaggtctagaacttcgtcgcgcgtcacgctctttcctttccgcccccgccatttccatggggccctgggccaagactggggcgggctgaacttacatttcccccatgagcagaacagccgtgcgatcctgggtgcagcaacttgtcctgaagctggaggaagtccttctgccagctccaggggaagtcggcgctctgccagaaccagtggaagccctttccacgcaagaccttccaccacaggaattctccagcatggcccaagcgctgcaagagctggaccgtgagctgggcacgcgccatgctccgcccgtgcaagtgcgcacccggcgcaaccgcaacaccatggccagcctgcgcctggatgtggacgcccaggtgtggcgcttcaccgtggcggaggacttgctgcgcgcccatccccatctggtgctggacttgggccgactcctgctgcaccgggcgcggcgcgagcgcccccccgccacattgctggccaatctggcccagctgcgcaagctgtgggccgcccgcctgccggtggcggacgccgcgctgcgccgcatggaggtggaggaggatgacgctcttgcctgccgcctgcgcgccgtggccactaggttgggtcatttgcccacaatggaattgccctccattgtgtgggcgaaaagcaccagccgccgcgtgctggggcgttacgacagtcgcgcccgccgcatagaaatccacgccgccctgcggcatccatctgtgccaatctatttgttggacaacctgattgcccatgaattgctgcacgcgctattggggcctcagcgtcatggaacccgccttgtgcaccatcacggggagttccgacggcaggagaaagcctatcctgattacgcactggcggaggcctggacgcgcgtctcctggcctcgatgggtgggacgctatctgaaaaagcatggttaggggagatcccttgggccaaatccaccgctttttgccgctgatggggggcgagctgtcgggatttggacagaggtggcggatttcaagcatgcagaaaggggcggatggatactctattccgaggctatgaaaattcatccacttgctggacaacatcttccacgaattgtcactggctttgcacgagttggcccggctcttgctcatagctttgacaaagcacggcacccgaccggcacggacctggaacgaaggcttgggagaacatcatgactgcagatcgcaagcttgcccgcgccttgaacaagaagcgcttccttggacttcccacggacatgctgttcagcagcccgctttttctgctgctgctgcttgtgttcatcatgctcttctgagcatcatccttcaccccccctttggcgggcttgcccgcgacatgtattgaatgaacgggtcggcaatgccggccctttcttttatcccccaaccacatcccggatcaatgcgcccctgcgtagcgaaagctgtggcaggggaggcgtgcatatggtggattggagctaggaaaagacagaaaaggcattgatcaagcaatgaatgcttgccaggacaaaagttggatggcatactaaaagaaagcgcccggaagcccaggcgccagggttgctgttagcagagcccgcggaaacacttggtttccttactgtggaaggaatcaagcgcccctcagatacattgagggcgaatgtatactcctcgttcccaaaagtcaacagggaggtccagtggaaactgtttttggcatcgatctaggaacaaactcccttggctgggcggcaatctcatttcaaaatggacgagcatcgggcatccagcacgcaggggtgcgcatttttcctgccggtgtagacggtctggaaagtgacgggcgtggcacgccacgaaaccacgagcggcgcaatgccaggcagattcgcaaacagctggatcgccgtgcccgccgaaagaacaagctctttcgggcacttcaacattacctgcttctaccaggacaagtggaaagaggcgaggaagcccaggagtttgtccgtcatgaactactggaaggcctggatcagcaactgcaaaaggagtttggtgcacgggaaaactccgaacgattctttcacatgctgcgtaccaaagcccttgacgaggaactgccagcgtacgcggtagggcgcttgctgtaccacttggcgcagcaccgtggattcctgagcaaccgcaaggcggaccggaaggacgatgacagctcaaaggtgcttgatgccatcaaggacttgcaggcgcacttggtggaaggacattggcgcacgctgggcgaatacttgttccatgtggatgctggcgagcgcatgcgcgcgcgctggacggctaggagcatgtatgtagaggagttcaaggctatctggcagaaacaggcatcctttcacccaaacttgatgactgaggaagcgcgggccaccattcacgaaatcgtcttccaccagcgcaaattgaagagccaaagccacctcatcggtgactgtgatctggaaccaaaaaagaagcgctgcatttgggccatgccggatgcccagcgctttcgactgttccaacggttgaacgatttggagatcacagatgagcaaacgggcgaaatgttcaagccgagcgccgaacagcgcgaattgatcttggcccatctagagcaaaaaggtgatttggccttttcacggctccggaccatgctcaaaaacaagaagctcaccttcaacctggaactgggcggagataaagggctggtggggaaccgcacactttccaaactgttggctgtggattcctcttttatcacaggcctgtccaaggatgcattggacaagctagtggtggagttgattacagttgaaagtcacgagagcatggttcgccgtctgacagatcactggcagtgcacgcctgccgtggcggaagaccttgccaagctgcatctggaagatgggcgcgccgccttttccctaaaggcgatccgcatgctattgccagagatgatgttgggtttgccactgaacacagccatcaagaaatgctatccgaaggcccttcaagatgatcgacaggaggacttgcttcctgcggtgacaaaggcttttcccaatctgcgcaatcccgttgtggcaagagccctgacccagctgcggcaggtggtcaattcctacatcgtcaagcatggtttgccagacaagttccgcattgagatggcacgcaaccttaaacagacacccgatcggcgcgaaagggatatcaagcgcaaccgcagtcgtgaaaaggagcgcgacatagcccgtgagcgcattttgaaagaggcaggcattgccaatcccagccgcatggacatcgagaagttcctgttggctgaggaatgcaacttcacttgcccctacaccggcgtccactttgggatgagcgacttattcagtggccgggtggatgtggagcacatcattccgcgctctcgcagcttggacaactcctttgccaacaaaaccctttgcatggcagatgaaaacaagcgcaaaggtcgtaggaccccggttgaagcctacggcgggcaatcggtgcgctttgcggagatcctggacagggtcagacagttcagcgagaatttccgcaaggccaagcttgaacgcttccagatggatgcagcagaagtggagttgctgctgaacgactttgagcaaagccaattggtggacactgcctatgccacgcgcctggcaggccgctatttgggcatgctcttcggcggagaagtggacgccaacggcaatcgtcgggtggagaaggtcgcggggcgggcaacagccctgttgcgttctgcctggcacctgaacgaggccttgcatgataatcccaccaagaacaggggagaccatcgacaccacaccctggatgccttggtagtggctgtgtcctcccccgcccatgtgcgagacctgagccgagcgctggagcgctgtgaagaggaaggccgacgcatggccgcccaattggacgagccctggcccggtttccgcaacgatgccaccaattgtatccagcagaccgtgccgtcgcataaggtcaatcgccgtgttcgtggcgctcttcacaacgagagcaacttcagccagcgtcgcgatgcccagggccacccagatcccacaggggaatgggttcacatccgcaagcccattgaaggcgctttcaaggtggaagatgttgtggatcctgccattcgcgctttgttgcgggaggcggaggccacccatgggaacaaatggaatcagaatcccgcatccatcccctgtttgatgaacgatcagggggaagcccgtccaatccgtcatgtgcgtattcgcaagaaaagccgtgttaccgccatgggcgccggccatcgtgcgcgctttgtggaaactggtggaaaccatcatatcgaggtgctggaaagtaatgccgttggcaaaaccagttggacaggtgtgatggtcagcacttttgaagccaacctgcgccgcatccgccaggagccggtgatccgcaagaaccacggaccggggctgcgttacctcttctccctgcagcagggggattgtttctatctggacaaggacccagagtgcgtgggtgtgcagatcatccggacattggataacaatgctggcggaatgcgcatagcgtttgtctcatcaagagacgctcgaatgttgaaggaaatcaatgctgataagtctcccgagggaaaactcaaggtgagaaccataaaaaccttaagtgaaagaggattccacaaagtccatgtgggattgctgggcgaggtaggtcggcatggagcggattcttgacatcagtgcgcgggcccttcgcctaaggatcacccacggctgcctggacctgctggaagagggccgcagcgtgcagaccccggtgcccctggccgaggtgggggccatcgtggtcagcaacccggaggccacattcagcagggccttgctggccgagttggcggagcacggcgtgggcacggtggtgtgcaattcccgcagcatgcccgtgggcatgctcctgcccctgtcccaccacagcctgcagagcgagcgcatgcaggcccagctggagctgggcaaggtgaagcgcaagcagttgcacgcccaggtggtgaaggccaagttgctggcccaggcggccctgctggaggacgtgcggggacaggaccacggcctggggctcctggcgcggcgggtggccagcggggacaagggcaacaacgaggcccggggcgcgcgcatctactggcgccagctctttggcgagcctttcacccgcgatcccgagcaaggcgggcgcaacgccctgctcaattacggctacgccgtgctgcgcgccatggtggcccgggccatcgccggtgtgggcctgcaccccggcctcgggctcttccaccacaaccgctacaaccccttctgcctggccgatgacctgatggagccttaccggcccctggtggaccgggccgtggccggcttctccgacgatgagtgctggctgggcggcgaggcgaaacgtcgcctgctggagcccctggtgggccgctaccgctggcaggacgaggagcgggggctgctggactggctccaccggctggcccgcagcatggcgggcgtgtgccttggcgagcgcgtcaacctggacattccgatatgccgaaaggcggcgacccatggggacgagacagactgagaccctgcaatccttttcggagtaccgtggcgtgtggctcttcgccatgttcgacctgccggtggacgacacgcttgccaagaagcggtaccggcacttccgcaagctgctgcttcaggaaggcttcaccatgctgcagtggtccgtctacgcgcgctactgcgcttgcgaggacgccagcctggtgcatcgccgacgcatccgcgccaagctgccggaagaaggtcatgtgagggtcatggccgtgaccgaccgccagttcgccaaaatggaagtgtaccacggcaagaaccgcgggaaggccgaggcaaggcccgaacaactgcagcttttttgagccccgtcatcgggcgaaatcccctgctgctcaatccaatccaggcacatcgaatgtatctgaggggcgcctgagatcgaaccacagcaacacaatgcgcctgcccagcgtcgggctcaatgtatctgaggggcgcctgagatcgaaccacagccattttcaagttttatccgccgacaatctgaatgtatctgaggggcgcctgagatcgaaccacagccccaagtgatgccgcaagcgtgtctgcggaatgtatctgaggggcgcctgagatcgaaccacagcgcactcagacatgtactctgtgacttcgaaatgtatctgaggggcgcctgagatcgaaccacagcgaggtgccgctgattatgtcttcatgagcaaatgtatctgaggggcgcctgagatcgaaccacagcacaacagccactacgctgagaacagcgtcaaatgtatctgaggggcgcctgagatcgaaccacagcttgtagaagctaccgt

SEQ ID NO: 1572 - DNA, 14459 bp, synthetic construct
  misc_feature 1..14459: note = Synthetic
  source 1..14459: mol_type = other DNA
atagaaagccacttctagaagtgagaaatctgaagcagcacttcaaagtctccagaaagttcagtgtcaaggctgtggatggcgtttctttcgagatttatccaggagagacctacggccttgtgggagaatccggcagcggcaagtccaccattggacgatccatcattaggctctatgaccctacgggtggaagcatcctgtttaaagaagaagacatttccggaaagatggacaagaagacagagaaaaatcttcggatgaagatgcagatgatcttccaggatcccatggcatccttaaatcccagaaagaaagtactggatctcattgctcttggcctggatatccatcatccgaagatggatccagaggaaagaaagaagaaggtatatgatattctggacctggtaggcctttctcatgagcatgccagccggtatcctcatcagttttctggaggacagcgtcagcgtatcggtattgcaagagccttagtgatgaatccggatctcatcattgccgatgaggccatcagtgccttggatgtgtccatccaggctcaggtggtcaatcttatgaaggagattcaggaaaagaccaacattgcttatcttttcattgctcatgatctctccatggtgcggtacatctctgatcggatcggagtccttcattttggacatctggtggaaacaggaaccacggaggaaatctttgaaaatcccattcatccttatacaaaatctctgctctcagccattcctcatccaaatcctgtgacggaacgggagagaaaatccatgacctatgactatgcttccagtggcattgactacgccaagggagttctgcagaatgtgggaggaacccatcaggttctggcaacggaagaggaactgcagagatggacagcagtaggatagggagttagtacaaaagattgacaaaaacataaacaagtttacggtaaaatgacgcaaacagctggaaaatcagagcggtttgggtcatttttctatgcttacagaataagtgaatacggaaaaattgacctcgtataatcgtgaaaaagattgatgtgcaatgaaatagagaaaatgaatctaggggttggtgtgctggaagaggaggacaattcacagtttgttcattgctatttttttaaccagtgctataatgaggttggattgtaatggttattaagttagtttgaatttaagtttagactataaccataattataattattaataaatatttcaccaagtgagaggagattttatcatgaacaaaattgtcattgtgggtgcgaatcatgcaggaactgcagcagccaatacgctgatggcaaattataaggacgccaaagtcacaatttttgatgcgaactcaaacatcagtttcttaggctgtggcatggccttatggattggtgagcagattgccggagcagaagggctcttttattccgacaaggaaaaattggaagctcaaggagcggtggtccatatggaagctcctgtagaaaatattgattttgatcgtaaagttgtttacgcaacgctcaaggatggcaccaaggtggaagaatcctatgataaggtaatacttgccactggatctacgccaatcatccccaatattcctggcatagatctggagaatgtgcagaaagtgaagctgtatcagcacgcggatgaggtaatcaggaagctgaagacagaagagattgagaatgtggtcgtggtgggtgcaggttatattggcgtggagctggccgaagcctttgaaagaaaaggaaagaaggtcactctcatcgatattgcagacacctgcctgcctgtgtattatgatgaacctttcaccaatctcatgagagagaacctgaagaatcatggcattcatctggcttttggtgaaagagtgctggagattcgaggagatcagaaggtacgagaagtggttacagacaagggagtccataaagctgatatggtcgtgctgtccattggattcagacccaataccgctcttggaaacggaaagctggagctgttcagaaatggtgcgtttgtggtggataagcatcaggagaccagcatgaaggatgtctatgccattggtgactgcgctactgtctttgacaacagcattcaggataccaactacattgcactggcttccaatgcggttcgaactgccatagtggctgctcataatgctggtgggggaacactggaatctgctggagtacagggatccaatggaatctgcatctatgatctgaagatgctgtctactggtatgacgctggcaaaagccaatgtctgcggatttgaagcagctgccacagattatgatgatctgcagaaaccggagttcattgaagaaaacaatcctaaagtgaagattagaattgtttatgataagaagacccgagtgattcttggggctcagatggcctccacctatgatatttccatggggatccacctattctccttggccattcaggaaagagtcaccattgacaagctggctctgacggatattttcttcctccctcatttcaataagccttacaattacatcaccatggctgcacttggggctaaataagaaagctaccagcatactgcaggtaacgttcactaggataatagagatgggtttctttggaagcctgtctctttttttaacgcagcagcgcatctaaggcacgctctcgaagaaacaaagtttacttagcagagattgttattattttgacaaaatagagtgatgagggtatcataaagataaccttatagttggtataatgtatggtttgggaaggagagcagcaagatgaataagttcaccataggacagatggcaaaactgaatcatatatcggagcagacccttcgtctttatgaccggatgggacttctaaaaccctgccaaagagaagaagacagtggatatcgtctttatgatatccgccagagtgccaggctagatatgatccagtacatgaaatccttagggatgacactgaaagacatcaaagaacagttggaggattatgatatcgcacatttggcaaacatccttcagaaaagacaggctcagattgattttcagatgaaagagctttcttgtcagaagcgagccatcgaacgcactttagagagttttgaccgctacgagaatgcaccgcctgatggaaccattgtgttggagtatttgcccaaaagaaaaatctatgccattgacacgggcatcaacttttatgagtatgatcttagtgtttacgagaagatgcttagagaactaaaagacagtttgatatctgagaatctaccccagatttatttctgtaatgcgggatccattttacgtaaggataacttgttaagtagcagactgctttccacagaagtttttgtatttgtagacgaggagttcagcgaaagcgccagcaccaccaccatagctccatctaattatctatgtatttattgcgatgattttaacaaagagaaggggtatatcacaaggcttttagaggaaattaaagctaagagctataccatcacaggggattacctatgtgaggtcattgctgaagtaccaatgattgaaagggaagagaggtctatgtacctaaagcttcaaattcctataaaaataagataattttttcacaattcttcttgaccttatacttggtataacctctacgataaagacaagaaagaaatttctaatgaatttgaaagaggtgtctttatggtcagggaaaaaattagagtggtacagtatggctgtgggaagatggcgaagtacacattacgttatctctatgagaaaggcgcggaaattgtgggagccattgatgtgaatccagagattgtgggcatggatgtgggagactatgcaggtcttggcgtgaaacttggcgtaacgattcagagtgatgcagaaaaagttcttgattcctgtgatgctgatgtggcagttcttactttgttcagtttcatgggggatgtgtatcctcacttcgaagcgtgtctgaaaagaggcataaatgtcatcaccacctgtgaggaagccatatacccttggaataccgcttctgagtttacaaacaagctggataagctggctaaggataaccactgcaccatcacgggttccggcatgcaggatattttctggatcaatatggtaggtcttgtggctggcggagttcattcgattaagaagattgagggcgctgtaagctataatgtagaagattatggacttgcattagctgaggcacatggtgctggatatacgccagaagaatttgaagcacagattgctcatccggagacccttgaaccatcttatgtttggaattccaatgaagcgctctgctccaaaatgggctggaccatcaagtcccagatccagaagtgcgtcccctatttttacgatgaggacctttactctgaaaccttggggaagatcattcctaaaggacattgcatcggtatgagcgccgtggttactacagaaacattccagggacctgtcatagagacccagtgcattggtaaagtatatggaccggaagatggggatatgtgtgactggaagattacaggtgagcctgataccactttttttgtgaaaaaaccagccacagtggagcacacctgcgccaccatcgtcaatcggataccgtccctgcttatggcaaaaccagggttcgtcaccatggagaaactggattctgtggagtatctgacttatccgatgcatatgtatctagattgatttctaatgggaaaatagtaaaaaataacttaacacattaagataatacgccccattacttcagtaagtcgaagtaatggggcgtactttagtatatgaagtgacagggtgtagtcaatcactttttagaaggaatccataaatagagatcctacttcttggcattatccactgcgattttaacagcttctaagaggcgttttgaagttagagtagcaccagagaccgtatccaagtcaatggagttttccttgacaatcagatctggcagagtgtccagagctggagctgcaatagttgcagtctcatggtggctgagtacttcaacagccgttattttttctgtgttgatggtaatctgcaccgtcatttttccttcctgtccatcgacttctgcctcataggtaccatctttagcacctgccatggtgaaatcggaaggggttatttcagcagtttctttcttgaatatatcctcggaaagaatattgcttgcttcctttatggtatacccttccgaaagagtggtggacatgatctgttctgcggcgatatcgccatacactacaggtcccatgacaccggtaccggaagaaatgtatcttccccagattccacccacagtttctcctgctgcatataaaccggggatttccgtgccattttcatccagaacttgcattttgttgttggtcttgattccgcctagagtaatgatggccagaggtctgattcggacagcatagaaggtctctccttctattttgttaatggccacattgaagggagctttgggctcagaaaaatcacggccgaattcatctgtagatttctcttctacagactcattgtactttgatacagtctggaggaactcatcctttggaagatccagtttttcggcaagttcttccaagctggatgcactggctacataaggtttgaatgcgtctgtcatgaataaatattgcagcataccgccttggcctgcagcgatgatatctgccgcgattttgtcagtatagatttcatattgcacacctccaggctgtttttccagagccacttctcttgcgacattgtcttggtctgtttcatttacgaatctcttacctttagtattcacaaggataccgccggcaaattgtgttttggtggtggcgattcgcccagttccaggaatttgaaggctttcaagtcccatcggataagtaggaatccatcccatggaatccacatccaaggcaccgccaacggtctgcatcaggcgtaatccctgaccatctgcgctgggaagtccgccagtgatgattacggagccgtattcattaaattccgccatcagctttggattccctgaatacccacccgttgccatgatgattcccttagttcctgtaagctttagtgtcttaccttcactggaagcaagtgcactaagcacctgtcctttctcgttggggagaagggcggtcacttcggtgttgagaagcagttcaatgtttgggtttttctttaccatttcatccaggagttcgtggactgcagatttgtactgatcagtatggggcttcattttgtaggatcttggataggagtatagcgtatgttcaggagcaaaaacggatttatgtccttctttatctgtggtgaactcattatcggaaagaccttgttcccacatccagttcaccattttctgagcaccgctgacgtaaagatcaatgagctcttcatttggctttccgttcagcttggacccttcggctatgatatcttctttataggactcaagggagtcttcggtgagtccatccagttcctgaatgatggtttcagcacctgaaattgttccactggtagtattaagagagcctccagtcatgggcatcttatccacgatgatgactttttcagcgccatattcagcagctctaatagcagcggaaagcccagcagcaccagcacccacgacaatcacatcagcagagagctccgcatcataagcagtctgttcctgttcttcttcattgggagaaactggaacctcaggatctttttcagtcttctttgcacaacctgctgcaccgatggcgagcattgcaatcatgacgaaggatagtatttttttcatgacaacctccaaatcgttaaaatattgacgatttgagtataacaatattgagctctttaaaaatacagtaatcatgaatgaatatatagaaaaggtgaaaatactctgagttatcttatcctgagtttaaattttttcaatctcatttactttatgaacctgcgtgtgctttcggaactcctttggagagagtccatagtgctttttaaatgcagctgagaagtgattcggtgaagagaactccatatgaaatgcaatatctttaatgctgtattctgtcattaggagcattttactggcgtaatcgagtcttgctgatagaatatattcttttggagagcattttaaaatagacttgaaaattttgtacaggtagttttccgttatacctatcttagcggccacgatttccactgagagattcttctggatattttcttgtatgattgaggaagctcttcctagatattctgattgaacactgtcgcagcagttgtgatgtgaatcggtcttctgtatggatatttgtgagcgatagacttctacagccatggcgtggaagagattttccataagggatagatatccaggtttttttgatgaggattcttctagaatcctttcaaataaaaagatcagccgagtctggacagagcgccataacatgctgtccttctgaataccaagtttttgaaagaagctttcttgcagatgtaatgggtccaagtgaaaatagatgtacccaaacttacagccttcctgtcccacagaggcactgagaatacagtaggctttcgtgaacagtaaatcccctttttcaagaaaaatagtttgtccgcagatttccatagaagcagatccatctaaaatcagtatcaaacggttttgagggacagggagctgatgaagaagatctttcttttcaaggcagcggtaaccacaaccggttatttttgatgtgaataatccaagaaaggcagatagttcatcttcttgcagtccgtaaatgctctgattgtatttatatttcatcttaaaatttctccctgaagcaatcttttaaattaggctgagtatatgacattgttattaatgtgtcaacaatggtgttctaatacagttgattcatataacattcttttgagtgtgtttcgttgaaattatccagcttattagaacaaataaagcgagaaaaatgaagattaaaaatagaaactaatgatagaataagccatatcaacctgcgaggagaattcttgtataagaaaagaacagatctgcaatcgtaacaaatctgttcttcagtagaagtttagttgacctcttttcaaaaatggagattatttctctctgatgactttaaagatggtctttgaaagccactcttcaaaagcgtggacaccttcacttcttttcagttccacaaaactgaagtcctccacgataaatggtattttttgataggccagcataaagaaatcttctgtggcaaagaattggatttcatgagggttaaagctctttctctcaatcacccggtggaacatcttttgtgcataagacttggcgtctgcagtggttcggaaaacagcatccgcgtagctgctgcctcctgggactctttttgtgctgttgtacatattgatcactcctcataatttttattctatgcaggaatttcaggcaataaaaaaagcccttcttaaggagctatgcatctcctcatcgatattagctgaaccaccttacttataaaaaaagcaggttggtatgcggtcgtagagctaatcctctaccgcaactcctgataagaactattgaattgtacatattaactatatcataaattttgaagatgtgaagaggatctttccatcctatggtatgataaaagcaaaaaaataaaagcaggtgattctatggaccttagaaaagtgcatgacagcaatctttggcagattgtgaagcttagtgtgggagaagaccagagaaaattcgttgcaaccaacacgcaaagtatactgcaggcgtataccaccatcacttctggtggcgttgcccttccttttggcctttatgagggagaagaactggtgggctttgtgatgtttggattcgatggatttgaggaaggggatcctgaatatatcaagggaagctatggtctgtggaggtttatgatcgatgaaaatcatcaaggaaaaggctatgggaaaaaagccatggaagcctgccttgcttatttaagaacctttccttgcggaaaagcgaagtactgctggctttcttatgaacctgaaaatgaagttgcaaaaaagctctacaattcctttgggtttcaagaaacgggggatgtagttggaggagaagtgatctctctgctggaactataaacggatagaactagaataagaaggtgcctagagacattacaattctccaggcacctttttttagaccattcatttattggaacgtagactactgttggataaaactctctacgataacaccagagtttgaaaggggatagaatgtatttcacaatgtgtagatcatgagaactgcatgtaggatgagatctactcttccctcggagattcatatcttatcatcttagacaagttatatatagttcctaacagattcagcttaccaagagagttcctcttcttcacactatcttttatctgaattattttcatctctgcatttgccatagtacttctactttttgtatgtcaggggtggaagttactatgacaattaaggagcgaaaaataaataagtagaaatatctataaatagcttgactatattcgaggttattgatagaataaatataacaacatcaaagcatagcgaaggttttaatgttgttataataaagctttatgctgtgaggtatccccagattatttataatctggggtatccttttttatcgggggaatttgtaaattctttgaaaattataactatttctgtaatttacttcccaaaaatttacatatcatgtattatattcttaatattatacattgggggtaaaaaatgaaatatacgataggtcttgatattggagttacttctataggttgggctgttataaataacgagaagaaaagaatagagaatctaggcgtcaggatatttgatgctgcggaaaatcctaaagatggctcatcgttagctgtacctagaagattggctagatccaccagaaggcgactacggagaaggaagcacagacttgaacgaattagaaggctttatctgaagtataggttgctagatgaagtgagtttagagaacttatttatgaacttggtaaattatgatccatatgaactaagaaataaagctttatttgaaagaatatcagatgcggatttagcgcgaattcttctccacatatcaaaaagacgtgggtttaagtcgaatagaaagagtgagctgcaagagaaagatatgggggtcctattatctagtattgatcagaaccgtaaaattattgaggaaagagaaattacgccgggtcagcttctaaacgaacttgaaataaaaagaaataagagaggagaatataaaaacactttactccgctctaatcttattgatgaaataactaagatatttgagaaacaacgtgaatttggaaatgataagctcacagaggagtttgaaagagaatttacagaaatattctcatcacaacgcagctttgcaaaacctggtgcaattgaagatttaactggaaaatgtacattcgaaaaaacagagttacgtgctccatcagcagcgtatacatctgaaatatttatggtgctaactaaagcgaacagtatcgttatacagaatcaggaaggcgaacgaaagctcaatagagaagaaattcggttgattaaagacgaagcacttaaaaagaaaaaggttacattctcatctttaagaaatgtgcttcagttagaagaaggagatatcttcaactttttggactataactctaagaataaagcaggagagctcctatctagggaagagatagagaagagcccgtttattgagctgaagcattaccataagttgagagataccattgtgaaggatcttggagaagtgacttggttaaagctattggaaaatccattgtcgattgatactattgcttatgcgctcacattcagaaaaagtgatgaagatataaggaactacttttttggcatagagaactatggaaaaaacgtaatacggcctgagatagatattcatcccgagattgttgagtgtgttcttaaactctccttctcaagaacaaaaaatctatccttgaaagcgatgaataagatgataccatatttaatggaaggctttcgttacgatgaggctgcgtctaaagctggatatcatcatagtgtcagaaacacgaaagagaagcatatagttcttccggttttagaaatagaggagataaagaatccagttgtttttagagctctttcacaatgcagaaaagttataaatagtattatacgaatatatggatcaccatatagaatccatatcgagcttgcaagagatttaagtaaatcatttactgacagaaaggaaatcgaaaagaaacagaaggaaaatttggctgagaaggaaagagctgcgaatcattttcaggagctttatcaccaagttccgaaatctagtgatatcttaaaatggagacttttgaaagaacaggacgggaaatgtgcctattcattaaaaactattgatccctatcgtcttactgaatcagggtatacagaaattgatcatattcttccgtattcgagaacgtttgataattcatatttcaacaaagttcttgttctaacagatgagaatcgtgacaaactgaacagaacaccctatgagtactttggccacgataatgaccgttggcatcgatttgaagcttgggttaatgcggcaaaactacctagagataaaaagcaaaaattgttacgtatgcaattgaaacgagaccagggtatagagatgaaagacagagcactcaatgatacacgttatatttcaagatacttgaagaactatttagaagacaatcttctgtttgctgaaggaccccaaaagaaaagagtattcacctataaagggcaaatgacagcttatcttcgtcaccgatggggttttgaagcaaaagaccgaagtaatgatcttcatcatgcattggatgcggttctcgttggggtgatgaatgacgggatggttcaggagattgaacgtgcgtcaaaaagaagagagttctataagagaaaaattgaacgagagtatgtagatccggagactggagaaattgttgaagagctctatatgaaaattaacaatacgaagctaaatgagccatgggtagattttagacaagaagtggagattagactttccgagaatcctcagtatgggttgaaacataaaaaattctataattacgaccctgaagagattgaactgataaaaccgatttttgtttctaggatgccttttagaaaaataacaggccatgcgcatatggagacgattagaggggcaaaatatctcgataagaatattaaaacatctaaagaagttttaagtaacattaccttagaaaaacttgaaaagatgattggaaaagaaacggatcgcctaacatacaatctaattaaagagagacttttacagcataataataaaccgcaagaagcttttaaagaacctctttataaactgaaaaaggatggttcgaatggaccagaaataaagtctattaagattggagaaacttatagtgcaggagttcctattaatgatggaactggagtcgcagataacggaaagatgattcgtgtagatattttcaaaaaacaaggaaaacattatgcaattcctgtatatgttcaccacatagtgaacggagcgctaccaaataaagtgataaatccaggaagaccttttagcgaatggaaagagctcgatgatacctacgaatttttgttctctctttacaaaaacgatcttattaagttgcaattcaaaaacggagaagagatttttgggtattatataatgattgatagttcggtagcgagtgtcactattgagaatgatgcgagatctgaaaagtatcgtaaatcaattatgacttgcaaagagattcaaaagtggtctgttgatgtattgggaaatattagtcaaataaaaaaggagcaaaggcgtgagttggagaagcctcgtcatttcaagcaaggttcagctttcaattgagaaagatcagctttgtatttcatcatatgattctattaaaataccagtagaagatatcagcgttatcgtgttggaaagtctccaatcgatgattactacttacacactcagtaagcttgcggagagaaatgttctggtttttatatgtgatgaaaagcatttgccacaaggtgtttttttacctttcattcaacattctagaattacaaaaattataagtgcacagtgtagtatgtccaaaccaacaaagaatcgggtctggcagaagataatcgaaagaaaaatctggaaccagggtcgtgtcttagagataattgggtttaatgaggcgaaaactttgatgctatattcgaacaaagtacaatcaggtgataaatctagaagagagggtattgctgcaagagaatactttagggttttgtttcctgatatgtcaagaagagaggatactttacaaaatgctggacttaattatggatatgccatacttcgaggggcaatttcaaggtcattagtttcatatggtctattaccaaccattggtgttggacattatagtgagctgaatgcatttaatcttgcagatgacatcatagaggtatttagacctttggtagatttgttcgtttatactcatttgtatggaagtaaggacgaagaattaagtaaggagttaagagggcatcttgtaaatctactaaactatcaaattgagatggagtcaatgaagatttctgtgcttaacgcaatcgatcgcgtagtagaaacataccagaaggtctgcttaactggaaattatacggacctgattctccctaaaattattgaactacaggtacatgactatgagtgatcagatgaggagatttatgagattaatagtattctttgatttacctgttgtaaagaaggaagatagaaagggatatactcagtttcggaagtttcttcttaaagatggttatgatatggttcaattctcagtgtattcgagaatctgtaacggtcaagaaagtgtaaataagcatttagggcgattagaaaaaaatctcccatcaaaaggatctgttagatgtatgcagataacagaaaaacagtatggtgagattaagtttttggtaggaaaaccaacaaaaaaagaagtgaaagtcagtgcaagtcaaatctcatttttttagaatttaatgggcctagaacccctgaagcctttggt

SEQ ID NO: 1573 - DNA, 23435 bp, synthetic construct
  source 1..23435: mol_type = other DNA
  misc_feature 1..23435: note = Synthetic
tgttgcaaaaacatatgacttaaatataaaagagtgtaaacaatttaaagaactaataagtaaattaaatgaagaagaacaaaaagagataaaagataaaaatatcactacttttgaagatatgatacctattttattaaatagagtagcaacaaaaaatcttaaaactttaacttctttatttcaagaatcagtaacaccttcaatttctattggattagatgaaagcttaacaaaattctctgtaaaaatcggaaattctcctgcattactttttgaagaagatattcaaaaagagatgcaaagttttattacaaaaaggtttgaagcagaccaaaaaatagtaaaacaaaaaactgcagaaattgcaaaacttgtaacactaatgggacaatatttaaatgatgcaatttctagtagtggaaatagtggagatgaagtttctagtataaaagatgaaataaaagctataaatctaactgaaaatggacttgaagagcttacaaacttacaaagcaaacttataagtgcggctatgtctattgaaaatgaaatgcatcaagtagaagaaaaactatcttctggtaaaactcatgtggaagagcttgaagcaaaagttaaaaagcttgaagaagagcttgataaatcaaaaaaagagagtataaaagaccacttaactggtgttcttacaagaaaagcttttgaatatgaagcaaataaagttgaaaaaaactatgaaagaaatagcacacaatatgcaatagtattttttgatatagaccattttaaagctataaatgatacatatggacatgcaggtggagatatgatactttcaacttttgggaaaatcttaagtaaatatactagagaattagatattgtaggaagatatggtggtgaagagtttgttgcaataattcactttaacctaaaaagagaacttctaaaatacctaaaaagaataaaaagtattgttacagaaaataattttgtttatgggaaatataaaataagaataactttctcagctggagttactattagaaatgaccatacttcatttgatagtgctttacaaaaggcagatatgcttctatatgaagcaaaagaagctggaagaaataagattatattagaagaccatacaataatataaataagtaaattacttatttatattttgatacattccttaacattttttgaaataattaaaaaataatatatttttccattgttatccccatttttttttactaaaatagttctgagaaaaatccaaatgagctagaatgaaaaaaacaaaattctatataaaaataaggcctacaatatcttttatattgattgcacttattagttcagtaattgttgtaactctttctttaaattactacttttctaaggaacttgcctttagtgccacaaaggagaaatttgaccaaatttctcaaaaagttgaacaaaaagttaaagaaacagataaaagaaataatgacattatctctatctttgaactgtataaagcctctgaagaaactgctttaaaaaataaaagacatcccctccttccacttttaactaccactttaaataataatccttatatttatgctttatatgtgggaaataaaaatggaaatttttatgaggtaataaatcttgaaattagtaaaaaactagaagaaaaatataaaaaacaaaaagatgaaagatggcttattattaaaatatatgaggaagagggaaaaagagttcaatatgaagagtttttaaataaaaatcttgaacaagtaagaagtataaaaaaagaagcaatttataatccaagtttaagaccttggtttcttgaagcacttaaaaataatgatattataaaaacaaaaccatatatgtacataaatttagaagctaaagggataacttacgctaaagctataaaaaatagcaatagtgtctttgggattgatatttctttggaaagtattaataattttctaagtaatcaagtagattcaaaaagtcaattatttttatttaaaaatactcaagagttaattgcttctataaattatagctttaaaaagaatgaaaatccaaatttattcccttataaagagattttaaaagttttaaataaacaaaaagttctaaaagaaaatattataaaaattgataatatagaatattttttatatttttcaaaaattgattcaaaatatagtgaaaaggaggatttagtaatcttaactcctattgaaaatattatgtattcttttacaaaaaaaatatattactctttttttataactattgtgattttaacttttaccatacctttaatttggtattcaacaaaaatcttggttaatcctattcataaactagcaaaagaaaatgaaaaaatcataaatagaaattttgagaaagtagaaaatatcaataccaatataaaagagctacatgagttatctaattctttagttaatatgtcaaattctttaaaagagtatgaaaataaacaaaaagagcttatggattcttttataaaacttcttgcaaatgctattgatgcgaagtcaaaatatacaggaggacattgtgaaagagtacctattttaacaatgcttttagcaaaaaaagcaagtgagtgtaaagagggaatatttaaagaatttgaattaaaaaatgaagaagaaaaaagagaattaagtgttgctgcatggttgcatgactgtggaaaaataactacacctgaatatgtagtagataaagctacaaagttagaaacaatttataatagaattcatgaaataagaacaagatttgaagtaatacatagagatattactattaaaatgtatgaaaatattttaaatggggctaatgaaactaaagaaaaacaaaaagcaaaactagaacaagaagagttaataaaagagtttgaagctattgcaaaggcaaatattggctctgagtttatgaccgatgaagatatagaaaaaataaaagagatttcaaaaagaacttggataagaaattttgataatacaataggtttatcaaatgaagaaaaacaaagattagtatctattcaaacaccaaaaatagaaaatcttttaagtgataaacttgagcatcttataaaaagagatccttcacaaataaaagagtatgataaatataattttaaaatagaagtacctgaatatttatataatttaggagagatatataaccttactataaaaaaggggactttaaatactgaagagagatttaagattaatgaacatatggctatgactatcattatgttagaacagcttccttttcctgaaggattaaaaaaagttccagaatatgcaggtgctcaccatgaaacactaataggcacaggttatcctagaaaattaacaaaagaacaaatgtcaattccagctagaataatggcagttgcagatatttttgaagcactaacagcttcagatagaccatataaagatgcaaaaactttaagcgagtcaattaaaatcttaaactttatggcaaaagataaacatatagatgaagatatttttaaactatttttaacttcaggggcatataaagagtatgctttaaaatatctaaaaaaagaacaaattgatgaagttgatatttcaaaatatatttgaaatatcaactctttttatcaaattcctttggaatagaaaaataaaaaccttgagaatactttatacctaaacttttaactttttcatagatttctttattacatacatactctgcaataacttctatatttgcttcttttgcaaactgtacaatacttttcacaagtaaaaaggcgattttatcatctaaaatctttttaataattgttccatcaattttaataaaatcactatttacttcagcaagataaataaagtttgaatatccacttccaaaatcatcaatatatattttatatcccaattgttttaataataaaatattttctttagaatctttacaattaattaaatcttcactttctgatatttcaatacctaatctatttgagatatttggttttgaagcaaatctttttaaaatatctaaaactgaatcatttacaatatcttgtggatttaaattaacattaatcataatatttggttcttctaaaagtttttcaaaacagatttttaaaactcttttagagatatttcttagtaaaaaagttcctttaattacaggtaaaatcttatcaggagtaacaatatttccatttttatcaactattcttaaaagtgcttcatattgagtatatttttcttcttcatcatttacaattttttgataataacaaataactcttttttcttcaattgcttcttttatctcatttattgataataaaccattattatcatcaaatcttttatttgtttcatcatagatttgaatattgtttcttcctttattttttgcattgtataaagcaatatcagcaagtttaaaagcttgagaaaaagttcttgatttatttggttctaaatttactccaattgaaacactaacttctaaaacatctttttttgaaatatggattttacttttttgaatatttgtaaaaattctttctattacatttaaagctataaatctatcttctcttttaacttttgctaagattaaaaactcttctccaccatatcttattacaatatcttcttttgctctaattgaagataaaataatatgagaaatttgtcttaaaaccttatctcctatatcatgtccataagtatcatttatcactttaaaatggtcaatatcaattgcaccaattatatattggtccaaatttataaaggtttcaagttcatgtaaatagtttctattataaacatttgtaagcctatcaatataagcacttctttttacagataaatatttaatagcttgaataattaatacaattaaaaaaagtattaaaatagagataattccaataattccatttttcattagtgtgatgattttatttatctcatcaagcttttctacagagaaatctacagcaaaaaccaactccacattatcattatttaaaataggaactaaatatgttattgataattgttttagatatttattcttaattaaagtaggtttttttgtagtatagatacttagccatttttcattatctatgtcaaatttttgatttataaaagctttattttcagattttgctccatctactaaaaatctaaaaactcctctttcatctttatacaaaagatatacatactttatattttgagtgattaaagcttctagtttttcttctatatctttttgtaaggcttcattttcttttatttgaacattataacttttagtcttgtctaactgcctatttatagtctctgcactatttttaataatagaaatcacatcagtagttgagatttctaccatcttcttttgaatagtattttcaagttttacagtaccatacaataaaaaaagcagtataaaagaagctactacaacaaaaaagattaaaaacaatgaatttttaaagaaaaaaacttttttcattaaaaatcctctataaatttttgataattttttggaagagaaatttttctactttctaatctatttttaataaaaactatatttggtctacttttagtccagaaaaatgcaccaaaaaattcctcattatttagtaattttttataattgttagtaaaaaaatatttatttttacctttacaaggaacaaatgatttatttactttttttataaaaacaaaatctgaactttcacaagtttcacttaacttgaaaaattttgaataaattgatttttcatcttctgaaatatttggtatatataattttatttcttcatttttagaaataagtgaagcaatattgaagataatctttgcttctaattctatctctttattatatttatttactaaaaaagtatattgacttgataaaacagatgaaataaggataaataataaaactaatactttcattagaatacccacttcatagagatattaaaagctctaccataatcttcaaatgcaaaatcacttccagggaaaccatctttgtataaagattgtgttgatttatccaacacattcatagcttttgcactaaatgataaatcttttgtatagttatatgtaacaccaaaacttaaatcaaaactactaggaactcttacatcaaggtatctatatgagtttttatatattaaagaagtaaaatattcaaatttaccacttttgctcatatattttaaatatccacctttatttgaattatttaaagtttcacttagctttgttgtgtagtaattaaattctaattttttattatttgagaatagatattcatataaaaatattaaaccttttgtttttatagtatggtcaatatttacaaaaccaacaggtgttaaatatacaaaatcttcaatctttacatcattgtattttaatctactctttgatttttcagtagtaaataccccttcaatactaaaaatcttatatttttgagagtctaaataaatatcttttttatctacaaaatcaatattataaaaagaaggaggaagataagtttttgtataaaatgtttttaatccaaagttttcaaaaggagtataaataagccctactctatataactcttcagttgtatcttctaaataaccacttctttggtatctatcaatttttgcatttgtaataaatgtcatattgtcattgaaattatatttatcttgaaaaagtaaagaatataccctttcttggtcaaaatcatgaaatttaccttggtctatctcttgatttaaaaaatttactgtttttctattttttactttgtattttttatttgaaaagttaaaaccaaaaagtagtgaattgttttcatattcataagtttttgataaatgcgcttgcaatttagtaaattttagattttctttaaactcttttggtaaagtttgtcccatcttagtcaaatctattactggaactaaacctatgccttggtcatttttttctgaatattctctttcatttatatcaaaagaaactgaagcctttaaagactcatcagctaaaaattttttagaaatatctataaataaatcttttgatacaatttcaccatcattgggaacaacatccaaagaaagtcccataaagttgtctttttttacatcagcataaccaatattgatatttgttgtatcgttgtttatatcaaaatataaatatcttctttttgcattattttgtaatgtttgatttttataagtatcactatcataaatattgctattttttacataagctaaatatgaccatccattttcaaaaacttgagaatgtattaaagactgttcatttgagcctctttttgaaaagtcagtttgtaaagtatttccattttctttgtaggcttttttagtataaattctaataaaataaattcctgtatcattacctaaagaaaaagagctttctccataataaacttctatataatcaactatatctaaaggcaaatctccccaagataaaaaaggtgattgagtatgaacagaagagatttcatggtcatttataaaaaaccttacaaaaccaccaactgttgtcttagagccaggaagagagatacttggaactccatatctattttgattgtaatttaataaaggtaattcttttaaaatatcacttagttttgtatattgcataagtttaatatctttttgagaatagataaaaacatgtcctagattttcatctactgttttcaaagactcttcactactatcttgatagttttccaataatgagtcaatagaagtatttgcaaatacactatttataacaataaagaaaatgaatataatttttttcatctaatacctaatttataattattacagtctatattatgtcatatcttaactaataaatataaagaaattaagatatattttatacaaaattattaatttaagttaattatattattctaaagtcactgaaaagtcatttaaagtaatttttttataaaatagcttataaaattgggtttttaaagttatttaatataagcaagtaaagtaaaattacttgcttataaggctttatcttttgtaatatgcagttattgttgatttttctattgtgtgttgatttatataatagcctactattgctggagttgtatcttttgttaaacctagtttttccacatcaagtgcatagattgtaaattcatatttgtgagctttatctccaattggtggacaagcccctccaaaccctactttaccataatcagtaacactttgcacaatctcttttgattctttatttccaaagctttcttttaactcttttttatcttttggaatatcaaaaacaatccaatgccaccatcctgaaccagtaggtgcatcggggtcatacatagtaatagcaaaagattttgtcttctttggtggattttcccatgaaagtttaggtgaaatattttcaccagtacatccaaagccattaaaaacttgctttattcccaattgaccagagattgtttcactttttaaagtaaaaccttgcgaaaataaaaacgaactacttaaaactaatacacttaatgcttttttcattatttctcctttttttatagtttataaaaaaaagaagatttaagctattggaaaatatttattttttgttgttttttaactgagttggtgtttggctataatattttttaaaagtttgaataaaccaagaaagattatcaaagccagtttgaatacaaacttcacttacattcatatttgtactttcaagtaaaacttttgctttttctaatctctttataacttgccattttttaggagtcattttaaaaacttctttaaatttttttcgaaatgaaacttctggcatattgaatttatacgctaaatctaaaatattatcttcatatgtgaaatttttttctacttcaattttaaaataattacttttataaatagaagctaaaaggtttataaactgttcttttgaagaactatttaagatatttaaaaaggcttcttctaactttagttttattagctcttctttattttttatatcttttaaaaagtagttttttgttgtatctattaagttttcaaattcaaaagaactatctatttttaggatatttatctcttttaaactttcatttttaaatgaaatattatattttttaataaaatctaataaaagactatcttcatataaaaaaagtagcgattcataatactcatctaaaatctctgacataatataattaccacttcttaaaaaaagtatagagtctttatttacttgaatactactattttcaaaatgtaataattttgtgccttttataacaaaaattataatattgtttttaatatatacttcattttttatttggggctctttttgaatataattgcaaaaagataaatttttaaattttattaaatttggctctaaacataaaggcaactcaattttcatacatcttcctaaactactctaaactatatgtcaaaatatttttttattatactagatataaaatcaaatatctaaataaatgtttttttgtgtgttatttaattttttataaaataaattatagaattctttctttttaattattatttcttttaaaaaagtaaaatatttactctaattaaataatagcttatctattgccaaaaaattatcaaatatgcatcaatttaatttagatgtctaaataatgtcacttaagcctttgtaaagttatatgcaaatagtattagaatatattaattttcttatgttagctttatagttaataatatcaaattacataattattttacttttaataacaaaggttttagatgaaaaagatattgtcattagatttagggattacgtcagtaggttattcaattttagatgaattaggaaataataaatattcattaatagactatggagtatttatgtttgattctccatatgacaaagatggtaactctaaaaaatcaatacatggtcaaaatacatcaactaaaaaactttataatctaaaaaaagaaaggaaaaaaaatcttgcacaactttttgaagattttaatttagataaaaaagatgatttattaaatcaagaaaagaaaaatttatttataaataaatgggaactaagagctaaaaaagtttttgaagaaaaactaacatatcaagaattattttcagttttgtatttaattgcaaaacatagagggtacaaatctcttgatacagatgatttacttgaagaattttgtgaaaaattgggattaaatcaagaaaataaaaaagaaaaaaaagatgatgagaaaggcaaaataaaacaggctctaaaaactattgaaaattttaaagtacaatttcctcaaaaaacgatacctcaaattatttatgaaattgaaatccaaaaagaaaacccaacttttagaaaccatgataattataattatatgataagacgagaatatataaatgaagagattaaaacacttattttgtctcaagaaaaatttggtctatttgatactacttttgatacaaaactttttatagataagctgattaaaataatagataatcaaaaagattcatcaaatgatttatcactatttgcaaattgcgaatattttaaagaagaaaaagttgcacatcaattttcactcctagctgatatttataaaatgtatcaagcaatatcaaacattacttttaattcaaagccaagtattaaaatttctaaagaacaaataaaacaaattgcagaaaatttttttgatagactaaaaaatggaaaaaatatttcagatataaaatataaagaaataagaaaaatattaaaacttgatgataatattaaaatttttgataaagaagatagttataagttaaaagataaagttcaagataatactataacaaaatttcattttattaataatctttccaaatatgataaaaactttattattaatattttaaataaatctaataaatatgaaattatgaaagaaatttttgatgttttaagagatgaaaaacagccaaaaccaatttatgaaaaattaagtgtagtattttcaaaatacaatctagtaaacgatgaatctataaaaaataaaataatcttagaactaataaaaaataaagtaggtaaaagcctaaatatttcccatctagctatgataaatataattccattttttgaagaaggattaacacttgatgagattaaacagaaattaaattttagtagagaagaagattatttatcatttaaaaaaggaattaagtatctaagtattactcaatttgaaaaagatgataatttagaaataaataatcacccagttaaatatgtagtaagtgcagtattaagactcataaaacatcttcattcaatatatggaatatttgatgaaataagagttgaaagtacaagagaactaagccttaatgaagaatcaagaaaaaatatcgatagagccaatagagaaaatgaagcaaaaatcaaaaatattttagaaaatgaacaatatcaagaaaaagctaaagagtatggcaaaaatctagaaaaatatgtaaaaaaaatcataatgtgggaagaacaaaattttatatgtccatattgccaaacgaataaaagagcaattagctttgaacaaattattaaaaatgaagtagatatagaccatattgtacctcgaagtttaggtggacttagtgtaaagcataatttggttttagtgcataaagattgtaatgtttcaaaatctaaccaattaccttataattatttaaaaaataaagaacaatatgaaaaaatagtagaagatttattttctcaacataaaatttcatggaaaaaaagaaaaaatttactagcaacaaatcttgatgaagtttataaagatacttttgaaagtaaacctttaagagctacaagttatatagaagctttaactgcacaaattttaaaaagatattatccatttcaaaaccaaacaaaaaattctatggaaataagacatattcaaggtagagcaacttcaaatattagaaaacttttaaatgtaaaaacaaaagtcagagatacaaatattcatcatgcaattgatgctattttaattggacttacaaataaatcttggcttcaaaaactctcaaatacttttagagaaaatttggatgtaattgatgatatggcaagagaaaatatcaaaaaaacaatacctcttattgaagggattgaaccaaaagaattaatagaaacaatagaagataattacaatatttatggtgaagactcagttttttataaagatatttttggaaaaacaaaagttgtaaatttttgggtatctaaaaaacccatggtttcaaaaattcataaagatactatttatagtaaaaaagaaaatgatttttatacagtaaaagaaaatattttaaataaatttacttctttgaaaataacaaataccacaaaaccagacaaattttttgaagattttaagaaaaatatattagaaaaaatgtatgtttatattactaatccaaatgatgttatttgtaagattgtaaaacatagagcagatgaaatcaaaacactattgaactcttttgaaaatatagataaaaaagacaaagaagcacttagtgttgcaaaacaaaagcttgatgaacttatacataaacctttattggataataacaacaaaccaataagaaaagttaagttttatcaaaaaaatttaacaggttttgatgtaagaggaggattagctacaaaagagaaaacatttataggatttaaagctactttagaaaataataaattatcttataaaagaattgatttatcaactgcaaaaaaaataaataataagtttgtagtagatagtgataatagttttaaagcttttaaaaatgatattatattttttatttttgcaaatgatagctataaaggtggtaaaattgtaagttttttagaagataaaaaaatggcttctttttcaaatcctagatttcctgcaagtataggaaatcaacctcacttttttttaacattatttaatggtaaaccaaatagtcataaacaacattatataaataaagctattggaataataaaattaaatttagatgttttaggcaatattaaatctttacaaacaattggaaatatagaaagtgagctttatacttttttaaaaggaattaaaaatgggatggaaagtagtacatttaacaaaaacttgtaaaataaaagtaaaagatgaaaatcttttgctttgttttaaggaagaaagtaatttagaagaaaatataaaagtgagtataaatgatatagattttatactttttgatagtacaaaattttctataactggaaaagctattgaattattaaataaaaaaggagttgcaactctttttatagatgaagaatttcatccctcttctattcttattccatatcatacacatacacttttaacagaaatggcaaatattcaaatatcaataactcaagaatttaaagctaaagcttggcaaaatatcataaaatcaaaaatttcaaatcaatcaataactttaaaatattggaataaaaaagagtttaatgaacttgaaagtttaagtaaaaaagttcaattatttgatagcaataatgatgaagcacaaagtgctagaatttattggaagtcactttttgaaaataaaacatttagacgagaacaaggaagcgaagatattataaatagtatgcttaattattcatatgccatactaagagccacaatggcaagaagtttaagtgtatcagggtttttacctgtatttggaatttggcatcaaaatagatacaatgcttttaatcttgtagatgatttaatagaaccttttagggctttttgtgatttacatataaaaatactactaaatactaagtattctcaaagtttatacttaaatatacctataaaaagagatttagtaaaactattgactttagaatgtgtaaaaataaatggtggaatatcaacactaagtaaagcaattgaaatatttgtaaaaaattataaaagagcagttctaaaagatgatatatcattaattgtatttccaagtataaacgaggatttatttaaaaatgagtgcttttaaaactatgtggttaatgataatgtttgatttaccaactaaaacaaaaaaagatagaaagcgttataactggtttcatgatgaacttgaaaaagaaggttttatgatgttgcaatattcaatttatggtaaaatctttagttctccagaagcagcaagttatggaagaaaaagaataaaagaatttataaacaaaaatataaagaaaggaaatataagaatgcttatgtttacagataagcaatttgcaaatatggaagtaataattggacaaaaatcagaagaagagaaaaatgaaccaatacaattattattgttttaattttaaataaaaagggagatagaaaaactatctcctaaaatcaactactattaaagtagtcttagtttaatacccctattaaactactatgtgttacaatttataagtagaattttatattttacttgcttaaagttttattattaaaaaaaaattaataaaatcataaattttttaaatattttatcggttttaatgcccctataaactactatgcgttacaattgaacacaatatcacaaaagatgaaatatagttttaatgcccctataaactactatgcgttacaatactgatagtttttaataactgaaatatttcgttttaatgcccctataaactactatgcgttacaatatttacctaagtttaaatatagtgaagcctgttttaatgtccctataaactactatgcgttacaattttcagcttctaaagtctcttcaacttcttgttttaatacccctataaactactatgcgttacaataatcgtgaaatgttttttcgacaaaatattgttttaatacccctataaactactatgcgttacaatcatctttatcaagtggcttttctagccattgttttaatacccctataaactactatgcgttacaattgtgcataacatagctttgatttactgtgtgttttaatacccctataaactactatgcgttacaatagtgtgtttcacaagctcatcaatcatagtgttttaatacccctataaactactatgcgttacaattccctaaatcagaattagaaaacttttctagttttaatacccctataaactactatgcgttacaatattaatcaaattttcgttgtctaagtttaggttttaatacccctataaactactatgcgttacaattaaacctaaatagcctaatccagcctctttgttttaatacccctataaactactatgcgttacaattgattcttgggggaaatgacaaagagattggttttaatacccctataaactactatgcgttacaatctaagcttcacgatacaactattacagctagttttaatacccctataaactactatgcgttacaataatcaaaataaaatgatgggagaaattagtgttttaatacccctataaactactatgcgttacaataaaaattgattaagtacatttataaaatttgttttaatacccctataaactactatgcgttacaataactcaattctaaaccatatggtctttgttgttttaatacccctataaactactatgcgttacaatcaaaagttatgcaaatacaagattgatattgttttaatacccctataaactactatgcgttacaattgatgcttcaacaaatggtgatgcaatctcagttttaatacccctataaactactatgcgttacaataccaagatatagaaatagtgtatgaaaactgttttaatacccctataaactactatgcgttacaatcgaaataattgtgaatagctattgttttctgttttaatacccctataaactactatgcgttacaattagcattatcaaggataccagaaacactctgttttaatacccctataaactactatgcgttacaataatcaatataaggagtactcaagaatgagtgttttaatacccctataaactactatgcgttacaattttgatttatgaggtatggcaaagactttagttttaatacccctataaactactatgcgttacaatagcaaaagcaaatgcagaacaatctatctcgttttaatacccctataaactactatacattatgtttttataaaataaagtatttaaattagtgttagattattttctcctgcccaattctataaagagcaaaatcatattttatagggtcgttgttatcaaactcttttagtttttcagtcactaaaagtgctgattttaaatcataagtttttctatttagaagtcctagtttttgtgaaacttgaaaggtatgagtatctaaaggcaagattaaatcactcttatttatgccactccataaacctaaatctaagctatcatttcttaccatccatcttaaaaacatattccatcttttatatggagcatttcctatttcttttatattattatttttatctcttttaaaagcagatgagactaaaaaagtaaagccttgagagttataatttgaaacttcataaatcttttttataagaaaatcaataccttctaaaacattattttcttttttataagcagataaaaaaagattatttaaactatccatttgttttaatcttttaaaagttttaaaaatagtttttatatcttcactattttgaaacctataataaaaactatctaaagctttatttatttcttgttcactttgctctaaaagggaaaaatccaaactatctaaaaactttactattaaagaagccttaccatatgcaaaaagtgcacataaaagtattatatactcatctttatatctacttgcaactaaaagagggtctggtttatcatatgtaagttcacaatcttgatttctagtacatacttcattatctaaaagttcttttatattcattcttttctaacctaaaattattgatttggtataatagcaacaattaaaaaaaaagagcgttaaatgaaatttgaaaatctaaaagaattaatacaaaaaagcagatgcacaagaagatttaaaccaaaagaaatatctataaaagagttagaagagcttgtagatttggcaagagtaacttcaagtgcaaaaaatatgcaaccattaaaatatatcttagttacaaaaaaagagtttgtaaagcaactttcacaaacagccttatgggctacacatcttacaaactggacacaaagtgaagaggaaagacctagtgcttacattattatgctaaatgacaaaacaatagatggctttgcgatgtttgatgcaggggtatcttttgaagctataagtttaggtgcaaaagcaaaagagttaagtgtttgtgctttggcttccataaacaaagaagtttgtaaagagttatttaatcttccagaacatttagaggttttaataggtattgccataggagaagcaaaagagaagataaaacttgtaaaagttgaaaataacaatacaaactattatagagatgaagaagatatacattgtgttcctaaaagagatttagaagagttaatcataggaaaatacaaatgaaaaatattttaataacaggttgttcttctggaataggatttgaaactgcaaaagttttaaaagaagcaggatttaaagtctatgcaacagcaagaaaagaagaagatgtagaaagattaaaagagttaggttttatctcatacttacttgatgttacaaaaaaagagcaaattagtgaagttttagaactaattttaaaagaagataaaaaactagatgcagtttttaataatgccggatttggacaaccaggcgctgttgaagatataagttctgaagttttaaaacagcagtttgagacaaatttatttggtttacatgaagttacttttcaaacaatgaaaatctttagaaaacaaggctatggtaagattatacaacatagttcagtcttaggaataatctctttaaaatttagaggagcatacaatgcaagtaaatatgctattgaaggacttgcagatactttaagacaagaagttatgggaagtgatataactataagtactataaatactgggcctgttacttctaaatttagagaaaatgccttaaaaaattttagaaaaaatatagatattgaaaatagttattttacaacaacatataaaaatgaattaaaacaaagacttgaaactactgaagataaagcactatttaatcttcctgcaacttccgttgctaaggttgttttacaaataatgaatagcaaaaaaccaaagcctagatattatataacaaaagctacgcatattttgggttttgcaaaaagagtattaagtacaagtttactagataagcttttaaataaaatatagcactaatttttagtgctattattaaaaaaaatagacttcattaaaaggaatagcttttgagtaataaaacccttggattatatctatttttatactctttaaaaaatcaacatcctcttttgtctctaccccttcactaataagtgtataatttaaatgttgacacatttttgcaatatctttatataaaattttaccttttgaggtagttatattatccaataaggttttatctagttttataatatttgcaggcaagatatgtaaatattgcaaagaagaaaagcctgtaccaaagtcatcaatactaatagcaaaaccattagcttttaatttcaatatatttttcataaacttacagtgttcacttgcaaaagttctttctaggatttctatttcaacatttttatttttaagttttctaattattttatttataatatattcattactaatagattcaggagataaatttatactaattcttgggaaaaatgattttttatgccatttttctaaatcttgcaaaacttgatttataacccataaatcaattacaaaattatagcctgccttttcaatttgtgagataaagtatggtcctacaattttattatctttggttttaaaccttaaaagagcttcaaagccataacattgatcatttttaatatctattttaggttgataatacaacaataaatcaccagaaattaaatcttctaccattttatgtgtatttgatttttcttttattatttctgcttgtgttttaaaaaaacttatctcttctataatatctacttgatcttttatattaaatttctcttttagtttttttgtattattatttaattcttgagattggtcatagagctttaaaaaaggtaaatatacaaatacaccaactattaaattaaataattgtaaaaaaacaaatatgtatgattgcgcattccctaacaaatatccacttacaaaaataggagtagtccaagataaaatatagtcactttcaggaatagcaaaaaaagaaaaaactaaatatgaagtaaaaaagttaataataggaagaagtaaaaaaggtattaataatgtaaaattcataataattggtaaaccaaataatagtatttcatttatattaaaaattgcaaaaggaaatgagataaatgatatttttctattatgatgattttttgatttaagtattattgcaataattaaagataaagttgaaccagctccaccaaataccaaaaaactataaataaaagtttcagatgttaaattttgaaaaatttcttgttgagaataagataaatcagcaaaaatattataaatatgagttccatgaatacctgtaagccaccaaataatatgtgttgtaataacttgtataaaagtcttaatttcaattgaaaaattttcagttatagaaagaaaaaacttttcaagtattatttgtaaaaattcacttatataagggattagaaaagttaaaaaaagatagactattaaaattggaattaaagaattaactacaatttttaactgattactaataatataattttctttaattattttaagactttttattttatataaatagatatataaatatgtacttattataggaataaaaaaagcatatatttccatatgatgattatagtaaagctgattattctctataacccaagcaaattttataaaaactagtaaagaaatacaaatactaataaatctacttatatgataattatttgccaaataataagatattgcaattattaaaaaaatagggaaaagatatgaaaaagtatttgaaatatgaagaaaagattttattactatattatttgtatttgcatctatattaaaaacattaataaataatatacctaaagaagaaataatataaaaaggtacaatatctaaaaaggcttcctttaatgaaagatgtaataagttatttgaaattttcatttttttccttttacttggaaaagaataacataaaaaaataaattattaattaattatttaatttagtatagtttaaaaaaaaggggaacaaaagttccccttaatattaagcttctgtatttaaaaatggttttccataaaatcttatagttaaagctattacaagtaaaccaataggtaataaaattgtagcagagtatcctaaagcagcaggaataaatccaaaaacaatagaaactacacctacaaataaggcataaggtaattgagttgatatgtgatccatatggtcacaacttgcccccattgaagataaaatagatgtatcagaaataggagaacaatgatctccaaaaatagcacctgttaaaactgccccaatatttaagataatataatcacttaaagcagttggttctaatcccacatgaataccaattgcatttgctaaaggaattgttagaggcataaggattcccattgttccataagaagtaccagtagaaaaagagataactgaacctaaaataaaaataattgaaggtaaaataaactgaggtgtactatcagataataaagaaactaaatatgtagaagttcctaaatcttttattacagaagaaatagaccaagctaagattagaattactgctgtaataactaaagccttaactccaaatacccaagtttctaaagcttcatttaaatcaaatattttttgttgcatacccataccaatagctacaattgaagcaaataaagcagcttcaaaaagaacaatagaagcatcagcagcaccaaaacaatccctaatagaactaaatgagtatggatttgcttcaacagcttttaaagcttcaccttcaagtgaatgtaaaccattgaaataaaatccaataaaagcaacaataattaaaacagaaataggaataattgcattccacattgaatattctacattttttttaggagccatagtagaagattcttgatttaagtgttcttcttgtcttttgtgttttgatacttttcctgttgaagcagctctaatagcagctgttctcataggaccaaattctcttaaaaaatatgctgagaaaaatacaaatgctaacattaaaatattgtaaaatctataaggaatagtctcaacaaaaatagcataagcatttatttctggttgccctatcatactataagcatctttaattaaagagatttcataaccaatccaagtagaaataagagcaataccagcaataggagcagcagtagcatcaataacaaaagcaagtttttcccttgcaattcttagcttatcagttacaggtctcataataggaccaataattaatgagtttgcataatcatcaaaaaagataaaaaatcccattaaccaagtataaatctgtgcacttgcaggagatttcgccttagtagcaagcttttgtgcaatagctcttggccctcccatttttgtaataactgctattaatcctccaatagttaaaacttgaagaataattcccgcattccaagagtcggccattgaaccaatcatttttctaaccacatctacaaaagcacctgcaaatgcaacaaatacactaccatcaacaatatttaccataaatgttccagtaaaaatccccataaataaagagaaaattacatttctcgtaataaaagctaaaacaattgcaactaaaggaggaagaagggttaaacttccaaaaagttctgcatttgctttagcatctgctagtaacattaggggtaaaaacgttacaaacagtaaacttttagctaatctattcaaaataaaaactccacataaaaaatttctagattttagcataaaaatcatttaataataatttataagttacagtttgttatatggatactttaattttactaaatctcaaattagctactattgataaaaatattttattaaagcaaaaagctattaaagtatatgaaagaagactaatttattgaatatcttttgcatttgctttttgttggataaaatctgagatttgaattaaacaaaaagtaattaaaaatatcattaatcctgggaaaaaactaacccaccaagcaatatctattacagcccttccatcacttaataagctcccccatgacatatttggtggatttatcccaagtcctaaaaaagaaagtccagactcagctaaaattgctcctccaacagaaaaagtaaaagacataagaaaaataggtgctaaaagtggagcaaaatatttaaatattattttaaagtttgaaacatttgcaagttttaaaaccttgatataaggtttatttgaaatggcaaaactctcacttctaataagtctagccatactcatccagcctgttatagaaataacaataatcaaaataacagaagaagcttgaatatatgataccaaagctaaaagtaaaaagaatgtgggaaaagttaaaaataaatcaattaaaatagtaattgttttatctattttacctttaaaaaaccctgcattaatacctataaaaagtcctataattgaactaataacagcagataaaaaacctataattaaagaagtttgtccaccttgtaaaactcttgctaaaacatctcttcccaatctatcagtacctaaaggatgagcaagggaaggagaggataaaatagcatttggatttaaatcataaggtg

SEQ ID NO: 1574 - DNA, 23366 bp, synthetic construct
  source 1..23366: mol_type = other DNA
  misc_feature 1..23366: note = Synthetic
agtatcaactgataatctaaaaattgaagatgaaggcagtattaccgctaacggtaaaaaatttctcgatattgtcagaatattgaaagatgatgatattaatttggaagtaaaaaatgacactcttcttatatcacagggacactctaatttcaaactgcctactttttcgtataatgagtttccggaatttccttcttatgaaggaaaaccaagaatttccatcgaatcacacactctcattgaatctttaaaaaaaataacgcctgctatagataccaacaatccgaaatttgaacttaacggtgctttaatagatataaaaaaagattctataaactttgcagccacagatacacgaagattggcagttgttactcttaacaaccaaagtgagaacgaattgtccatcataattcctaaaaaagcaattgttgaaatacaaaaactcttttttgacaatatcgaactctattatgacgaaacaaatcttatcatccattcagaacaatatactttttttacaaaactcattaacggaaaattccctgaatattcaagaatcattcccaaagaaacaaactacaatttggttttgcctaaagccattatgattaattctatcaaacagattacaaccatatctacagatgtaaaactcacttttttcaatgataccatcagttttgaaagtttgagcgaagacaacatcgaagcaaaaacagaaattagttacaacacaggctttgatgaacctttttcaatagcaatcaattcaaaatatctacttgattttttaaattctataaactcttcagaatttacaatcggactcaatgaaggaaacttgcctttcgtcttaaaagatgaaaacttcataacagtggtcatgcctatagttatctaaactgtaggttcttcctctctccccatagctataaaacttatcataagattattttagataaaatgtcttcaattatgccaaaaatggcaatggagtattaaatgcaacaagaatatggcgctagtaatattaaagttcttaaaggcttggaagctgttcgtaaacgtcccggtatgtatatcggagataccggacatcgcggtctgcatcacttggtctatgaagttattgataactctattgatgaagcgatggcagggtattgtgacactataacagtaacactcacaaaaaacggtacatgtaaagtcagtgacaacggtcgtggaattccgacagagatgcaccctaccgaaaatatgagtgccgctactgttgttttaacagtactgcatgccggtggtaaatttgacaaagatacctacaaagtttccggaggactgcacggagtcggtgtttctgttgtaaatgcactctcttctgatttgcatatgacaatctaccgtgacgggaaaattcatgaacaggattttaaaatggggattccccaaggacctcttgaagttaccggaacaacccgcaaaaccggtacaactattgaatttgcagcagatccaagcatctttacagaaacaataaccttcgaatacgaatatctggcaaaaagatttaaagaacttgcctatctcaatccttttatcactataaaattcaatgatgaaagaaacggtacaaaagaagtctatcattttgaaggcggtatagcccagtatgtaactgatatgaataaaaaagaaattgttgccaatgtctacagtttcagcggaaaagccgaagatatagagtttgacattgccctgatgtataatgactcctatgaagaaaaacttgcctcattcgtcaataatattcgcacgccaaacgggggaacacatgaagcaggttttcgtgcaggacttacgcgtgttatatcaaactataatgccaaaaacggtgccgcaaaagaaaaagatgtcaaaatttccggagatgatgtaaaagaaggactgattacaattgtttctgtccgtgttccggaacctcagtttgaaggacagacaaaaggaaaactcggaaatacctatgtacgtccgcttattcaaaaagcaacaggtgaagctctcaacaaatattttgaagaaaatcctatagaggccaaagcaattgtcagcaaagctctaatggcggcacgcggtcgtgaagcggctaaaaaagcaagagaattaacacgtagaaaagattctatgagtgttggcacgcttccgggaaagttggctgattgtcaaagcaaagatgcgagtatctgtgaactctacctggtggaaggagattctgcaggcggttctgcaaaaatgggacgtgaccgtgtttttcaggcaattttaccacttaaaggtaagattttaaatgttgaaaaagcacggcttgaaaagattttaaaatcagatgaaattacaaacatgataacagctatgggttgtggaatcggggaagagtacaaagaagaaaaactccgttaccataaaattatcatcatgacggatgctgatgttgacggttctcatattcaaacacttctgctaactttctttttcagatattttcgtgatattattgataaaggctatttgtaccttgcgcaaccaccactctatcgttacaaaaaaggcaaaaaagagatctatttcaaagatgatgccgctatgaatgaatatcttatcagcaacggtatagaatctttggaagtagacggagtaggaaataatgatttaatagcctattttaaaatggttgatcattatgcttcttcgcttgaagccctcaatcgtcgttatgcacttgtaaaacttatccgtcattttattgaaaatcctgacctaattgctttgcctgcaaaagagatgtttgttgaaatagagaaatttttaagttcaataaataacaatattttaacctataccatcaatgaagaaacaaatgaaattcatctttttgttcagacagaaacgggaatggaagagttactgataaatgatgatctcttttctgctccgcattttaatgaagcaagttttgtttacaaaaaaataacagaatgggatattcattttgacaaagatatcatagaagtacttgaagagattaaagactatgcaagaaagggtgcctatatccaacgctacaaaggtctgggtgaaatgaatcctgatcagttatgggaaacaacaatgacacctgaaaaccgtgtgcttttacaaatttccatagaagatgcagccgttgcatcagatgcatttacattgtttatgggtgacgaagttgaacctcgtcgtaactatatcgaaacacatgcaaaagatgtgaagcatttagacgtataaatgttattgtcccaaacaaaagagagggaataccgttttaagcttgcacttagaatggctttacctatctttgctcttatacttgctttcatttttcatacacttatcagcaattatactacacttgaaatatcattttatatagaagctgttttacttttacttgtcagtatctactttattttttttcttatatacaaaggatttgatgtaaaaataacagacagtgttacaaaaacattcagcagggaatatttataccagtttttgcaaaaagagataaaacagaaaaaagaatatactctgattcttataagtatagataatttaaacgatataaattctctttacggattaaaaaacggagataaagttttaaagtatgttgttgattggataacagagtatttaaaaaaagaggggattgaaaattttcctattggtcacattaaaggcggtgattttatcataggacttgatggggcaaaagacaaatacagcactttgctggaacttatatgtctaaaatcgaatgatttgaatgtggatgatatagaaataaaaatatcaggagctattacagatacgagttattcaaaagatttaaattacctcatagaaaacctttttgatcttcaaaacaaaaacaaaaatatgaaatacaaagaagaagagagtattaatccaaatgaattggaattattggtcattgatgctattgaaaataaaaatcttcttattatgtcacaggcagtttatgacaataaaaacaatgtagtctttagagaatgttatataaaactcaaaggacaaaacagaaaaataattcatcctaaaacatacttgaaagttattaacaaactgggactcggtgtgagttttgatttgatggttttagaagaaattttaaagaactgccaatacagagaaaatatttatgcaatcaatgttttacctacatcactgagaaatgacaagtttctttcaaaaacaaaagaacttttaaaagaatgttctgacaaaaaaataatgtttgttttaagtgaaatgcagtattattcttatataagcagatataatagtataataaaatcattaaaagctttgggtgtccttatagccatagacagattaggttcactgcatacaagttttttatatttaagagaattaaatattgatgtagtccgatttgacacctattattcaaataaagaaaaattagttcacaatcggaatataattgatggttttattgttatggctcatgaaaaaggtgtaaaaacctggataaaaaacatagaagacaaagaggtttacactgttgccaaagagatgaaaattgattatctcgaaggaaaatatctctcagaaattgaaactgttctaaactaaaataaatattttaggaaagtagattttttttgagccagatgagagcatcagatttagtgttaaaaatattttggatttgtgcctgatatactgattggagtatttttgaaaactcttttgatggctgtagaccgagttcaattaaatcttttcccctgattaaaggagagattggtttatgaagtacattgagtttttttgcttttttgagtaagtactctgtatctttttttttcttctgcgttacatgtaagtagtgtgcataaaatgcaatatctgttttttgggcaagtttgtatatatcataatcattaaaattgtctaaatcaaaatcaattgtatgaagctgtaaaactttttcaattaattttttttcatttgtgactctctgtaaaaatgtctgtgtctgtatggtcgaaaactttgatgttataacagccaaagcaagtataacaaactctttatcatttgttattggcagctgttttaacatgtccaaagagttgaaaacttctttatactcttgtgtatttagaaatgcaagttctttaaaaaatgaaaatgctcctaagtttttaagaagattaaatccaagagacggtttgtctgattttagaagaagcttttgtaattcttgaaaaactctttcttttggaagctcttcaagaagtttttcttttatcatctctttacatgtaaacataagagttttatcaagcttcatatggaagcgggatgcaaagacaacggcacgaagaacccgcaaaggatcctctttaaatttttgtttatccacagaacgtaatatttttttatctaaatcttctctgccgtgataaggatccaacatttttttactgacaacatcatagcctatggcattgatggtaaaatctcttctgagtgcagctgttttaaaatccagatttttatcaattttgattgtaaaaccctgatgtcccgaagcaattttgttatcttctcttggcagagaaaaatccaaatccaaatttttatagtccatcttgcatacaccaaaactctttcctacactgttcacatttccaaattcctgcaaaatttcttccactttatcaagagaactgacgccgtagagttcgatatcaatatcatttgaaggaattcccaaaagcgcatcgcgaatataaccgcctacaatgacagggagtatattgtgtctgtataatttgtgaaaaatagtatcgagactctttggataggtaatcatactctaagtatatcactaattttacaaggatataataattatttgggtataattcgcgaaaaatagctgaaagtagtctgaaatgcagaattttcttcagcaaattttccaaataaaggaaacccctaatgcaaaaaattagaaatattgccgttatcgctcacgttgaccacggtaaaactacactggttgatgggctcttggagcaatccggtacattcggttctcacgaacaacatgatgaaagagcgatggatagtaatgacatcgaaaaagagcgtggtattacgattctttcaaaaaatacagctattcgttataaagattataaaatcaatattatagatactccgggccacgccgattttggtggggaagttgaacgtgttcttaaaatggttgatggtgttttggtgcttgttgatgcctatgaaggtgttatgcctcaaacaaaatttgttgtgaaaaaaatgttggcactcggtaaaatgccaattgttgttatcaataaaattgacaaaccttctgctgatcctgagcgtgttgtagatgagatgtttgacctttttgcagatatgggtgcaacagacgaacagcaggattttcctattatttatgcagcggctcgtgacgggatggcaaaaatggatatggatgatcctgatggagattttgagtgtatttttgaaacaatcatcaataaaattcctgaacctgaaggggatgcacaaaatcctctccaggcacaggtatttacacttgattatgacaactatgtcggtaaaatcggtatcagtcgtatctttaacggtactgttcacaaaggtgacaatgttatgcttgcaaaagctgacggggaaatggtcaaaggaaagatatccaaacttatcggttttcacggactcaaccgtatggaaatagatgaagctgaagccggagatattgttgcatttgcaggaatggaaactgttgatgtgggagacactatagcagaccctgtcaatcctgttgcacttgaccctatgcatgtggaagagccaacacttacggttgtatttgcagtaaatgattctcctttggcaggtaaagaggggaaacacgtaacatcaaacaagcttcgtgaaagacttgaatttgagatgaataccaatgttgctatgcgtcttgaggttgttggtgaaggtaaatttaaagtttccggtcgcggtgagttacaaatcacggtacttgccgaaaatatgcgccgtgaagattttgaattttcgatttcacgcccggaagttatcactaaagagattaacggtgtaaaatgtgaaccgtatgagcatttggttattgatgttcctgaagatttaagcggtacggtaattgagcgcttaggaaaaagaaaagcggaaatgaaatcaatgcttccgatgggacagggttttcagagaatcgaatttgaaattccggcacgtgccttaatcggtttccgtggacagtttttgacagatacaaaaggtgagggtgtgatgaatcactctttcttggaattccgtccgttctcaggtgaagtggagtcacgttcatacggtgcccttgtttctatgacatcgggttctacgctggctttctcactttttggtattcaagaccgtggtgttctttttatcggtgtgcagactgaagtgtatgagggtatgattatcggtgagcattctcgttcaaatgacctggtggttaatcctattaaaggaaaagcacagtcaaatgtccgttcaagcggtgctgatgaagcgattaaacttgtaccgccacgcgatatgtcactggaacgtgcattagagtggatagaagatgatgaacttcttgaagtaacacctaaaaatattcgtattcgtaagaaatttttaacagagagtgaaagaaaacgtcacgctcgtaaataaaaaaactttacaactcttttttccatccagtactccggatggaaaatacttcctgatacaaaccccacatgacctccaaattcactgacttccagttcaacagcagatgatatttcattgtattttggcaatatatcaggaggcataaaagggtcatcttttgcatgaataatgagtgttggcgttgatatgagttttaaaaattgtctgctgctggattttgtataatactcctgtgcagaggaaaagccgtgaacaggtgctgtgtaggcattgtcaaattcccaaaaattttttaatttttttatctcatttcgctgcaaagaaataatctgtttcatattaaaagattcatattttttttccaaatctctttttaaatcttttaataaaattttttgataaaattttgcaaagcctttatttatgtgtgtagcacatttgtctaaaagcatcggtgcagatacagcaacagcggcagtaagtttacatgtagagcctttttctcctaaaagtttcaggagcatatttgcaccgagtgaaaatccgaccgcaaatatctttgcccggggatatctttttgaaacagcctgtataaattcaaaagcatcttgcgtatcgccactgtgatatgatcttggtttgagattttgtttacccgaacagcctctaaaatgcataaccacactgttgaatcccgcttctttgagttcttttactgttccttgaatatagggagatttataagaacctgccaatccgtgaaagagtatgacaacaggagtcgtttttgtatgattatcaatctttttccagtaacattcgagaaaatctccgtcactgagagtgaatgtttctatctcaaaatttttgacaagaacctttcgaaagaggctggcatagagtgtttgcaggtgtctgttttttaataaaaaagatggtttgaaattcattcccatatcttatcaaaaatttatctacagatggatataatcatacactcaaataatcacttacaagggaattccatgaacagaaaacagatatataaccctgactcaactgaaaatgttaatgacagaaaagtctttggcggaaatccgacaggtatttttgaactcaacaacattaaataccaatgggcatataatctgtgggagatgatgctcaacaacacatggtttccaaaagaagttgatatgacacgggatgtcaatgattacaaacaactcactgatgcggaaaaaacagcctatgacaaagcactttctcagcttatttttatggattctctacagacaaacaatttaatagacaatgtaaatccttatgtgactgcccctgagataaatcttattttggtgcgtcagtcttttgaagaggctctgcattcacaaagttatgcggtgatggttgacagcatctctacaaattcggaagagatatatgatctgtggcgcagagatatgatgctcaaacacaaaaatgatacgattgccgcagtctatcaggaactggcaaaaaatccgacagatacaaattttgtcaaagcatgttttgcaaatcagatacttgaaggcatctatttttacagtggttttacctacatctatacactggcacgttcgggaaaaatgctaggttcggcacagatgattcgttttattcagcgggatgaagtgacacacctggtgctttttcaaaaccttattaacacactcagaaaagagcgatcggacctttttaccgatgccctcagagcagatgttatagagatgtttaaagaagctgtcaagcttgagaccgagtggggcaaatatatcacgcagggacagattttaggtttgacagacgggattgttgagcagtatattcagtatcttgccgatgacagattaaactctgtcggttttgacaagctgtacaatgtctccaaccctatcaaatgggtagatgactttgcaaaattcaatgaccagaaaacaaacttctttgaaggcactgtaacaaattactcaaaaggcagcctttcgtttgatgatgacttctagttaaattatgataaaatatgtccattcgctttaaatggacataaaaaatgaaacaaatactctctcttgatttaggaattacatctgttggttactcagttatacaagaacatgaaacagacaaatattctcttgtagattatggggttagcatgtttgataaaccaactgataaagatggcaattcaaaaaaacttctgcattctcaagcactgagtgcaaaaaaactccataaacttagaaaacaacgaaaacaaaagttagcttctctttttgaaaaatataatcttggaaacagacaagaattattagaacaagaaaaaaataatatttataaaaacaaatgggaactccatggaaaaacagtatttgaaaaaaagttgagtattggtgaaatttttactattttatatcatatagcaaaacatcgagggtataagtcacttgacagcggggatttacttgaagagttatgtgactctttaggcatagaaacagaggctaacaaatcaaaaaaagatgatgagcgagggcaaataaaacaggcactaaaaaatattgaagcactgcgtgagaaacattcacaaaaaacagtagcgcaaattatttatgagttagaaaacaaaaaagagaatcctatatttcgcaatcacgacaattataattatatgatacgccgtgagtatataaatgatgaaataagaaaaattattaaagttcaggatgcttttggtgcgtttgacaataatttggatagtgatgcttttgtaaatgatgttgtagctgtaatagatgaccaaaaagaatcaacaaatgacctgtcgttgtttggaaaatgtgaatactattcagaatattatgtagcgcatcagtattctttactaagtgatatttttaagatgtatcaagctgttgcaaacattacatttaacaaagaaaagataaaaattaccaaagaacagattgctcttgttgcccaagattttttagataaagtgaaaaatgcaaagagtgtcaaagatattaaatacaaagatattcgtaagattttaaaattagatgataatgtaaaaatttttaataaagatgatagctatctaagtagaggaaaaacacaggaaaacagtatagtaaaatttcattttgtagatactctctctaaaatagataaaagttttgtgaaagatattttttccagcgatgaaagttatgcgctgatgcgtgagatatttgatgtgctgcattatgaaaaatctcctaagttaatttatgagcaactaaaaaataaaattagcaatgaacaggtaattattgatttgattcgtaataaaaaaggaaattctttaaatatttcttcttttgctatgttgcaactgcttccttattttgaagaggggttgacattagatgagattaagcaaaagcttggactccaaaggcaagaagattatgctgagtataaaaaaggaataaaatatcttcatatcacaagttatgaaaaagatgatgatttagaaataaataatcatcctgtcaaatatgctgttagtgcagctttacgtgttgtcaaatatcttcatgcaaaatatggagctttcgatgagataaaagtagaaagcacaagagaattgagcttgaatgaaaaggctaaaaaagagatagaaaaagccaacagagcatttgaaaaagagatacaacagatagtagaaaataccgagtatcaaaagatagcgcaaagctacggaaaaaatcttcataaatatgcccgtaaaatattgatgtgggaagagcaagagcgattcgatatttacagtggtaaaagtataggaataacagatattttttctaacaatgtagatattgaccatatagttccaagaagtttgggtgggcttagtgtcaaacataattttgtattaatacatcgtgatgaaaatcttcaaaaatccaatcaactgccaatgaattatgtagcagataaagaaacatataaaaacagagtagagcatctttttcatgaacataaaattaattggaaaaaaagaaagaatcttttagccaacaatcttgatgagatatataaagatacatttgaatcgaaatctctacgggcaacaagctatattgaagctttgacggcacaagttttgaagcgttattatccctttcaagatgtaaaaaaattaaaagatggctctgctgtaagacatttacaagggagagcaacttcaaatattcgcaaagtattgggtgtaaagacaaaaaatagagagacaaacatacatcatgcaatagatgctattttaattggagtaacaaatcattcttggttacaaaaactctcaaatactttcagagaaaattttggacgtattaatgatgaagcacgtaaaaacatcaaaaaagcactgccctatatggatggtttagagataaaagatttggtgaaggagatagaatcgcaatataacagttttggagaggattctatcttttacaaggatatttggggaaaagtaaaaacagttaatttttgggtttcaaaaaaaccaatgagttcaaaagtacataaagatactatttatgcaaaaaaagatgatggtatttataccgtcagagaaaatattattgcaaaatttatagggcttaaagtcacaccaatgacatcaccagaagagtttattaaaaaatttcataaagatatattacaaaagatgtatagttttaaaacaaaccctcatgatattatttgtaagattgtagaacaaagagctgaagaaattaaagagttgctttggaattttgaatttttggatgttaaaaataaagagcagatgagtgaagcaaaaacaaaacttgagttacttatacataaagctttagtggacaataatggaaatattattcgtaaagtaaagttttatcagacaaatctccccggttttaatatccgtggcggacttgcaacaaaagaaaaaacttttataggttttagagcctataaaaatggtgaaaagttagaatatgatcgtattgatgtagcaaattttgcaaagatacaaaaaaataatgacggaagttttaaggcgtataaaaatgatgttgttttctttgtttacaagaatggaagctttagaggtggtcaaatagtcagttatattaaaaagtcttcaggtagtaaattatgtgcatttttaaatccaagatttccaactgcaagtgaatatcaaccatcttcattttgtaaaattgaaaaagggaaacattcaggagcaaaacaacagagtattggttctgctataggaattataaaactacatcttgatatattgggaaatataaaatcatatcagattttaggtaatgctgagagtcaaattttgaacgagataaagagtatagtgagtcaataatgggttttaaagttttacatctcacacgaccatgtaagataaaaattcaaaatgctaatatgcatctctatttttatgatgacgcaaatgaagtaaaagttacactgcgtgatatagattttcttcttttcgataatacacagttctctataactggggcaaccttacaacttttagcacagtcaaatattgcgacactgtttatagacgaagtgtatcatccttgtgctattcttacaccatatcatcaacactcaacgatgagcgaaatagcacatgctcaagtgtcgttagatgttacatttaaaagtaaatcttggcaaaatatcattatatcaaaagtgaaaaatcaagcagaagttcttgcttttatgtctttagacactgctaatgaattgcgagagtttgcaaaaaaagtgactttgtatgatgcaaatcaagatgaagcacaggctgcaagactctattggaaatcactttttaatatgcaaacttttagacgtgaacaaggcagtgaagatattgtcaatgtgatgcttaattatgtttatgcaatagtacgtgcttgtattgcaagagatgtaagtgtgagtggtatgctaccggtttttggcatttggcataaaaataagtataatgcctttgccttagtggatgatttgatggaaccctttcgtcctgtatgtgatttatatgttaaattgttactcaataaaaaatatcatgctgccaataatcttagcacaaatattaaacgagatttgattgctattttaaacaaagagtatttaattataaatgatggtgtttcgactgtgataacagccattggcctgtttgtacgagagtataagaaatctatgatgatgcaaagtgcagaaacacttatttttccaagaatcaatacagagaaattttacaatgagttcttttagagttatgtggctaatgataatgtttgatcttccgacaaaaagtaaaaaagataaaaaacggtaccattggtttcacaaggaattggaaaaagagggatatatgatgttgcaatattctgtatacggaaagatttttgcttcttctgactctgcaaagtatggaaaaaaacgtataaaagattttatagatagaaatataaagcatggaaacatacgcatactgatgtttacagataaacagttctcaagtatggagataattattggtgaggaaagtattgaagaaaagaatgagccaaagcaattgctactcttttaaaatggagcatagccgaagctatgctctaaagtcagctaccatttggtagccttagtttaatacccctattaaacttgtgtgtcatacaacagaaatattgtatctaaaattatcaaaaaacgcaaaaaatgtgtaaaaaatgcaactttttgtaaatatttatcggttttaatacccctacaaacttgcgtgtgatacaatttcatcaaatttttcttttaagtctgcatcgttttaatacccctacaaacttgcgtgtgatacaattaagcgttctttataatccatctgattcaggttttaatacccctacaaacttgcgtgtgatacaaatatgttataattgcttttatgataaaaccacaacaaaaagttataaaatttttagatgttaagtatattgctaaaaagaagaattgattaatgttagactacaccctttgttctctcttgtttgaaacgacacagagttatgaaaataatttacagacacttttggcactcattacacaaacagaaaaaaataccattatagttgcacctgaagtgtgtttgacttcttatgattatgagcgtatggatgcaatgcttgcctttgcgccacgagccactgaggcactgaaaaaagtttctcataacaaaattattgttttgacaatgttggaagaaaaagaggggaaagtctataactttgccaaagttttttataacggagaagtggtctttcaaagagcaaaagccaaactttttaaatttggcgatgaagacaaatacatgcatgcaggcagtgaaaaagattttaaaatagtggaagttgccggcattaagttagccgtgtttgtttgttttgaactgcgttttaaagagctgtggtgcaagagcgaaggtgcagatgtgattgctgtgccttcttggtggggtgctttgcgacgcgaacatttcaaaatcctcacgcagtcacttgctcttataaatcagtgttatgttgtggcaagtgacagtgcaaacgaagagtgcacggcaatgagtggtattatcaccccgcagggtgaagcgtttagaaacataagcaagccttgtttgaaaatgcaatacaagaaaaaagagataagagtgatgagaagatatatggatgtggggatagaataatttggacagaataacagcgacaaaaacagcccgtttggcacaagagtgcagtgcacagtttcctttaagtgaagaagtaaaaaaagcgattgcggctacaaacagagaagcctttgttccaactggttttaagcataatgcctataaactcgatgctttgcctataggggccaatcagtatatcagctctcctttgacggttgcaaagatgacggagtatctctttccccgaggagcagacagagttttagaagttggctgtggcagtggataccaggctgctgtactttcacatctttttcgcggtgtatttaccatagaacgcatagaatctttgatacttgaagcaaaaaaaaggtttcgtgagcttggtataaacaatgtccatgcccgtacagatgacggacaaaacggctggattcaatatgcgccttatgacagaattcttttttctgcaacagcgaaagagattccaaaaaaactctttgaacagttggctgaggggggaattcttgttgcccctttgcaaaaagggaacaaacaggttattacccgttttataaaaaacggggagcatattgaagaagaagagcttgaagagtgtgattttgttcctatacttgacggggtactcaagtagctttttaaagctttttatagtagaatagtagtaatttaattgagggcataatcatggaagagatgtatggcataaagtatacgaagccagaagttgttttgctgcaagataccggtattggtgtagcagaaacagctgcgcgtacatgttatgacagttttggcaacagtgaaaatgagattgttcaagagattgaaaaggtacttcctgatacgaaaatgtgtgaatctttgaacaatatagaagagtcacagctgcttgatgatttggcatggacctattttcaccactctattttggaacatgccaatttgagttatcttatccgtgggacaagccgaggggttttacaagaacatgcaagacaccgtatacaggcaatcagtgtaagaagtacacgctatactatgagttctttgattaatgcttttgttgctgcaaaacactcaggagagagagaattttttatagaaaaggttttgggttttgatatgtttgtcactgccgatgaagcctataacagacttgaaatcagcgcaatgtatgagaaacttgattttcagtcaaaaaaagtagataatttttacgaacttgctgttgcaaaaagttctcttcctcttttgaaagaatttcaaggcaagcctcaaaaactttatgatgctttgcagaccggaaaaaagaagagaaatgtaggtgatgcttttaaacacatcattacagataatgtcaaagttgacatggtagtgacatttaatctcagaagtttgaaaaactatcttacattgcgcgacagcggtgctgcctattttcaaatacgctggctggctcaggagatgatgaaagtcactccaaaaaaatatcttgatttgattatcaagaaaaaataggattttttatgattaagatttcaatacttacaatactttttttgacaggatgttccaacattactataacagcggccatgtgtgacaaaattcaaagtgatcccactgccacaattccccaagagtgccgagactatagtgaaaaagaggcagataaggcatttaataaagtcgtgaacgagaaaaaagtttctgactcagatttagaatttcataaagaaaagtagtataattccaaaaaattaatgaaggaataaaatatgccaagaagtgaagtatgtgaattatgtgccagcagtgaagatgtgactcttttagaactgcctgtaagtgatggcagtgaagaacaaagtgtgtatgtttgccgtacatgtaaagagcagatagaaaatgatgagcttgatgaaactcattttaactgtctcaatgatgctatgtggagtgaagtgccggctgtaaaaatactttcgtatatattatggaacaggcttggtcgcggggatatgacagatatgatgtatcttgaagaagaagagaaaaaacttgcagatgcagctatcaatgcagaagcaaacaaagtagtttttcgagatgcaaacggcgttgaactcaaggcgggtgattccatcgttatattaaaagatttagatgtcaagggtgccggatttactgcaaaacgcggaacaactgtgacaagaattgcattgccgcatgatatggatgaccatgttgaaggtcgcgtcaacggaacaaagatttatctgaaaaccgaatttattaaaaaagcataaaagaaaaaatattgaaaccatacgagcgattttataaaatagaaaaagattttcgcaatccttatgcccgtgatcgggacagaattattcactccgggtcatttagaaaacttgagtacaaaacacaggtttttctaaaccatgagggtgatttttttcgtacacgtttaacacactctatagaagtatctcagattgcacgctcgatagcatcacagcttgaactgaatgaatcactggccgaagcaattgctcttgcgcatgatctcgggcatacaccttttggacatgtaggcggagatactctggatgaatgcttgaaagctgacggattttccaacggatttgagcacaatttccaatcatttcgggttgtgaccaaacttgaaaaacggtataaaaattttgacggactcaatcttacttttgcaacacttgaaggaattttgaagcactcttatccctacaaaaaaccctttctcccagaaataatagacaaacagtttgatttaaacaagcatcctacttacgaggctatggttgtagaccgtgccgatgaaattgcgtatatgagccatgacatagatgacggggtgaactccggactgcttacttttgaggatctcaaagagagcgaacttgcctgtgaaattcttgaaaaggttgcgttggaaggtgtaggagaagagaatgatgaaatgttccgctacagattcagttcacatctcataaaccatctggtctattccctccttgaatactcaaagcaaaaagttgcgcattgtgaagaaacgcctataggttttgaaaaagagcttgaaacaaaaataaaaaaactcaaaaagcttctatttgtcaagatgtatcagcataaaaatatagttcgaaaaatgtatgccggaaaacaggctgtcaaaggactctataaaggtctgatggaagaagaaaaaatgcttccgcagttttattacaagcagttggatgtgcgaagcaaacacagggttattgcagattatattgcaagcatgagcgacaggtatgcactcaattttcataatgaaatgtatggaaatatttaaagtatctcttatatatgagatacttttgttacaagctcatggacagatttttcaatcgtttcggctttttctttcatagtttggattgctgattttgtaatactcattgtttgctgctgttcttgtgtcaggttttttgattcataggcttcattttttataattttagaattttctgtatcatccaggcttttttgatgggtatctgctacttcatctctggcttgggctaagccttcttgcagttgttttgatatgtcgacaagttccaatgtatattgtgcatttttttctacattattacttgaatccaaaatgctttgtacaatgacattgacacttgcatttatttctgtgagtgatttttgagtactttctgcaagttttcttacttcatcggcgacaacagcaaatccacgcccatgttcacccgctcgggctgcttcgatagcggcattgagagccaaaagatttgttttatctgatatgtccgaaataatcgtgagtatatttttaatatcttctgcattttctgtgagtgatttcagattttcattcacaagcatttctccttcatgtgtttggataatttggttttcaagtgtagacatttgtataacagattcgtttatttttacagctaccttgtccaaactttctaaaacttcttgagaaaattctaaattactgtctgattccactgtaatgatatcaagcctatctaaaacttttttaccaagattctcagagtcgagaaaatctttttcaactagagaaatgtttgtctttaaatagttgagttctttatcgagttcctgtgatgaagaggctaaatgttttgtttcatagacttttgcagtaaatatgtttataagttcaatcatctctttatactcttttgagtattttaattgcatagtgataggttcgtcaactttaaaattagagagggaatgaataatttttttagcaacatcaacaccgtttattttttcgtctaaatcatgtatcaaaataacaaaagcaataactacctgtataatttgagaaagaatattatcggtaaaaacaaaagtatttacaagaagcagaacaataccaacccagtggacaagtctcatgcgaaggaaaagtgatgtcatagcagtaccttaatgtaggataatacaattattatagcattgaaaatcagtttttcttataaattagggggggatttttatgaattaaaagttgaaatgtaacgttctcccgaaggagaagcgtttacaggcgtgattcgtaacgtctcatcatataaagacgtttaagcattttcttacgagaagcaattttgaactttttacgtttttcagtctctgtttcatggaaacggcgagcacgagcttctgtaacgattaagttacggtcaacttgttttttgaaacgtctgtaagcagcatcaaagttgtcatctggacgtagtacaataccaggcatatcacatcacccactttctgtttaaatttgaaagggaattatagcataataaatttttctttcaaagtcgatattgttttttctatcgtgtggcacatgaaataatttttggtaaatttgctatgtcttcctgtattgtgtctaaaaagcagtacagaattttatttttaccaagagaataaataatccacttgccgctttgttttgtttgtacaagttgggcttcacgcatctgttttaaatggcgtgaaaccaatggctgtgagagctctaatgtgtcacagatttcacatacacagagctctttttctctgtaaagcaatgctatgatttttactctgttactgtctgataatatttttgcaagctgaactaatttttccatctaatctctttcgaagttttattatataacaatatcgttatatgaattatatcataaaaaggaatattggttatgaaaaaattattattagttttaattttaggatttgtctcttttggagcagattctggagaagatatttacaaagcaaaatgtgcctcatgtcacgctatgaaagggatgatggatcagacacagatgcaggcaatgcgtcaaaaaatgcaaaatgccacacaggaagaaaaaatggcaatgcgtgaaaaaatgatgctcaaaatgcaaaaaagcaaaatgaaagcaccgccgatgccgatggtatcaaaacgtttgaaaatgatgcttaaaacccgtgaagattttattgcttttgtagcagattatatacaaaacccttcaataaagaaaggtttctgtatgccgatggcatataaacgctttggcacaatgcctccgataggaaaaacgctaagcaaagaagagagaacggttgttgcttcctggctgtatgacaattttaaagagtcatggggaaaatccatgggcggtaaaatgtgtgagatgaaaaacaaaaatatgaaatgcggcgcaggaaaatgcggtgccgtaaaaatccaaacacactaggtttatgatggaaactattatgctttttttctctgctttggttgatttaagcaacgccatggccccttatattttgtttggacttgtttttgccggatttttgcatgagcttgttcctgagagtattgtaaaaaaccatcttggaaaagattctgttatgtcggtgatcaaagcgacagttttcggtattcctcttcctgtatgttcttgcggggtgattcctttggcaacgggtatcaaaaaaagcggtgcaagtaacggtgccacactctcttttttgatctctacaccgattacaggggttgattccatacttgcgacttatggaatgtttggctgggtttttaccatatacagggtagtaacttcgatgattatttcggtcattgccggaattttatccaatttttaccctgaagaggagagcaaaaaagagcaaaaatctgcagcggtatttagtatgaaggctccgacaaaccagccttctgtaatgactttttcagcagtaaaaacatctgatgatgcaagctgttgcagcacgcagacaagcagtggcgagaaaaaaaacaatattgtcaaaaatgccttcacatatgcttttggaacacttttaaaagacattgcgtcgccattgctcataggtctgcttctgggtgctttaataactgtggcggttcctgacaatctgagtgaaatactgataaaatacaactggctttcgtacatcatagtgatagccatcgccgtgcctatgtatgtatgtgcaaccgcttctttgccaattgccgcaggtttgatgttggccggtgtgagtcccggggcggcctttgtttttttaagcgcgggtcctgcgacaaatacggtcactataggtgttgtaaaaaagatgttaggaacaagaactctttatatttatctcgggaccatcatagccggttcccttcttttcggactgggacttgactatctttttcgtgatgtcaatgtcaaagaacttgtgcatatggatgaagatgccggtttggcagcatggatcgcaagtcttgttctttggggatttgtgctgtattatgtaataaaaccatattttttcaaggataaagagtgtaatgacggcagttgttgcagtgcttagggtataataggattatgaaaaagagactgcttacatttgttttattgttgtcaatgagttttaacatactccatgcgtatgtaatagaggttcttgacacagacccgtgtcaggtgagtgagtatgtccatgaatttagcaacaacagtgagacagcggacaactgtatttgtcagttgcaccactgttttcacatcgcttttattcttcctgaaattaatatcccttttatgcgtgaaaatttttctcaaaaaccctattcacatatcaaaatatatgagtttaattcttatgataattttttaaaacctcctatctgcgcatagtttccaacctatatttataaattaataacgaacaaaaggataactatgtttaaaaaaagcatacttgcaatacttggattgtgtgcagttgtatctgcacagaattttgatacatttttacatgaggctttgcaggcatcaccctatctcaaagcaaatgctttggagattgagcgtgctgatgtgcagtcaagtctgatacagagatataaaaacccgaaactctcacttgaggcgtcaaaatttactcc

SEQ ID NO: 1575 - DNA, 23357 bp, synthetic construct
  misc_feature 1..23357: note = Synthetic
  source 1..23357: mol_type = other DNA
taaaaaaagataagaatgtagaaaaagtaatatttattagttctatagtttctgctaaaaaagttagtataatcataagagataatgcaggaggtatatctgctgatataatagaaagaatctttgaaccatactttacaacaaagcataaagcacaaggtacaggtattggtttatatatgacagaagaaattatagttaaacatttagatggaaagatatctgtaaaaaatcatgattttatatacaataataaaaaatacacaggagctgaatttactattgaatttgatttataaatataatcttaaaataagtttgtatttatgaatttaataaatgtaatgattttatataaattagtaagtaaatgtagtttgtgatttttaaaaagaaagttttaatttaataacacagtggtgcgaatggtcggaattgaaccgacactccgaaaccggaattggattttaagtccaacgcgtctacctattccgccacactcgcacttattggtagttgatttgtttgtgttattaatattaaaaaaatggtggctcgagacagaatcgaactgtcgacacaaggattttcaatcctttgctctaccgactgagctatcgcgccacacgtggtgggaagagaaggactcgaaccttcgaagccgtaggcggcggatttacaatccgcaggatttgaccactctccaaccttcccgaaatactcaaatgatggatggggtagaaggattcgaaccttcgaatgctagcaccaaaagctagtgccttaccacttggcgataccccaatcgtttaagtggcggtattataataccagttactttaaagataactgaaattataatagagataatgtaaaatattgaaatttttaagtatttaaaaaaaatacttattattcatagggtgtgattacaggtgggaactgttcaaatgattttttgattgcacttgcaatagttcttttgtttttatgattttgaactgggtttgaaaattgtagatatttaatagaaccttgttctgttttttctcttttataaacaaaggcaacttttttaccaagcttaacagtattatcataaatcacttttgcatattcacttatatatgggaattctttcgaactgattttatctccccatgcaaaaaatacaaattttccactaggaattaggtttgcagcatccaaatacataatttctctttcaaactctgtattttgagctgagttatatatttctaaatcatcattaaatttcattaaaagtgttgaagcatcaatgttttgttcatttagattaaataagtttctaatctctactattttaccagcacaatgttcactcatagcttgtttaaagactgtgatatatgtttctgcttttaattctaccatttctccaaaactatcaaagttttgatctagtaagtaattatttgaatcataacctacaggagttactacagggttgtataaaaaaactgtacctattatgtttttttttctttctttagctgatttaattttcgcttttaattctttaggagttattacttcatcttctgcaccaaaatacatatagctagatgtaataaaaatctcttcatatttagtttcaattgttccaaaatattgcataaaattccttatttatttcttttgggatagtaacaaatcttagtatatagtttgcttatactagtgttacttccttttttggtatgtttttaagtttgcacattcttttaatatctcatcataatactttgtattagaatatttatcttttagtttatcaaaatatttaccataattgttatctatatatttattataagttttatttcttgtataagaccaagttctaggtgcttcataagaagtaatttcttttggataactataagatgatttttttgcaaagtttatatcaaaaagtgctaattctgattttgctagcatatatgtgatttttgctttaaactctttattttttgcatattttaatgctttttcataatactttatagaatcatttactttttttagttccaatactttattatgaaacgaataaacacttctgtattctgtagtaattatattagagttcccaaaataacttagattatagatggcatttgcatataaatagttgtcaattgcactatttggagtgttttttaatacttcttgtatttgtattattttgtccaaaaactcttttatcgtatatgtttgtttttcccctgaacgattatttcctctaattgaaacattaaaaggattgaattttatatattcatttagataattactttttattttacgggctttatcaaactcttgattattgattaaaagtttaatctgggttttctttagactttcatcaaagctaaaactattatcaattttttttattttttcttgttctttatatttttctttaaaatactcttccatttttgatttacttttgacattgataaattgtttaaattcatctaaagattctaaggtaaaagaactgttatttaagttgttgatatttgcactcaaaaaggctttaaacgtatcattttgttttttatataatttttctagtattacaaaagtatagttttgtattgcatttgatgtgtgatctttatcatttgttaattttgtcatttgtgaataaatatcattttctatttgtatatttatactttttagttgatttaaatttacaatataattaaatgtttgtgtttcgtgattatcatttgaaagtagaagcccagaagcaatctcttttgcttttttcaagttattagaatacaaattaaaatatcctaaagataagtttattgtatacatatcatctttttttattgtttgaagatagtttataaactcttgtgttggaaaattacgtacataataatcatctaaatcaaagaaatgctgtgaatttaaaagggctttatatagaacaaaatcaaaccaaacagaatttttatcaattttatatatattttttaattcttctataatattgctatttttatttaatgctctaagtgcatataatcttgctttttcgtagtttgaagtagggatatttacaagagtattccactgttcttttgtatgtatatggttgaaattataataagctaagtgccagtttattttgtctttatctagtaattttgagaactcataaacacctttttgtatttttttatctttgattaacgcacctgcataaataccttgaatccaatcttttacgattgttttttcttttgtttgtaataaatagctatactttttatatatttctaaaggttttaactctttataatgtgctaatcgtaaacttaagtaaaagtatctaagttttagccattctgggatattcgtgtttattctttttatagcttcatttataagtacttcttcttttatttctggttctttttgattactgtaataataatttacaacgtattgttcttgattttgaataaaattcaaatacgcttttatattttcatcttttataagtgaaatattttttctttggtaaactatttgctcaattgttttaagacttaagttttgttttaaatgcttttgccactcttctaaattggcttgttttgctctatttttataatcatcaataatatcattataaactgcagcactatctaaatttcttttttgatttgaaaaaggaagttctctttcttcaagaaataaaaatgatctattgctatagtcccaaccaccagcacatgaaaatacggcaatttttaaaagcagtgtaaataataaaatttttataatcatttgtaacctttaagtaaatttgttaaattgtatttatctttgtaggaaaaagtatagaatacaatttcgttaaatcgatttgaagcaattttaaaaaagtcgcttaaagctgtctttatatctttttcttttgaatcttcaaatctaaatatatcatctttgtaaacatatcgtcctttgaaataatcactttctaaacacttataaatattaggagatatttctataaagtttgaagaaaaatcttctttttttgctccttggattatttctaaagctacactttttctaaaccaaatagcttgagaatataaaggaagtgctagttttaatttcaaaggataaatatcaaaattatagtgatattttctagcaatattattatctaaaatagaattttttgtttcaagttttgtaatagttgacatattatagtacatcaataaaccataatcaacaggaggaacacccgttcttttagcgtattttacttgatgaagtcgtattgttgcacttaattttatagctagtttattttttaaatcttttaataaatcaaaataattagacctagtcaaatcagaccaatcgcagtctatttgaagctcattatatttataatttttattgtttagtgcttttaatgtatcttgaatacttttggaaatctctttaaaagatagatttttcatagcttcatttgtaatataaacaactggtacaaaaccatcgtttggcttagttttaaagcttgtacgtatgggttctattttatttgaatatgttacttcaagtacttttatataaagtttttcttttatatttacttcattaaaactatttttccaatgataaaaagagtaggtgagttttgctgtattatttgaagtataaaatattgtagcaataattagagaagaaataatacttataattaaaactatttttttcattttttcattccaattacatacatttagaaagcattcactttatttattctatttttctttaaccactcttcttgcatttgtttcatttttttaccacttgtttttttgcctgaatatttagtataagtagattttgagaagttattttcatcaccttctttgtaaacataatctaagtttaaagaagctggataaatggcacttttaaccctagttgctgctacataatagatatttagctcttcatttagttttaaaaatgaaactttatttttaggatttgataactctttttttgtaataaaatcatctgccataataacttgatcatactctaaaccttttgatttatgagtagttgtaaaaattaaatcagcttcatcttttgttgttgttatttgtgattttatctttttatttatctcaaatatattatcgccataagtattaataaacttaataatatttagataatcttgattttttgtatcttttgcaaactgttctaactcttgaattgtttcaaaatcttttatttcatctactgttattttgtcattctttttctcttttagatgaaaaatagaataaacagtttgattcataaatgagtaagaaccataaccaccttcaaaatatatttttttatcatcttgaataaagtgaactatttgttgaataagaccaaaagttgaacgagcaataacacaaataggttttttataatcaattgctttttcaccaatattggtaatcgtatcaagacctgaaatttttagaagtttgccattgttatttttatataatgagtttaaattttgctctaaatattttgcataagtattactaaatctaaagctttttgatagttcataagctggtaattctattttatttaaagcgtttatagcgtatctaaaagagtagatttgttgaaaagaatcaccaacataaatacgtctacatttttgtgcttcgacaattccaatcattacatctgaaatatcctgtgcttcatctacaagtattaaatcataaccaagatttgtgctgacttttttgtttaaataaaacatttttaaataaaaatcgtgagtagcatctattagtttatttttcattgcagataaaatatgttttaaatggtttagtgcttttttctcatctttatttaatagttctaaaacttttgcacttaaatcaccgtgttttttgtatgattctaatagtttcagatcaagtgcgattaatgatgaattacaataaaaatttactaaatcttttatcaaagcaacatattcagcaacaggataatagtttgttcttttgttaaaagtttgctcataaccatttaatagttgctctattacttgaatttttaaatcgtgtgctaaattgtattggtaagcacttactttttgatatgccaaagagtgaattgtactcacattcatatgatttagattatattcttttagttttttttgtaggcttacttgtagtgatttattatatgcaagatataaaatctttagatgagagtttttttttgcatattcaagtaaagtagtagttttaccactccctgcaacggcatttattttaaaagactcttcttttgcatttattatattttcttgctctttagttaatgtcattattatacaaatacccttttattttcgatttttttaatatttgagaaattatcaagataatctaaataagttactagatattttctactcattggaaatttttctttaaaattagcaatttgaataaaaccatcttcttttataatctctttcatttttataataatattatttaagctttcagagtgaataaaaagattatgctgaagtctaacgacttgtttttttgctgttaaagcttttaaaatatcatcacctaattttctatctaaatctagttcatcatagatattataaggtgcagttggtgtaatatcttcatcttttaatcttgctaaaaatgaatcttctaaattctttgcaaaatcctctttgatatttgcatttttatatagattattatccttagataaaaagtcttcatttactaaatcatcaagtgctaattgaataaaagaagtactagcccattttaatcgtaagccaattgatgcatttgaaagtagggcataactgtttttagtataaatatctcttattgaatttatgattaattcttttgtttcaataggataaaccacaagctctttttcatcaataaatacattttctaaatctttagcaaatgatatagcttcttcatgagaaagtgcaaatctttgagctgaagagattattcctaatccttttttatgagcttgaagaagttgataatatgcatctttaaagttgttctcatttaaagattctaataactgtttcttttgattctttttcattggatcaataattggatttaaaacttttccacctgaaatagtttgatttccttgtctaatgattagtttttctgcaaatatagtaaataagttttcatctgctttaattgtggcaaaaccactatctaattcctctgttgaatcaaataataagattttagcttcaaatttctttgcaccaataaatatagtatatgatttattgtgatgtactttttttccttttaaagccttaaaagagatatctatttcatcaaagcctctaatatgacctttttttgtgattaaatcacctctttttatatttgtactatttattccttgtaagtttaaagcagctctatttgaaatatttgcttcaagagtattttcattatgtacttgaatattttttatttttgattctttttgtgcttggcaaataaatactttttcatttaactcaagctttttccctaatactgttcctgttacaactgtaccaattccttttggtgaaaaaactctatctacataatatctaaagaagttttcttcttgttttgtagaatttttaatcgtaaacaagttgttttttagtttttctattgattcgggtttatatattgaaacttcttgtacaaatttaatatcaaaatcaaagtcatttaaaaatgaaagagttttttcttttgttttttctagttcgtctgcactaactaaatcactttttgtaattactaaaattaaatcttttattccaagtaaattaataatctcaatatgctcaatagtttgaggcataataccttcaacagcagaaacaaccaacattacataatcaaatccaaaagcacctgcaatcatattttttacaagtttttcatgtcctggaacatcaataaaagcaatattttgttgcgctcgtgaaagatttgaaaaagataaatcaatagtaatacctctttgtttttcctcgtttgtactatcaccttcataaccatttaaggctttgattagagcagtttttccatggtcaatatgtcctgctgttcctatgattatatttgccattagttaaaaacctttttgattatagcttcaattttttttatttcattttcttgaatacttctaaagtcgattaaaactttttcattttctattcttgtgattagattctcatttcttagtattttctcaattttatttactttgtaatctttgtatgaaatacttaaagcaatagttggaatctttttatttggagttgttcctccacctattaaagattgagtttttataatactgcaatcacaaatagaatctattgaattttttaaagttaaagctcttttttctaactcttctacaggagtatttaacatttttaaagtaggaatatcatcaagtttattttctaaatatgaagtaagagtatcttctaaaatacttagtgtaatcttatcaactcttagcattcttaaaagttgattttgtttaatcttatctattaactcttttttaccaatgataataccagcttgaacagaacctaatagtttatcacctgaaaagcttaataaacttggattgtatttcattatttttaaaatagaaggctcggcaaggtcaagattataaggcaagtcaattatatgaccacttcccatatcataataatcaatcacgtttttttcttttgcagttttaacaatatcttcataagaaacttcagaagtaaaaccctcaatagtatagtttgatttatgaactttcataagcattgaagtgttttcatttacagcatttacataatcttttaaatgagttttatttgtagttccaatctcttttaaaatagctccactttgaaccatcacatcaggaactctaaaacttccgccaatttcaacaagttcaccacgacttacaactgcttccttgccttttgaaaaagtatttaataccaagaaaacagcacttgcattgttgtttacaacaatagcatcttcacaacctgtcaaagcttgaagagttttaacaatgtgagaatatcgctcaccccttttgcctttttctaaatcgtattcaagattgttatatgatgttgcaatatttaaagcttttttaaaacttttttcatttatcaaagaacgccctagatttgtatgaacaataattccagttgcatttataacactttgtaaagagggtgaaagaagagaattatactttgaaatcacattataaataagtttttgctcatcaatagtatctattttgtttgctaaaatatcagctcttaaattggcgattaactcttttgatatttgtgttattaaagattttgaaaaatcattaaacactttgttgttgataaacctatcaacctttggaatgctttttaataaactcatataattaactctttcagatgtttttaaaactaaataatgtaaactcaaattctcaagtggggggtatgcgatcctggtggacgccacaggtttcaaccctgattggtggtttacgtgtgtaagccgcggtaggttcgattcctacaccttctcgccacttttttaactacctaaaatcaaactttaaatatttgcatctttattttttacagcgattgtaccttaaaaaatgtcaacaaagccttaagttttatacttcaaaaaagattaatattaaaatagataatataaataataaaataaattaataatatttttcaagttaaaatatatgtaaaaggtttgaaatgaaaaaaatactaagtcttgatttaggtattacaagtattggttatagtgtattaaaagaaatggaaaatgacaaatattttttaatagattatggcgttagtatgtttgataaagcaacagataaagatggcaagtctaaaaaacttttacatagtgccagtgcaagtgcttcaaatcttgtaaatttacgaaaacaaagaaagaaaaaccttgcaaaactttttgaggagtttgggcttggagaacaagagtattttttatatcaagaaaaacaaaatatatataaaaataaatgggaattaagagcaaaaaaaacatttagtgaaaaacttaagattgaagagttatttacaatattttatgccatagcaaaacatagaggttataaatctcttgatagcactgatttacttgaagaattgtgtgaagagttgaatataccttttaaagaagataagaaaagtaaaaaagatgatgaaaaagggaaaataaaagccgctcttaaaaatatagagaatctaaaacttgaatatccaaacaaaacagttgctacaataatctttgaagaggagttaaaacaagcaacgccgacatttagaaatcatgataactataaatatatgataagaagagaagatataaatgatgagattgaaaagattataaaatctcaggagaaatttggcttatttgataaagattttaatacagataattttatatcaaagcttatacagacaatagatgaccaaaaagagtcttcaaatgatatgaacttatttgcaccttgtgagttttataaagagcataaggtatcacaccaatattcacttatagctgatatttataagatgtatcaagctgtctcaaatatcacttttaataaaaaacctacaataaaaatatcaaaagagcagataaaattaatagcagatgattttttccaaaaaataaaaaaagggaagaatattcttgatattaaatataaagatattagaaagattttaaaactatctgatgatataaaaatatttaataaagaagatagctacctaaataaaggaaaaaaacaagaaaatagtattattaaatttcattttataagcagtttatcaaagatagataatagttttattctaaaagcttttgaaaaagaaaatccctatgtagaactaaaagagatatttgatactttaggttttgaaaaatctcctaaaacaatatatgaaaaactaaaaaataaagtagatgataaaacaattatagaacttattaaaaataaaactggttcaagtttgagaatttcatcttatgcaatgattaaacttataccatattttgaacaaggttatactcttgatgagataaaagaaaaattagaattaaatagatgtgaagattatagtgaatttaaaaaaggaattaaatatcttaatgtttcgcaatttgaagaagatgataagctacctataaataaccaccccgtaaagtacgtggtgagtgcaagcttacgacttattaaacatcttcatattacttacggagcatttgatgaaataagagtagaaagtacaagagaacttagtcttagtgaagatgcaaaaaaagagatagaaaaagctaatagggctttagaaaaacaaatagatgagattgtaggaaacaaagaatatcaaaaaattgcagaacaatatggaaaaaacttaagaaaatatgcacgtaagattttgatgtatgaagaacaaaatagaagagatatttatacaggaaaaggtatagaatttgaagatatatttacaaatacagttgatttagaccatatcgtgcctcaaagtgtaggaggactttctgtaaaacacaactttgttttagttcatagagatagtaatcttcaaaaatcaaatcaactacctatggattttataaaagataaagaggatttcaaaaatagggtagaagacttatttaaagagcataaaattaattggaagaagaaaataaatctattagcaacaaatcttgatgaggttttcaaagatacttttgaaagtaaaagtttaagagctacaagttatatagaagccctaactgcacaaattttaaaaagatattaccctttttcaaatgaaaaaaaacaaaaagatggtagtgaggtaagacatatcccaggaagagctacatcaaatatacgaaaagtattaaaagtaaaaacaaaagtaagagatactaatattcaccatgcaatagatgcgattttaattggacttacaaatcattcttggcttcaaaaattatcaaatacttttagagaaaatttgggtgttatagacgataaagcaagagctagaataaaaaaagatattccacttatcgaaggaattgaaccaaaagagcttgtagagatgatagaagatagatacaatgagtttggagaaaatagtatcttttataaagatatttttggtaaaacaaaagcagtgaatttttgggtatcgaaaaaaccaatggtttcaaaagtacataaagatactatatatgctaaaaaagcaaatggtatttatacagttagagaaaatattaccaataaatttatatcacttaaagtgacaacgacaactaaatatgatgattttatgaaaaagtttgaaaaagagatattgcataaaatgtatttatataaaacaaataaaaatgatgtgatatgtaaaatagttcaaaataaggcagatgaaatagcttcacttttagaagagtttagtgctattgatacaaaagataaagaacttgtaagtgaatcaaaaataaaacttgacaatttaatacataaaccacttatagataataatcaaaatatcatacgaaaagtgaagttttatcaaacaaacctcacagggtttgagataagaggaggtcttgctactaaggaaaaaacatttatagggtttaaagcatatttagaaaatgaaaaattgcaatatgaaagagtagatgtatctaactatgaaaaaataagaaaagaaaaagataatagttttaaagtatataaaaatgatatagtattttttatttattctgatggaagttttaggggtggaaagattgtgagttttcttgaagataagaaaatgggtgcattttctaatcccaagtttcccgcaagcattggacttcaaccagactcatttttaactatatttaatggtaaagcaaatagtcataaacaacaatctttaaataaagcaattggaataataaaattaaacctagatattttaggaaatataaaatcatatcaaaaaataggctcttgtaatagtgaacagttagattttattaaaaatataaaaagttgatgttatgggatggaaaataatacatttaagcaaagcttgcaaaataaaaattaagagtgaaaatttactcttatatttttatgaagagaaacaagaaataaaagtgacgataaaagatatagattttattctttttgataatacacagttttctataactggtaaaactcttgaactcttagctaaaaataatatagctactctttttattgatgaagagtttacaccttgtggtattttaactccttattttcagcatagtacaatgactgaaatagctcacatacaaattagtttaacaaaagagttcaaagaaaaagcgtggcaagagataattaagtcaaaacttataaatcaggcaaaagtattagaactatatagaagttcaaaagctaaagatttagtaaaattgtcttcacaagtacaaataggtgataaaaataatgatgaagcacaaggggcaaggctttattggaaacaactatttaaaataccaaactttaaaagagaacaaggagctactgatattataaatagtatgcttaactatggatatgctattgttcgagcttgtatggctagaagtattagtgctagtgggttattacctatttttggtatttggcatcaaaataaatataatgcttttaatcttgtagatgatttaatagagccttttagagcttttgtagatattcatataaaaatattaagaaaaacctatacgcataaaatctcattagatacacaattgaaaagagaaattataagccttttaaattttgaatgtgtagaaataaaaggtggaataagtaatattccaagagctgtagaactttttgtaatgaattataaaaaggctatgataaaagatgataattcgttgattctttatccaagtatcaaagagatgtattttaaatatgagtgtctttagaattatgtggttaatgctaatgtttgatttacccaccaaaacaaaaaaacaaagaaaaaaatatcattggtttcatgctgaactagaaaaagagggttatagtatgattcaatactctgtatatggaaaaatatttagttcaacagaatcggcgaaattaggtaaaaaaagaataaaaaagtttataaaaacaaatataaaaaatggaaatataagaatactaatgtttacagataaacagtttgcatctatggatataataattggagagcaaagtattgaagaaaaaaatgaaccaaagcaattattgcttttctaaaaaagggcaagtggtcgaaaccactgcctaaagtcagttgctaaaatagcaaccttagtttaatacccctattaaactgttatgtgatataacattaataattttagcataatatttataaaagtacaaatttgataaaaagttttattttttatcggttttaatacccctacaaactgctatgtgatacaattactgttgccgtgtcaaaatctgttgctgtgttttaatacccctacaaactgctatgtgatacaataacctctaaaactttatttgtaccaacctcgttttaatacccctacaaactgctatgtgatacaatatttaagttttttatgatacaatttcaggagttttaatacccctacaaactgctatgtgatacaattaataaatttttttctatcttttgatttttgttttaatacccctacaaactgctatgtgatacaatataatgatgtagttgactcaggcttgtctggttttaatacccctacaaactgctatgtgatacaatttaatttaaaatggctagctaaagcagaatgttttaatacccctacaaactgctatgtgatacaatattctttacttgcttggtctaagaactccagttttaatacccctacaaactgctatgtgatacaatattagaagatgaattattcagtaaaggttagttttaatacccctacaaactgctatgtgatacaatatattttcttgtatgtttcataggtactccgttttaatacccctacaaactgctatgtgatacaatattagttgctgaagtatcaactgattcaatgttttaatacccctacaaactgctatgtgatacaatctttaggtatctccatataagatgatactagttttaatacccctacaaactgctatgtgatacaataaattacgcagtaagaaaagcagcaaagtagttttaatacccctacaaactgctatgtgatacaattgatattgaaaaagcaatgaaaaaaatgcagttttaatacccctacaaactgctatgtgatacaatctttttgttttcattaaaaataaaaatgtagttttaatacccctacaaactgctatgtgatacaatttatgactactttttgataagtcattttgagttttaatacccctacaaattgctatgtgatacaatattttacaaaataatgatgattttgttactgttttaatacccctacaaactgctatgtgatacaattacatagccaattttaggcgtgtcagaatagttttaatacccctacaaactgctatgtgatacaatttcccattgttgagtttcaagctttccactgttttaatacccctacaaactgctatgtgatacaatagcaaaggtgcggaggctatgataattacagttttaatacccctacaaactgctatgtgatattttctaaaccgatgccttaacaaataaataaactgaaagcaatataaatattccagctactatataaagactttttgctttttcttttttcaaaatattttcatctacttcaaaaattgcaattgatttcaaagctccattttctttgaagcttagaaatttataaccttttttagcatattttatttttagtttttctaggtttttttctctttgttctttgttgaacccaccaacaactatacttttttgcattattttcctatttggtatttattttttgtaatagttatattatcatttaatttataatcaactaataaattttttaaacacttacaacaactaacatagaagcaataatgaataataatccttgtaatatttttttataaagttctttatcaatttttctttttaatttaactccaaaaaataatccaactgcaatagcaagtaaactaagtaatgaaatttcaaaagtatgcattgtaaatgttccaaaatataaaaatactgctaattgtcctatttttgtaaataaaaagcataagtttgaaagctgaattgtatctttttttgagtatttaagctcaagcgtatacataatcatcaaaggagcaacaacatttgtaagacctgagatagtcccaccaactattcccaagaaatacgttgatgcttttggatattttgaaacaaaagcagcttttatatttattcttgattgaattaaatataaaaagataataaaagctagtagaagtttaaaaaactctgaatttgtatatacaagaagaatagtaccaataatactacctatgaccataagagtgataataaaccaaaacttttttatagcctcaaaaaacttaccctcacttacaatactagcaatatttacaaccattgtaggaataagcatcaacattatagtagtttgaatatccgtaaacaatgctataagtggagttgaaatcataccaaatccaaatccaatacttccgtgaaccatagaggcaaaaaatactattactgctaatccaattatgaaatccatttccataaatttatcctttgttttatatgaaacttagaccttcttctaagctttaccttttcctattttttatatgtcaagtttaaaagaacctaaatagttttcgatacttttccctgattgaacccatttttctataccaccttgaagattagatacattgctaaatcctaaatctttaagcgtttttgctccaagtaaacctctagctcccttaagacaataacaaacaacttgatggtcacttacatctacaagtttatcatctactgcaaattctagttttcctcttggtattgtaaaaactttcttcgctggaattacacctgatgcaaattcatctgcttcacgtacatcaataagaaccatattttcaaggtctatttcttctacagttatttcttttatctcttttttagcactttgaagtaaagtttttaaatgacctttaatttgactcatatcacaacgagcataatactgttctagtttttcatttttattcataagaaattcccttggtatttaagatagttatagtattttattataacactagtataaagataagtaaatacattagtaaatagagatatgaaaaaagagtaaatattttaaaatatttgctcttttttgtgtaggtgtgagttaatgaactataatatcttttgcagcttttggaataacttctccaataatagtagcataaccaaaagataaatcttcaatttcttttatatattcttttgcatcatctttatccatagctatcaataatccacctgaagtttgtgcatcacacaatagtacttcaatatgacgagctaatccactcatatataaaactttatcttcaatatatttcatattttttttagttccaccaggaattacattttcttctgataatgcaattgcttcgtgtattattggaacttctgatgattgaattgaaaatgatgtattagcatttactgattctaaactatgacctaataaaccaaatcctgtaatatcagtacaagaacttacatcatattttctcataattttagaaggtaaataatttaacgatgccataatattagcacaatactttatcatatcaatatgcaataaatctcttttaattgcagttgttaaaatacccattccaagaggttttgttaaaactaaaacatgacctatttgcgatgtattattttttataatatcatttggatgaattattccagtaacagataagccataatacatttcaggtgattctatagtatgaccacctaataataatccaccacattctttgattttttcatttccaccatttagaatttctcccaaggcttcaggtgataagttctttttatcaaatcctacaatatttaaagctgttttaacttctgctcccattgcaaagacatctgatagtgaatttgcagctgctatttgtccataaacataaggatcatctacaacaggtgtaataaaatctaatgtttgaacgatagcttgacttctatttatttgatatacactagcatcttcagctgtgtcaaatcctactaatattctttcatcttttggcgaaaggttacaaagagtttgttttaagtcccccggacccatctttgcagcacaaccagcagcttgaacgaatttagttaatttatattcgttattcattttttcctctttttggatgttaaatataatattatagtagattctacatccttttattttaaattgatattaatattatataaatagtaaaaaaaaatttaccatttaatctttagtttatttttgatatagtatgattcacaatcaaaatagcatttagacctaaggcttaggtttgacataaagaaaatgattatttactaattttactttactttatatcttcatgtatgcttcaaaattattgaggtttttttatgaaaaaaatacttatttcacttttagtactttcagcagtactattttcaaaaacatttacttttacagcgattccagatcaagatgaaacaaaactaaaagaaagattttcaaaattagcagtttatttaacaaaagagttaaatgtagatgttaaatttgttccagttaagtcatattctgcgtcaattgcagcatttagaaataatcaagttcaattagcatggtttggtggtttatcaggtgttaaagctagaatcgtagttccaggttctattgcaattgcacaaggtgttgaagatacacaatttagatcatacatcattgcaaatactgcacttggtttagataaaaatgaagcttttccaaaagaaattgcagataaaacatttacttttggctcaaaaggtagtacaagtggtagattaatgcctgagtattttattagagaaaacttcaaaaaagctcctgttgatattttcaaaaaagtaggtttctcaggaagtcatacaaaaactatttcattagttgcaagtggagcataccaagttggtgctgttaactttaaagtttgggatagagaattagcagctggaaatattgatacttctaaagtagaaattttatggacaactcctacttatcctgattatcagtttacagctcatggtgatttagatgaggtttatggtgctgggtttactgaaaaattaacaaatgcattattaaatgtaaaagataaagcaattttagatgcattcccaagatctgcatttatcaaagctaaaaactctgattttgatccagtattaaatgttggaaaagaaataggtttaatcgactaataacatggcattttatttacaaaatgaatctatttcatacttagataatgtaatcttagactctttaactttagaaataaaaaaaggagaaaaggttgcacttcttggtaaaagtggtagtggtaaatcaacactaataaaaagactttatgaacttgaaaaagagcaaagctcttatatcccacaagaattaggtttggtaaataatttgtcagtttttcacaatgtctatattgcaagattagatgattattctactttttacaatattagaaatttaatcaaaccagcttcaaaagaggttgatgagattagaaatatactaaaagattttgatttagaagataagctttttgtaaaaaaccatgatttatcaggtggacaaaaacaaagaactgcaattgcaagatcactttttaatcaaaaaaagattttattagcagatgaaccaatctcagctttggatgaatatttaagttcaaaagttttagaagttttagacaaaaaatatgaaacaatagtttgtgcaattcacaatgttgatttagcggttaaacattttcaaagagtaatcggtctaaaaaatggaaaaatattagttgataaaaaatgctcacaattaacagatgatgatagacaaaagttgtattatgtctgtgactaataatacgaaagtatcagtactttttatttttataggattactgtctttttttctagcagatttagaaatttcaacagttgatactacacaactaacaaaagactttttttatgcaattttacatttacagtttaatgactattcacttttatttgaagcttttttaaatactatttcaattgcaattattgctatatttgtatctgcaattattggtttttttcttgcattgttttttggaaatgttttagttcgtatttcacttgcaattacaagagcaattcacgaacttttttgggctttgatttttttacaaatatttgggctaaatacattaactgcacttttagcaattatcattccatatagtgcgattttaggaaaagtatacgcagaaatacttgaagaacacgatacttttcctaaagttttacgaggtaaaaatagcttttcttattttttatttacaaaaataccagatgcctttcctcatttactttcttatactttatatagatttgaatgtgcattacgttcaactgctattctaggttttgttggaattactacacttggatattatttatcatcatcctttatgcaaggaatttattctgaagtttggatgattttaattttattttatatcgtagttgcgacaataagatattggtttaataagtatacttttccttttttacttattggctcatttttttatttagatgatttttcaggttttaatcttgataatttgattagatttgttacaaatgatattgttcctcatccaattagaaatgatttaggacttgatgctactatttcttggttttcaaatatattctcaaatgagattattccagggacaataaatacaatagttttaacacaattatcattattgctaacagcttttttagcccttttactgtttcctttggtatcaaaaaagtttgcaaataaaccgactatatttacaagtcatatttttttagtgattttacgttcaactcctgaatatatacttgcatatattttcctacaattatttggaccatcaatgcttcccgcagctcttgctcttatgcttcataatggttcaattatcggacatttaataggaaatgaaactaatttaattgttttaggacctgataaaactcaaaaaagtatcaacctttatttctttgaaataataccaagagtttataatcaattcctagcatttttattttatagatgggaaattattatgcgtgagagtgcaattttaggtattttaggaatcgctacgttaggattctttatagactctgcaattgctgattttagacttgataaaatgtttttactcttagttgtaactgcattattaaatatcgtagtagatttaatatcaagacgagtaagaagatatttaagagttgaagaaaacattacttcttgtggatgttcacttaaatagttctaagttcttttctaagactttattattgtagtcttgaacaattatttgtgatctaaaaagttcatttaattccaaaataaaaacagctaaaagaattcctaacccaaaaccatatgaaaatgtacttccaaaaagtagaattaatccaaaaacaaataaacttaggtttattgttccttttaaccatttttgtaaataaaaatgatgtattcccgttaaaaataaaaagtttaaagcagcatatgtatcaggatcttttatttgtttttctacattttcatagaatacttttctattttcatcagataataaaagtattttatttcttaaaagttcttcttctttttttacatcatcattattcatattttatcttcctaaagtaacaacaacagcttctcttgaccaaaataatagaaatcttttttgttcaataatttgaaaaacaacttgccaacctgattgggcttccctattgagtcttatttccatttctttaataggaattccagatgctcctaaaaaaattgttcctaagccaccttctacaatatgtataactttgtattctttataagccatttttttccttttataaatattatattcttatattgctataattacgcaaaaatcacaataaagaagttttaaaaatgaatgaaattatgaataaagattacgaacctgttgaaatatttgattatgcacagtatcaaaaagatatggaagcaaaaatagtaagaagcccacgaacaaacactcccattgattatattacagatgagaaattagctgaactagaaaaagagggtattactgattttagaccttatattccaattccaaaagatataaaagcacatcttttatttgctgtaaatatttggattaaattatataaaacatatccaaatgatgaatatcttaaaagtttagataatgaaaaaaatcattatattgtattgtcttatgattggtataaaaaattcgggattgaaaaaccacagctttagatatgatctaaggctgattggttaaatttataagttttatgagctacttttaccaaaatatctttttgggctaattctttaaaaagttttataagtgttggttttgaaataggtattttttgcataatatcactatatgaagctgtaaaaatattatcattatttaagctattgataatatatctgattatatcaacttgttttccatctgtaattgctgatattgttctgattatataaatatttttttgaatctctttttcttgaataacaggaagtaaaatatcatataaactattt

SEQ ID NO: 1576 - DNA, 23348 bp, synthetic construct
  source 1..23348: mol_type = other DNA
  misc_feature 1..23348: note = Synthetic
ccaatatattgtttaataaccagctagtaaaaagtttttaggagataaaatgatccctttttccgatgaagagttaagaccagcagttgagagagctttggaaaaagtcaagcctatgcttgctcttgatggaggtggcttgacactgctagatataaaaaatggaaaagtatttatacaattgcaaggtgcatgtacaggatgtgcttcaagtggacaaacactgaaatatggcattgaaagacagttgcgtatagatatccaccctgaaattgaagttataaatattttgccaggtttagaacatacgatagaaaaattaggataatatgaataaatatttaaaacgagcaattcaaaattttaatgaaaaaaaatttgacactgctcttatgaatttttcatttgcacttaaagaaaagtatagcgatgatgctaaaataggtgcaatgctgagtgatcttggaacaaataaaccaaatgaagccctcgctttatttgagtattatatgatagcaaaacacgcagagattaaaaattcacaacaacttattgaagagattattgatgctttagaatacagtgttgaagagatttcaaatctttatctaaaaaatgagatagagatgaagctagatgaagaaaatgttatagcctatgatgattttagaaaaattgtagcggacaagaacagctttaaagaagcatttgaagacattatgttttctactaaagtcatcatacaaaataaaaatgattttatagattttttagaacaacttattgacaatggctataaagatatttctatgaactattttgaaagtgccattactatgtttccaaatgatcaaagactcttgtcacttgtcgaaaaagtaaaacagtaaaaatatgagattgcaattttcactacacaatgaacaactatttatctgtgacaatacacaagaatgtgatatgcaaacatatcttttacgcacatcacaaaatgatttatacctcaaagattttgatgctaaaaaatgcaaaggtattttaagcatcgctacatgtaagcaacttttaggcatagatgaacgcataaaaatcataggtattacaggcacaaatggtaaaactacaaccgcagctgctatctattctatattgcttgatttgggaaaaaaagtcgggctgcaaggcacaagaggctcttttatcaatgatgtaaaagtgagcgataaaagccttacaactccgccaattttgcagacactgcataatctacatgtagcttcgcagcaatgctgtgaatactttgttatggaagtaagctcgcatgcgatagtacaaaagcgagtagagggtttgtcatttgctttaaaaatacttaccaatatctcacaagaccatcttgattatcataagacttttgaaaattatgttgcgataaagagtagtttttttgatgatacatctttaaaacttatcaacaaagatgaaccaaaaatccaatttaatccaaaaaattgtatgacttacgggttggaaaaaccagcaacttataaagtagccgcatattcactcaaagatggtatctctgtagccatacaaaacatagataaaatgtttcattttcattcaagtatgcacggactttttaatgtctacaatcttacagccgctctaagtggtgtagatatgcttaaagttgcaccgcaaaatgagatatgtgaagcgatagaaaattttgcaggagtttcaggacgaatggaagttgtaagtgaagaaccacttgtgattgttgattttgcacatacgccagatggaattgaaaaagttttagatgccctcaaagaaaaagaaatcattgttgtttttggtgccggcggtgatcgcgatagaagcaaacgccccttgatgggtaaaattgcaaaaagattttcaaaatattgcataataacaagcgacaatccaagaagcgaagacccactagcaattatcgcagatatacaaaaaggaatctcaaacaatgatggcttacatgtacagccagatagaaaaaaagcaatagcgttagcacttcaattgtgcacgaatgaagtcgtggttattttgggtaagggcgatgaaactactcaagagatacaagggatgaaatttgcttttgatgatcgagagattgtgcaagaattactcaagaaagatctttgaaaaataacaaattaactacaaattttcagctaaattgcatttcttttcgataaaatgcgacaaattttctcaatcacatacaaatgctaaggaaaaaattgataaaatagacactcttatgcagtttgagtgttcaaaaatgaatccctcgtggatgtaaagataaagggttgatacatgacatttgagatgttatacagcaagattcacagagtaactgtgagtgatgcgaacttgaattatgtgggatctataacaatagataaagaacttatgcaagccgcacacctgagagttggtcaaaaagtagagatagtaaatatcaataatggtgagcgattttctacctatgtgatccaaggtgtctatggaaaacgggatatttgtctcaatggtgccgccgcaagaaaagcacatgtaggcgataaaatcatcataatttcctatgcaagtatgaatgaagaagagttagaaaattttaaaccagcagtggttttggttgatgaacataacaatataattgaattgagagactttatataatgtttgatggaatggatttttcaaaaatgggtgcgatgttgcaacaaatgcaagatcaggccaagcagatggacgcagaagctgcaaacttagaatacacagcaaaaagtggtggcggacttgtgcgggtgagcataaatggccgcggtgaagtgaatgatatcagcatagataattcactacttagtgataaagaatccttgcaaattctactcatgagtgctgtcaatgatgccattagaatggtcgaagatggcaagaaacacgcagcatctcagatgttagctggacttggaggattgggcccaaaaaattgaggagatgtgtatgcgtttttttctaggaattgtcctgtgttttcaggttacatttgctttggaatttgtgtatccggattttaaacagtgttacgaaaaaaacaaaaattcttttgtctattttgacaatttgagggccatagcagttgatgcacatagggctgtggcatattcgaaaacaaaaccaactcatccttatatcaagcatgacccatttttaaatctctacttatttgagtctaaaaaaccgctaaaacccgtaaaactcaaagatacaaaatatctaaaaattggcgaatggatagcgggtgctgatgaacgatctttgtatgctggcaaccttgcacaaatgggtgatatcatggatagtttctatttgcaaaatgccaaactcgatgcaaatagtatggttctatgtttatgttgtgaagtgtatggtttgggaactggcggaggcacttttattggcagtgaatatatcaaacgatttttaacacaaacaaatccattttatggtgatattggagtgctatttgagcaaaaaggacaaaatttttacatcaaacagcttaatccattgcacgcaggtgaagaattgcgtcttggcgatgagttggttaaaatagatggtaaaaaaccaagttcactcaaaacattgaaccaatatatcttgtttgcaaaagagaaacaaaaaataaaactagaaattttgcgagataatgcacccttaaattgtgaattgcaagtattttcaagatttggcggtgactcagtgagcgatccttttttggaaaaaaaaggaatatttttaaaccaatcgcttgttattgtaaaaatcacaaaagattcctttggtgatacaagtggacttaaaatcggcgataaacttttgcaaatcaatggattagatataaacgataccgcaaaattgaagcattttttgacaacaacgaaaatgaaaaccgtacaaatgctttttgagcgcaataactttcagttttttataaaacttcttctaacaaaataataaggaatatttttgaacaaaaaacttttagatgattttgaatcctatttgcatgcaaatttgccaaaagcaccaagtttccatccgcattttgaagttgctttgagtgaaatgctcagtgctggtggcaagagatttcgtccgatgcttttactgagtatagttcaggcaaaacgaccgctacttttgcaaaatgcttatcccgtagcacttgggcttgagatgttgcacacatattcacttattcacgatgatttgccatgcatggatgatgctccgttgaggcgttcacaaccaacgctacatgtaaagtatgatgaagtgactgctgtgcttgttggagatgcactcaacacacacgctttttatatgctctctcacgctccactcagtagcgatattcgtatggaacttgtgaaaattctctcaagagatggtggcttagacggtatgattattggtcaagcgatcgattgtgcatttgaggataaaaaactcacacttgaacacttggaatttttacataaacataaaactgcaaaacttatagcagcttctttgcttatgggggctgttatttgtgaacttgatgctcaaactaaaaagattttgtatgcttttggtttgaaactaggattgttgtttcaaattcaagatgatatcattgatgccactttaagcgaggatgaagctggaaaaacaactgcaaatgatagccacaaaaattcctttgtaaatcttttgggtattgaaggagccatagcgagcaagcaaaaactcttaaatgagttgcgtgaagatagtaaaaattgtgatgaagatatagcaaaaaatttatcacagataatagacacatattttaaaggataaatgaatgaatgatcaagatatattgcaaaaacaagccgatacgattcggtttttagctgcggatatggtacaaaaagcaaaaagtggccatccaggtgcgcctatgggtttagctgatatcgttacaattttaagtagatttatcaaccataatccaaaaaacccgaaatggataaatcgagataggcttatttttagtggcggacatgcgtcggctttagtgtattcgtttttgcatctgtctggttatgatatttctttggaagatttgcaagcatttaggcaattaggcagtaaaactcctggacatcctgaatacggcgaagtacctggtgtagaagtgaccacaggacctctaggacagggcatcacaaatgccgttggatttgcgatggctacaaagtatgctgcaaatattctcaacacgcaagatacaaaagtgatcacacacaaagtttattgtttgtgtggggatggagatttgcaagagggtataagctatgaagcgtgttcattggctggacatcttgggcttgataatctcgttgttatttatgattcaaacgcaatcactattgaaggatcaactgatttagcatggagcgaagatgtcaaagctcgttttgaagcacaaggttggcaagtttctcgcatagatggacataattttgatgagatacaaacagtgttgcaaaatgcaagcgaacaaacaaaaccttacttaattatcgcagatacaacgatcgctaaaggtgcttgcaagatggagggaagccaccatgcgcatggtgctcctttgggtgaagatgagataaaaaactctaaaatcaaagctaaattcgatccagatttaaaattttatgttgatccagccgtaaaagctagattttcatgtgcggtagaaaagggcgaacttagtgaagctatttggcaaaagatggttcaaaatgatttgagtcaagagcaaaaagatttatttgaagcacttttatatccagattttacgaagattcaatggccagaatttgaggtaggtgctagcgtagctacaagagatagcaatggaaaaattctcaatgcaatagcacgggcaattccaggatttttaggtggtagtgctgatttgggaccttcaaacaagagcgaattgaatgatatgggaagtttcccacacggacgcaatatccattttggtatccgtgaacacgcaatggctgcgatttcaaatgcttttgctctctatggcttatttataccttttaatgcaacattttttatcttctcagattaccaaaaaccagccgcaagacttagcgctcttatggggctgaaaaactattttgtgtggacacacgatagtattggtgtgggtgaagatggaccaacacaccaacctgtcgaacagctcagtcagtatagggctttgccaaatttttatacattccgtccagccgatgcggttgaaaatgtaaaatcatggaaaaaagccttaagtatggatgcaccttgtgcttttgtttgctcgcgtcaagggctcaaagtgcttaaggacgatagagcttatggagatgttgccaatggtggctacttgcttacaaaaagagataatgcacatatcacgcttatggcaagcggtagtgaagttttttcagctttgcaagctggctgcaaacttgcaaacttaggcgtcaatgcgaacataataagtgttccatgctttgatctgcttgtacaacaaagccctgagtatatagcaaatataattcataaaaatacaaaagtgcttgcaatagaagcagctggaggtcaagaatggtaccgatttgctgatgaagttatctgtatgagcggatttggcgcctctgcaccagctgagttattatttgaaaaatttggacttacagcggagcatatagtgcaaaaagtatgtgaaatgttgggtgtaacataccaaaatgtcgtaggatgcaaagtataatttttgatggctagattgatcgtatatggagatattcatggatgtcttgatgaactcatagcacttcgcaaaaagataggtatacttgatgatgatatcgaagtatgcgttggcgatgtgatcacaaaaggcaataactcgcttaagacactcaaatttctacgcaaaaaaggaattttttgcgttttaggcaataatgaagagatttttttgcgttttatgaatgaaagagagaacaattctagcctcaaacttgatcaagacaaaaaaaatattttgagaaatcttagtataaaagactgggattttttgcgtagtttaccctattttattcagattgaccgctatactattgtgcatggtggtttacaaaatagtatgaatttacaaacattgagccaagaagataaagataaaattataaaaatgcgttacttaagcaaaagtggtaagtttatcgcttatgaaaaagaagataaaaaatcagtcttctgggcagatctatatgatggtaaaaatggttttgtgatctacgggcatcaaaggtttaaagaaccaaaattaagcgcccacgctataggcattgatacgggatgtgtgtatgggcaaaaacttactgcactcattgtagaagagcaagagatgcgttttgtgaatgttacttttggtgagcaagacacaaacaaagttgcgccatgataaaagcggttatttttgatcttgatggaacgcttttggatacacttgaagatattgccttgagtgctaattttgtgttggagcaatttgcacaaaagccaatagccattgatgcttatcgttttttagttggtagtggtgcatttgcactgatgcaggcgattttaccacaaggtgatgaacggacacataaacgagcgttgaaaatttttgaaacacattatgtaaagcaatttactcaacattcaaagctttatgcagacattggtaaattgttgagctttttgcaaatcaatggcataaaactagcaattctttccaataagccaaataaatttacaaaaatgtgtgctataaaatatctccaaaattggcattttgaagcagtctatgggattcgtgaaggaattgcaaaaaaacctgatccaaatagtgttttgcaaatcttagaagccttacatgtagatgtaaatgaggctttgtttgttggcgatacaaagatcgatatgcaaacagctacaaacgctaaaatgcgttcaattggtgtactttggggttttagggataaagacgaattgctaacaaatggtgcaacgcatatcgttacaaatccccttgaatgtataaagcttataaaaatattaaaggataaaaatgccgtggtatgagattgtttttttgagttttattcaaggctttagtgaatttttgccgatatcaagttctgctcatcttatcttagttcctgtaatttttggatgggatgaccaaggtttagcatttgatgttgccttacatgtaggcacacttttggctgttttatattattttaagagtgatattttgcagatattttctgatatgtacaaaagtttaaaatttcgtaaagcttatgagcaaagcacattgggatggggcgttatcataggaacaattcctgttggacttgttggtttaatctttaatgattttatcagtgagcaacttcgctctcctttggtaattgcttcaagtactataatctttgctttagttttattgttgggcgataaattcgctggtataaaaagtgaaaaaaatatcacgatagtccttgctgttgttataggtatagcacaagcggttgcactcattcctggcacttcaagatcaggcattacaatgagtgccgcgatgcttttaggtttttcaagggtagctgccgcaagattttcctttttactctccattcctgtgatcgtgctagcaggcggcttgaagtgtttagagttgttgcaatcccaaatcatagtacattggggagaacttttgtctgcggtatttttgtctggcttgagtgcgtacctttgtatcgtgttatttttaagacttatttcaaaaagctccatgattccatttgtgatttatagatttttattgggcatttttcttttttatatgtttgtataaatgcgttttatatcgattgtttctaataaatatttccgtagtgttctgggatttttgttggcattttcactcttctttgcccacaatctacgcattccagttgcggacacaaaagctgatcaatactttagccaaacgatcactcaagcgagcatcgcgtatgcaactgtgcgaacactcaatgctactgtttcaattatccaagagtctaaacttcagttagaaccagctggtatcggagtgagtttagcggttggacaggtgttagatccactcaatgatatggtcgaacgcgtgagcaatgtacttgttttttccatcgcttctttgggagttcaaaagcttctttttgagataacactctcgttttttgcaagccttgcagccattttgctcattataatttcactgctttctttactcgaatttgcatgggtaaaaatagtccaaaaagctatgctccagtttgctattttgcttattgtggcacgaatatgcctgccattttctgcacttgccaatgattttttagcaaagaattttttcgaaccacgcatcaatcaagccaatttagcattagaatttaaaagcaacagtctcaaaatcatagaagacattcaacttccatcacaaggaacttttagtattcttacgcacggtgttgattttctaacaaaaaaagccaccgatcttcaagatatgatacaatatctcacacaaaacgctagcaatatgatagaaaacctgcttacgctcacttttttatatgcgagtatttttctcgtacaagttttactgcttccgctatttactttttggattctcataaaaagcttacaaatcattctttaaagatttttttatcagatttatttttatatgtagtaaaatgtacattatttttcgcaaaaaggaatagatatgtcacaaaaaatactctctttagatctaggtattacatccattggctacagcattttaaatgaaattgaagatgacaggtatactttagttgattatggtgtaagtatgtttgataaggctactgataaagacgacaagtcaaaaaagcttgtatatagtgcatgtaggagtgctgcaaatcttgtaaatttgcgaaaagagagaaaaaaaaacttagcaaaactttttgaagagtttggatttggagagagaaaatattttctatatcaagaaaaacaaaatgtctataaaaataaatgggaattaagagcaaaaaaagcttttgaagaaaaattaaacattgaagagctgtttaccattttttatgctatagccaagcatagaggctataaatctttagatacgagtgatttacttgaagagttatgtgcagaattacatatctcttttgaagatgaaaaaagcaaaaatgatgatgaaaaaggaaaaattaaatctgctcttaaaaaaatagaaaatcttaaaatcaattatccaaataaaacagtagcaactatcatctatgaagaagagatgaagggaaaaaatccaacatttagaaatcatgataattacaaatatatgataagaagagaaaatatcaatgatgagataaaaaaaatcatagcttctcaagaaaaacttggattgtttgacaaaaattttaaagtcgatctatttgcttcaaaaattattaaaactatagacgatcaaaaagaatcatcaaatgatatgaatttatttgcatcctgtaagttttataaagagcataaagtatcacaccaatattcactcttagctgatatttttaaaatgtatcaagcggtatcaaatatcacttttgataaaaaaacagacaaaatcacaaaaaaacagataaaacttatagcagatgatttttttgagaaaattaaaaaaggaaaaaatgtacccgatataaaatacaaagatattagaaaaattttaaaacttgatgattgtgtaaaaatttttaacaaagaagatagtacttttaacaaaggtaaaaaacaggaaaacagcatcatcaaatttcactttatcaataacttatcaaaaatagataatggatttatcgtaaaagcttttgaaaaagaaaatccacttgaagaactcaaagagatatttgatgtgctagggtttgaaaaatctcctaagagtatttatgaaaaattaaaaaataaagttgatgataaaactatcatagatcttataaaaaataaaactgggttaagcttgcacatatcatcctatgcgatgataaaatttataccttattttgagcaaggttgtactttaagcgatataaaaaaagagttaaacataagtgaagatgaagattatgatcattttaaaaaagggattaaatatctcaatcttttgcaatttgaagcggatgataacctgcttatcaataatcatacagtcaaatatgttgtaagtgctgttttgcgactcgtgaaacatttacatgtaaaatatggtgtttttgatgagatacgagtagaaagcacaagagaattaagcctaaatgaagaggcaaaaaaagagattgataaagccaataaggcattagaaaaagacataagcgatatagtagccaacaaagaataccaaaaaattgcagagtattatggaaaaaatttacaaaaatacgctcgaaaaatattgttgtatgaggaacaaaatagacgagatatttacacgggagagggaatagcgtttgaggatatatttacaaatgctgtagatttagaccatatagttccacaaagtttgggcggactttctgtaaagcataattttgttttagtgcatagggatagcaatatgcaaaaatccaatcaactccctatgaattttataaaagatagagaggattttaaaaatagagttgaagacttgtttaaacagcataaaatcaattggaaaaagaagattaatttacttgccactactcttgaagaaatttttaaagatacttttgagagtaaaagcttgagagctacaagttacatagaggcattaactgctcaagcgttaaaaagatattatccatttccaaatcaaactaaaaactccatggagatacgatacatacaaggaagagctacatcaaatataagaaaacttttacatgtaaaaacaaaaacaagagataccaacatccaccatgcaatagatgccattcttgtaggacttacaaataaatcttggttgcaaaaactttcaaatacttttagggaaaatcttggaaaaattgatgatgaagcacgagcaaatatcaaaaaatcaataccactgatagaagggattgaaccaaaagaattgatagaattgatagaggatagatacaataaatttggtgtagagagcattttttatgaagatatttttgaaactataaaaacaatcaatttttgggtatcaaaaaaacctatggtttcaaaaattcataaagataccatttacagcaaaaaacaaaatggtatttttaccgttcgagaaaatatcaaagctaaatttaacacactcaatatctcccctacaactaaagcagaaatttttatggaaagtttcaaaaaagagattttagcaaaaatgtatctttataaaacaaatccaaatgatgtggtgtgtaaaatagttcaaaaaagagcagatgaaatcgttaagcttttaaatgaatttattcagcttgatgcaaaagataaggcattgatgagtgaagccaaaacaaaattagatgatttgattcatgctccacttatagataacaacggcaatgagatacgaaaagtgaagttttatcaaacaaatctgacaggttttgagataagagggggactcgcaaccaaagaaaaaacttttataggttttaaagcggtgttaaaaaatgatactttacaatacgagaggatagatgcatcaaattttgaaaaattaaaaaaagaaaatgataatagttttaaagtctataaaaatgacttggtattttttatctatccaaacggaactactaagggcggaaagatagtgagttttcttgaagataaaaaaacaagtgcattttcaaacccaagattccctgcaagtatttcaaatcaaccccattcatttttggctttctttaatggcaaaccaaatagccataaacaacattctgttggaaaagccataggaattatcaaactaaatcttgatattttgggcaatatcaaatcctatgcaaccataggagaagctcaaagtgaagttttagaatttatcaaaaatataaaaagttgatactgtgggctggaaagtagtgcatcttacccgtccttgtaagataaaagttgtaagtgaaaatttattggttcatttttatgatgatgaccaaaaagtaaaagtgactctaggtgatatagattttatcctttttgataacacccatttttctatcacaggaactagtttggaactgttggctaaaaaaaatatcgctgctttatttatcgatgaggagttccacccttgtgctatcttaagcccttaccatcagcactctacgatgagagaaattgctgatttgcaagtttctatcccccaagattttcgagcaataatctggaaaaagatagttacatgtaagattcaaaatcaagcatctgtactcgagttttttctaaatcctacatgtaaagatttgctaaaacttgcaaaaaaagttcagatgtatgatcaaaatcaagatgaggctcaggctgcaaggttgtattggaaatctttttttaaacaagagggttttaggcgagaccaaaaaagtgaagatatacttaatgccatgctcaattatagttatgcgattttgcgagcctcagttgcgagaagtgtaagtgctagtggaatgttgcctgtttttggtatctggcataaaaatagatacaacgcctttgctcttgtggatgatttgatggaagtgtttcgcccaatttgcgacttacatgtaaagcttctatatgagacaagatataaaaaagaaaatactctaaaactagaaataaaaagagatttaacttctcttttaactatgccgtgtataaagtttcaagctgggatatcctctgtctctcaagcagtagatagttttataagagagtataaaaaaattatgatgagtggcgaagtggaagctttgacatttccttctattgacttcggtttttttaaatatgagtgcatttagaatcatgtggcttatgttgatgtttgatttgcctacaaaaagtgcaaaagataaaaaaagatatcattggtttcacaaagaattagaaaaagagggctatcatagacttcaatactctgtatacggaaagatatttagctcttctgattctgcaaattatggtaaaaagagaatcaaagagtttgtcaaaaaaaatatcaaacatggaaacattagaattctcatttttacagataaacaatttgcagcaatggatataataattggagaaccaactgttgaggagaaaaacgaaccaaggcaattgttactattttaaaaaagggcgatagccgaaactaccgcctaaagtcagccatctcttggagatagccttagtttaatacccctattaaactagcgtgtgatacaacgctacaaaattatacaaaaattttggtaaaatcccaaattttataaaaaaaatacacaaaatcaacttttttatcggttttaatacccctacaagctagtgtgtgatacaatatagaggtgtgggaagtataactcctattcgttttaatacccctacaagctagtgtgtgatacaattttttggaaaaaaacactcaagtgatgccagttttaatacccctacaagctagtgtgtgatacaatatatgtatagatacatttattttgtaaaccgttttaatacccctacaagctagtgtgtgatacaatttaccgcagttattctttagtgcttgtatgtgttttaatacccctacaagctagtgtgtgatacaatagatttgtctagatctacacttagtttagagttttaatacccctacaagctagtgtcttaaattgtgaaaaaactctaatttactcccatataaacaaactctcaaaaataaagctaaacaaataaaaagtatattttggataaaattttgtgagcttgcgatgttgagttcactttttgtaaataaaaaacgccgtttttggcttgagatagggtgaagtatgattgatgaacacgagatcccctcggggagtaggttgtattttggtgcgagtgcaaagttaaaaagagagatagaaactgcggcaagtcaatttttagacaacgctggttttaaagagatagtgactccatttttttcttaccatcagcatcaaagcataagtacaaaagaacttataaaatttagtgatgcacacaaccacacgctttcactgagagcagatagcacacaagatgtagtacgacttatcacaaaacgccttggtcgtagtacgaatcacaacaaatggttttatatccagcccgtatttcgttatccttcaatcgaaagcaatcaaataggcgctgaatttatagacaatgatgatttaggctctagtataagcgtttgcaaagatatttttgcaaaattttcgtttgatccgcttttgcatataagcaatatcaatatcccccgaattatcgcaaaagagttacatgtaagtcttgatatatttgaaaaagcacaattacaaaagattctcgcactcgatattgcgtggattcaagatcttgtgcatttgcaaaatcttagtgacatcgatgcattgatagcaaaagtaccgcaaaatatcaaaggagagttgctcaagatgaagcaattagcacttgctagcggatacaaacatatcgtactttcgccactgtattatgcacaaatgcgttactatgatgcacttttttttcgttttatcgacaaaaacatcactttggcaaaaggcggtagttatgaaagtgaggggatgcgatcaagcggattcgctatctacaccgacgcatttatagaaacaatgaaagataggaagaaccatgaaaaataaagcagatttgatagttggcatccaatggggtgatgagggaaagggtaagatagttgatatgcttgcacaaaattatgatgttgtttgcagatctcaaggtggacacaatgctggtcacaccatctgggttgatggtgtacgctatgctttacaccttatgccatcaggcgttctcaacaaagatgcgatcaatataataggtaacggcgtcgtactctctccgaaatctttgatagaagagatgcaacaatttgcagatcttgaaggacgactttttatcagcgataaagcacatctcaatcttccataccactcactcatagatcaagctagagaaaaactcaaaggtgaaaatgctatcggaactacaggtaaaggcataggccctgcttatgcttcgaagattaacagaatcggtaaccgtgcgggagagcttttggagccgcaaaaactctgcgattcattgatgcaaacttttacatttgagcaaacactctaccaagcacttggtataaaaacgccatcaagagaggaattgctgcaagagttagagggctacaaaaataaattggcaccttttattacaaatactacaacccttgtttggcaatcacttgatgctggtaaaaaaatcttgcttgagggtgcgcaaggaacaatgctcgatatagatcacggaacttacccttatgtaacaagttcaaacacggtaagtgctggggcgtgttgcggacttggcctcaatccaaaagatatcggtgatgttaccggcatcgtaaaagcatactgtactcgtgtcggcaatggagcatttccaagcgaggattttggaaaagatggcaaaatgatggcagaaattggcaaagaagtaggtacaacaacaggacgcataagacgatgtggatggtttgatgcggtcagtgttcgctatgcttcaaggctcaatggatgcgataaatttgctcttatgaaactcgatgtgcttgatggatttgaacgcattaagatctgtagcgcgtatgaatataaaggtgaaattatcgattttgtaccaagtgatcttgaaaatgtcaaaccaatttatgaagaaatgaagggatgggatagtgttgttggtattagcgattttgagtcattaccagaagccgcaaaagagtatatttggcgtattgaagaattgacacaaacaaaagttggtatcatatcaacaagtccagagagaaatgatacgataattttataagccatagattatgctaggggattcttgtggagcaaacattttctcaaattgcaaagataagaaaacaaaaactagacacaatagagtcgcaactcttacatgtaaggcgacaaaaacaagacgcacaaaaagaacttacggcactttttgaaaagatagaaaaatgcaatgttccaaaagctggaaaggcttctttgatgagcatttttgtagaaaatttgcgattgttgcgtgtgcaaaaaacagcgtgtgaagccctgtttgcaaaactcatacaagagtttgaacagcttcaaaaagcgtacaaagatgccaatatagagttagaaaagatacgctatttgcagcagatggcatataaagaacgcataaaaaaaataaacaaaagagaaaagatagagatggatgagatcgcaacgatgctcttttccaatgcaaaaggtggctagattgaaaataattgtatgggttttatttttttgtggtgcactctatagtgaaactattgattgtacgaaagtgtttgaagagcgaaaaagtgagttattgcaagaaattgaaaagatagatgaatctcgacaatcttttgaagcactcaaggcggctacaaacgcactttttgaaaaacaacaacaaagcttagaagagcaaaaaaaagatatcaatacaagtttagaacaaattactcaaaaagaggaagctatcaaaaaaatgcttgaggagaacaaacaactactagcaacaattgatggcaagaaagatgataaactcacaaaaacatatgaaaagatgaaagacgcctcagctgctgctatatttgaagcgttaccgcaaaatgaagcggccgctattttatttttattgcctgctaaaaaagtttcctctattatgacaaaaatggacgcacaaatcgcatcaaaattaacccaacttttaaaaattggtccaccatttgaagcaacaaaaatacaaagggagcaggcagatggaacagtacaatgatgttttgcaaaccatcactttggcgatgggtgcatcgtgggcaagtggcttaaacctctacgcaacgctttttatattaggttttagtgctataaatggatcttttgtacttccagcaggactcgaaatactcgccaatcctttggtgataggggctgctgggcttatgtactgtgttgaattttttgctgataaaattcctggagtcgatacgagctgggatgttttgcacacttttgtaagaattccagctggcgcattactagcagctggaatccttggagatatgggagctggtgccgaacttgcagcagcaattttgggaggttcaatagcagctacaacacacgccgcaaagtctggaagtagagtgcttatcaacacatctcccgagccttttagcaattggggagctagcatcagtgaagatatcgccgtttttgcaggattgtgggcagcaatcaatcacccagtatggtttttacttgcttttatcgcttttatagttttgatgatctggttacttccaaaaatttggcgtggtatcaaaaaagtgtttggtttttttgcaaaaattcttggattgaaaaaaacggaaaatgtacagcatgccagcctagatgaaaaagagcatcaatgaaactattattttagcagtcacaataacttcgctcttcaaacaatagttccttacatgtaaggaactatttctgtgacacttcttggtataaaatcttcacctcaacagatatttaccttaactttgataaaattgctgaaattctaatgaaggtttatggatgaaaatcagattgccgcatgcaccctatatagcaagtaagatagcgattgatttgttgaatagtggttcagttacgattaaaaaaggtttggagcctattgttcaaatcgctcagggatttatttcacaagatattgaaaaagagatgtctctcgaggagcgcgtgagcgagcttctggatgaaaatgaagacgatatggagtttatgcaagttgatagacgaagtatgttttggcttatcaagaaaagacttgccactgagtataaagtaacactttcatatgaagatagatacaatgatttggcacatcaaattcttgaaaaactttggaaagatgaccttgtagagtatagtatttcagaaaatagaattaaaaatatcatctataacgctatggaaaaatactttaaaaactttgaaatagtagaagagattgttgctgagaagattgataattataaaagaaaacttcttcctggaacgcctgaatatgaccttgtttttgagcgattgtatgaagaggagctccgtaaaaaaggattgttgctatgagtaaacttattcctgtttggatttatatcgaaaatggtatatttttagaagcaaaaagttttggttttgagggtactcgcgttggcgaaatcgtgtttaacacttctatgagcggatatcaagaaatcataagtgatcctagttacgctggtcaatttgtagtttttacaatgccagagattggaattgttggatgtaatgatgcagatatggagagcacaacagtttttgctagcggaatgatagtacgaaattataatgcttttcattcaaactttcgtgcaggtagttcacttgatgcttttttaaaccagcacaaagcactaggtatttgtgatatagacacaagatatcttacaaaaatgattcgtgatggcggccctaaaatgatgatcgcctcaacacagatcgcagataaacaagaattagcggcaaaattacaagcctcaccccgcattgaagaggtaaactatatccaacaagttagtacaaaaaagccttatgtacacaattatggcgcttgggattgcgattcgttgtgctacaaaaaagcagagacatctcttggtaaaaagatagttgctattgattttggcataaaacgaaatatcctcaatgaattatgtgaagttggcttggaagttgaggtacaagccaatagttttgatccagacacactgatacaacgctttaaaaagcaagagatagcgggcgtttttctctctaatggtccaggagatccactgatcttgagcgaggaaattgcaaagattaaaaaactcattgaagcaaaaattccactttttggtatatgtttaggacatcaactccttagcatagcgcatggttatcctacatataaactcaaatttggacagcacggcggcaaccatcctgtaaaaaatcaagactcacgagtagttgagataacagcgcaaaatcataactacaatgttccagatactatcacacaaattgcaaaagtaacacatgtaaatttatttgatggaacgattgagggattgcggtacaatgatgcacctattttttcagtgcagcatcatccagaggcaagtccaggaccacatgatagtaaatatatatttgcagaatttgcaaaaggcttataggagaaaatcatagaaactattaatctagcagctattatcggtgttgccttgcttggtagtttcggtcattgcataggcatgtgtggcggttttatagtggcatatagcagtgtcaaaatagatgcaaatacaccaaaatcaagacaatttttttcccatcttttctataatctcggtcgagtgagttcctatacttttttgggagttatctttggattgttgggcagtgttatatcattttcaaaaacttctacaggatatttctattttttagtaggactttttatgatcttgatgggactttcgcttatgggcaagataaaatttttaacctcacttgaatctatgcttgcaacaaacactcttatcaaacctctcttttcaaaacttatccacgcaaaatctttcgcaagtttttatggattaggtatgctcaacggctttttgccatgtggcttggtgtatttttttgctatttctgccgctgcaagtggttccgctttttggggtgctgttattatgcttatttttggacttacaaccattccatcattgctcagcttcggctatatcatcggctttttgaagagtggtaattttcgtgaaatcatgatcaaattagcttcaattcttatcatcttatatggcttatatatgtcatataccggctatacagcagtggtaaatctatgattaaactcgaagagtatcaacgcgcaatagagcaaagcaatatcgtttccaaaaccgacacaaatggcatcattacctttgtaaatgatgaattttgtcgtatttctggatatagtaaagaagaactaatcggagccaaccataacatagtgcgccatcctgatgtgccgaaagaaatttttgaaaatctttggggaaaactacatgcaaaaaagacttatgtagcaactgttaaaaatagagcaaaaaacggtagcacattttatgtcaatactactatcattcctatgctagatgaaaatggtgagattcaagaatttatcgccataagacatgatgtcaccaaaacgatcgagcttactgaaaaacttcgagccaaagaggaagagttgcaaaacctcaatgccacgctcgagcaaagagtcaaagagcaaacttttcaactgtggagtctcaatcaaacacttgaaaacagagtagctgaagaggtagaaaaaaatcgagaaaaagacagagtgctttttcaacaatcaaggcttgcctcgatgggtgaaatgatcggcaatatagcacatcagtggaggcagccactgagcgaacttggcattattttatataaaattaaaaaaattatgagtaaaaacaacgacgatgacccactttttttagaaaattataatgcagctaagacagttattaaaaaaatgtcagatacgatcgatgattttcgtgattttttcaatccgcatcgccctaaagaaattttttttatcgaagatgtgttgcatgaggcgatggtaatgatgctaggcacgctcaaaaaaaatgagattgcagtaagtatcgatgtgatagaaaatgtaaaagttaagggctatcttaatgaattttcacaagttttaatcaacttatttaacaattcaaaagatgcgttcaacgcaaatgtgataaaacaaaaaagagtcaatttaaagattcaggcaatcgataagaattatgctatgattacttatcaagataatgcaggcggaattccagaagatattattgataagatatttgaaccctactttacaacaaagcatgcaagtattggcacaggtataggtctttatatgagtagaatgatcgtgcaaaatagtatgaaaggcacaatcgaagcaaaaaattgcaacggcggtgtctgtttttttatcaaaataccaatgtacatcgaggagtgagacaatgaaaaagttatcaagtttaacggttttgtgtgtagaagatgaaaaagagttgcgagaagcacttcaaagtgctattggcgatgagtttgcacaatttgtaaccgcaagagatggtgatgatggattaaaaaaatttaaaaaattcaaaccagatatcgttattacagacattatgatgcctatcatggatgggcttgtgatggcaaatgagatcaaaaaactctcaagagaaacacctattgtgattttgagtgcttttagtgaaaaagaacgacttttgaaagcaatcgatacaggcatagacaaatatatcatcaaaccaattgatccagatgaacttatggcaactatcacttccatagcaaaagagcagcttgcactcaatgaattggtgcagctaggagagggttttgcttttgataaaagtcgcaaggtacttgtaaaagatggtaacacaattgcattgacaaagaaagaattactatttattacggttttagtgaaaaatcttggtgtttttgttttgcatgaagaga

SEQ ID NO: 1577 - DNA, 22598 bp, synthetic construct
  source 1..22598: mol_type = other DNA
  variation 12102..12121: note = n is a, c, g, or t
  misc_feature 1..22598: note = Synthetic
  variation 18063..18294: note = n is a, c, g, or t
gcctctaaagagaaagatgaacttgaaaagtttattacacgtttctctgcaaatgcttctaaagcgaaacaagcaacgtctcgtcaaaagaaattggataagttggacatagaagagattaaactctcatcaagaagagacccgtctatagcatttaaacctcatagagatttaggtaatgagattcttgaggttaaaaaccttggtaaatcttatgactctttggaagtttttagagacatctcttttaaagtagaaagaaatgataaaattgccatcattggtggtaatggtgttggaaaatctacacttttagagattattatggaaaaacttaaagctgataatggttcattcaactgggggcaaacagtaaccacaacgtattttcctcaaaattctacagatatggttgttgggtcagaaaagctttatgagtggattcaaggttatgatgcaaaatggcacatagatgagattcgtcaatgtttaggtcgtatgttgttttcaggtgaagagcaaggtaaatctgtaggtgactgttcaggtggagagaaacaccgtgtaatgctaagtaaaatgatgatggacgatgccaacttcttggtattggatgagccaaacaaccacttagacttagaagcgattattgctcttggtgaagcactacacagctataaaggtggagtcatctgtgtctcacacgatagagagttgattgatgcttttgcgaatagaattattaaaataaatgctgatggtactctaatagatttcaaaggtgattttgaagagtatatggaagtgtatggaaaataagtaattatgctgggcttttagcccaacataattacttagttacttatttatttcttctttttttataaaactctgctttaaactctttaaatcttccagctaagattgcttctctcatctctttcattaaatttaaataatagtacaagttgtgtatggttcctagtctaaagtaggtgatttctttggcacgatataggtggcataggtaggctcttgaataggtttgacagaccatacatccacactctgggtctaagggtagagggtcttctttgaaccttgcagctcgtatactgacttttccataagaggtgaagagggttccgtttcttgcgttcctagtcggcatgacacagtcaaacatgtccactccccgtgatacattttctaccaaatcttcaggcgttcctacacccatgaggtagcgtggtttatcttctggcatgaattgggttgtccactctaccgtgtcgtacatatcctggttggcttctcccactgaaagtccaccaatagcaaaaccgtcatagtctaaagcacagagctctttggctgacttttctctaaatgccttgtcggttccaccttggataatggcaaagatgttttgctcccgtgattttcctttggcttggttcgctcggtggtattcgatagactcttttgcccattgtgtggttctttcaatactggctttgattctctcttgggtcgctggtagggctaccaagtcatcgagtatcatcataatgtctgagcctaagttattttgaatatctataacttttttaggggtaaagtagtgagaacttccatcgatgtggcttctaaaggtaataccaccttcatctattttgacattgtccgagagagagaaggcttgaaagccaccactatcagttaagaagcttttaggatatttggtaaaaccatggagctttccaagtttattgatgacctcatcacctggacgtaaatagaggtgataggtgttaccaagaataatgctgggatttaaaaaagtctctaaatctgtcgcatcaagtgcttttacagcaccaacagttccaacaggcataaagacgggagtttgaatggttgagtgtgcagtttttatggtacaagctctggctttaccattggttttatctatctgaaaatccattgtgttataatatccttaataaaaacgcaattatacccacaagatttaaaatgaaaagagataaatgaagaatatattgatattggcagatggtgagatggctaagcactttgttcagtgggttggtaagagcagaatagatgataaccattattatatcacctgttctgaagagcattcaaattctttacagagttctagcagcaatcttaactttattaatgtagatccaacatctttgatgcgacttaaaaatattatgaaggagcaagagttctctactgtttttattgttatgaatgaaaaagaggagtctctttatgctttaaataatatacgaactattaactctaaaatctttgtggtctttgttagtaaatgggatgatttagtactggatgatgaaaataccactcttttaaatgttaatgaactcctctctgttaacctttatgaaaaacttcctaatgttcctatgattgctaaaaatattggtttaggaaaaggtgaaattatggagatactgattccttttggaagcagttttgcctacagacatattggctctatctctcatagaaagtggagggttgttgccatatatagaaaagagaagcagattttccctaacagtgcaacgatgttgcttccgaatgacagattgattgttattggaaatcctattgttttagaagaggtttataagcgtatcaacagacgacagggtgtttttcctgaaccttttggtaaaaatttatatctgattatagacatgaaccagtcgcatgaagagatacaaatagagatagatgaagccatttttttaaaaaataagttacccaaaacaaaactttatattcgttttatccatatacgaagcttaacggatctccaacagtaccgtagtctagagaatgatacaatctctttgctgattaattacaaagatagtgaaatctttaccgacatagactatgatgtcagtcagctagatataggtattttccttttaagtaatcgactcttttttcaaagaaattataaaaaacatctctatggattgatgcgacctatctatatttttggtgataaactactctacaacataaaagagggcgttgttttaatgggtgaagaggcagagatggagtctctttctacctccatttttgacttttcagaaagtttgggattaaagttgaatctctgtgactataaccctgaaggtgattttgaagagagtgataaaattgtcgagcattatgagtctttatctaagatttataactttaaaatcaatattgaaaagaagaaagtgaatcctattagggaacttttaaaacatgatgagatattacatatcgctccttttaacaaaagtatgaaaaatgtatcgtttattaactttttttcgacacagttgagtcactattttatatccataaaaaagcatccacaacttttaatacctgttgataattaagagagattaagtcctttaaataggaatttaagatagaataagagccattttatcccaagtataggcttagaaaaccatgatagtacccattcatttagagaaccaaacagctgtaaaatatgatgtagttattgactcccttccgaaattgacttttaatcgtaaagttgccattgtaacaaacacaacggtttcagcgttacatttagaaacattaatatcccatatagagtgtgctgaactgcatgtagtgaccattgctgatggagaagagttcaaaactttggaaacggtagagagtatactcaatgagctttttagccataaactcgatagaaaatctctgcttattgctttaggtggtggagttattggtgatatgacaggttttacagcctctctctatcagcgaggtataggatttgttcaagttcctaccacattgctgtctcaagttgatgccagtgttggtggaaaaacaggggttaacaacaggtatggtaaaaatcttataggtgcgttttatcaaccagaggctgtctatattgataccactttcctaaaaacattaccaaaacgcgagttttcagcaggtgtggcagaagttgttaaaatggctgtgatgtttgacaaagagtattttgactttttagccaatgtagatttgagcgataagttgagtttagagaaggtgattcaacgttcggtagagcttaaagctgaagtggtgaatcttgatgagaaggagtctggtatacgtgctgttttaaactatggtcatacctttggtcatgtggttgaaaatgagacaaagtatacagaatacctacatggtgaagctgtgtccataggaatgatgatggcaaatgctctatccgttgagttaggactgatgagtaaagaggagatgaaccaagttaaagatctgcttttaaaacatgatttacccgttacatataagattaaagatgtagatagtttttatgataagttcttcttagataaaaagtctgcaaacaataaaataaagtttattttgtctcagggtataggagaacatgttcttcgtaatgacattgatagtgctgttttgaaaaaagtattaaaaacttttagtgatgagtcaaattagatgaaagcgatacttctctcatgtttactctatacacagataatttttgcagactctaacctaacagagcaggtcaaaatatctattatggagtttatatcttctaaagatgagataaacagtacaaatgaaacagaagtaaagattgaagatgaaaatattagtcgtcaaaaagaagcattagaaaaagagaaaatagaaaatgataaagtaaaagcactactttcccatattaatgttttaattgctgaaaaaaaagagatagatgaagttttaatcaaagacaatctttgggcaagtgtctattttaatcatgaaacctataaactcttagatatgcaacttcaagctttaaaagatgaattgacactatttaaaagtaaatcacttttgagcaaagatgaagagagagagaagaagaaaaaagaagaattgtatcaggtcatagaaggaaaagtttctcaacttaaagagtataaaacagatccttttgttgctttgcttacggcaccagatattggagaagagcctaccattaccaatcctttagatattattacagctatgtcttttcagaaacaactcaaaacagtgcaagaggagtatctgaagcgttatgaaagtcttgaagatgctgtaagtaaactctatgctaagaaaaatattttagaagagttggtactcaaaacacgaggcgatcagtccactaaatttgttgatgaggttaaaacaacaaaagctaaaatagtagattttgagagaactatggagatttttaaaacatctgccagtgcatttgaacaaaaagtttctcagattaatttaaatattgatgacagtattgattctgagatagaaaagtccattattacaggttcaataatactctttatcttacttttctttttcttcattaaatatttggttaaaaagtatatgtccgataatgaacttttttatggaaccaacaaggttattaacttcttgtttatcgctttggtctttaccattttactctttacttatttggaaaatgtaggtcacttggtaacggttctctcttttgcttcagccggtattgccattgctttaaaagattggtttatgagtttgatgggatgggttgttattcttgtttcaggttctattcacgtgggtgatagggtgaagttctataaggatagtgttgagtatgttggagatgttgtcgatatctctgttttacgtatgaccattcatgaagatgtaaccttaacgaccacaacaatcaatcgacgtgcaggtagaattatatttattccaaacaactacatatttaccgatatgattgccaactactctcactctggattaaaaacagtttgggatggtatagattttttaatcacctttgactccaatatagccaaagcacagcacatcgctaaagatgtaacaagaaagtactcaaaagggtacaccgatatgaccagaaagcagttgaaccgacttagaagcaaatacagtatgcgaaacacagctgttgaacctagaatttttggttttttagatacctatggagtacgaatatctgcttggtatttaaccaatgcttatgcaacgttaacactaagaagtaccatatctatggagattcttgcgaggttgaatgaagaagatgatatctttatcgccttcccaagtcaatcactctatatggataaaccagcacccaagttagcacttgaagagggtgaagagccaaccgaagagcatcgagtagaatctctaaaatccaataactgaaaaccgtaaagcaaatggctggggagcctattaagaatgaacagacaaaaagtatattttaaaacctttggatgtcgaaccaatcagttcgatacccaagtcatgatgtcaaaactaaaagattttgacctaacactcaatgaggatgaagctgacgttattatggtcaactcctgtacagtgaccaatggagcagacgtttctgttcgtgcctatattaatgggtcacatcgcaaaaatcctcatgcaaaagttatcttagcaggttgtggctctcactctaaaggtgagtcactttttgaagataaaaaagtgtttggtgtgatggggcactctgaaaaagagaaaattaacgagattttaaagatagagaagcctttttaccaaataggtgacctcaaacatatagattcaaccatcgtagaggagtttgtaggtaaaagtagggcgtttattaaaatccaagagggatgtgactttagatgctcttactgtattatcccctctgtgcgtggagatgctagaagtcataaagaagaggatatcttactgcagatagaaaaactggcagccaatggttttggagagttcatcttaacaggtaccaatgttggtagttacggaagagatcaaaactcatctatggcgaacctgcttaaacgaatgagtatgattcgtggtgtacgtcgtattcgtataggaagcatagaacccatacagatagatgatgagtttaaagagctgttacgtgagccatggatggcgagacacttacatatagccctacaacacacttcagacaagatgttacagttgatgaacagacgtaacgactttaaaagtgatagggttcttcttgaagagttggcatcacatggttatgctttaggtacagactacattgtcgggcaccctggagaagatgagaaagagtggagtgaggcgatagagcgtgttaaacttcttcctttaacccacatacatgcattttcatattctaagcgtgacaatacagcttcggctgttatgaaaccagagattaaagggaacattgctaaagagagacaccgagagttaacagcgattattaaagagaaaaacttgctgtttagaaaagatcatgctgataacttagaagtgcttatagagcaagagcataaaggcagctataacggttatgaccaatactttaacaagatagaagtaagttcagaagaagatttaactggtaattggatgactgttaataatgcaaccgtaaagggtgataaaaatgtggcaatctaccagtaaaaatataaagataattatcgcttctttggttttattggtggctattttagttctttcaagttggcaaaaagttcctgaacttattagcaaagaagatgctcttaaacttattggtacagataaacttgaacgtgttatggtcaaagagccttacatttacctctatacgaaagaaaacaattataaagtagcagaagatgctctagagaaagagaaactttttgataattatattgttgaatattatgaagagtctactgaaaccatggagatgattttgtttgttgttcttttggggcttatcttctatattctattcatggtgagagagaatcgttatagacaagaggagtttgcaaagaagcaaaaagttgatgctttagatcaaacggtaggaaagctcaagatagttgcccaacgttcaagcataaacttttcagatgttgcaggtatagaagatgtcaaagaggagcttgaagaggtgatagactttttacgtcatcctgctaagtaccgagagtttgatattcgtctacccaaaggtgtgcttttgataggtcctcccggtgtgggtaaaacactggtagccaaagctgtggcaggtgaggctgacgttccgtttttttaccaaagtgcagcctcttttgtacagatatatgtaggaatgggagccaagagggtctctgaactttttagcaaagccaaagagatggctccaagtattatctttatagatgagatagacgctgtaggtaaaagccgtggtggacagagcaatgaagagagagaagccacacttaaccagttactgacagagatggatggatttgaagagaattcaggggtaatggtcatcgcagctaccaacaaaatagaggtattagatgaagccttacttagggcaggtcgttttgaccgacgtgtacacataggtctaccagactttaacgaacgggtaagtacactcaatctatacttaagagagaaacaacatactgtagatgtaaatatgatagcaaacatgaccatagggttcaactctgctgcattggcaacattggtcaacgaagcagcactctatgccttacgttcaaataaagagcagatagagaacagtgatatagaagctgtaagagacaaagtgttactaggaaaacataaaatccaaacttttaatgaagctgaacgaaaaatccaagctctctaccaagctgcaaaagctgtaacagcctcatggttagaagttgagtatgaaaaaataggtatcatatcttcaaccttcataccccatcataatgagatactctctaaaacagttttagcaaatgagttaaaggttcttttatctggccgtatagctactcaaaaggtttatggagaactcttctctaatgcaaaagaagacatcaaactatcgaagactttagctcataaaatcatagaagaatttgccatgacagaagagtactttggttcatcacatcaagctcaaaaacttttagaagaggcaaatgatgaggtgacaagtctactctctaaacttgcattggttgtagaaaatgtttcaacgtatctacttgaaaatgagtcgataacctctgtagaaacaaagagaattgtcaatgatttattttaacggttttgctctaaaaggagaagagaaatcctttgaagagcaactcattaacagtgacttttgcgtcgctggtttctcttatggagctcaaaaagcctttgaatatgcctacaactctaccgaacgcatagaccgactcatcttactttcacctgcattcttccaaaaccataaaaaatccttcatacgaacccaactccgatattacaaggctgatgagacatcttataatgaggagtttctaaaaaatgttgcttatccatctaatattaatttatatgaatatgttgatattggtaaatatgaagagttggaggctctactatcatacaggtgggataaagagaaagtcttagaactcatagataggggagttaccatagaagtctttatgggtgaagcagataaaatagtaaatgctgaaaaaagttatatgtttttttctgagttgacgacggtttatttttttaagggtgtggggcatttgttgaggtgatttcttctactattgtgagccattcatgaaatctataacactcttaattttcctatgttttaattttttactgttatgtgttatttgagtttttttattgaaaaagtattgattctttgtttttatttttgtggattggttgggaattgattataatagttataagatgattttggagaaggtaaagaatgagtaaaaaaatattaagtttagacttggggataacatcaatagggtattctatcttaaatgagatggataatgatagatatgcacttatagattatggtgtaagtatgtttgataaagctacagataaagatggtaaatcaaaaaagttactgcatagtgctagtaaatcttcaaccaaactctataaccttagaaaagagagaactaaaaacttagcaactctttttgaaaaatatggtttaggtaaagctagtgcgttactggggcaagagagagaaaatagttttccaaataaatggtatctacgtgctgaaaaatctttttcagaatctttaacttctcctgaactattttctatcctttatcttatggcaaaacatagaggttataaatcattagatacagatgatttactagaagagttacttttagaactgggttttgatgtagaagagaaaaaagttaaagatgttgaaaaaggtaagataaaacaggctcttaaaactgttgaagagttacgtcaaaaatatcctgaaaaaacagttgcaagaatcatctatgagattgagatacaaaaagagaaccctacctttagaaaccatgacaactataactacatgatacgtagagagtatatcaatgaagagatacgaaaaatagttttagcccaaaaaaagtttggattgttttctgagactttagatgtagagatatttatcaagaagctaataatgactattgatgaccaaaaagattctactaatgatttgtctctttttgggaactgtgagtattaccctacacataaggtggctcatcaatattctcttttgtctgatatatttaaaatgtaccaatcggttgccaacataacttttgataaaacaaaaatctcaaaagaacagataaaaattgtatcagataacttttttaagaaaataaaacagggtaaaaatatagctgatataaagtaccaagatatacgaaagttactaaaacttagtgatgaagttcaagtttttggtaaagaagattatcgtttagacaaaaagggtaagaaagtccatcataccattactaagtttcattttttagccaacttaggaaaaatagataatagctttataaagagtatttttgagaaagagaatagtctaaaaattttaaaagatatttttgatgtactagagtttgaaaaagctcctaagagtatgtatactcaaataaacgagctgtttttaaaatattctttggtagatgatgagaggctaaaaaatgagacgattataaatcttattaagtataaaactggaaacagtcttaatatttcagctcatgcaatgataaaatttatgccttattttgaaaaaggaatgagtaccgatgagataaaaaaagagttgaagcttgaacgtaatgaagactattcaacttttatgaaaggagttaaatatcttcatactaagagttttgaaaaagatgataatttagagattaataaccaccctgtaaagtatgtagtttctgcaaccatgcgtttggttaaacatcttcatgccacttatggagagtttgatgaaatacgtgtagagagtacacgagagcttagtcaaaatgaagagactaaaaaagctatagataaggcaaacagagaacaagagaaaaaatttcaagagattatagaaaatattgagtatcaaaaaatagccactcactacaataaaaacttgaaaagatacgctagaaaattaatgttatgggaagagcaagagaagcttgatatttatacaggtaagaccatagggattgatgctatattttccaatgtggtagatattgaccatattattcctcaaagtttaggtggtttaagtgtaaaccacaatcttgttttggctcacagagatgaaaatgtaaaaaagtcaaatcaacttcctatgaactttgtaaaagataaagtggattatacaaacagagtagagtatctttttaaagaatatagaattaattggaaaaagaaaatcaaccttttagctatgaccttagatgacagatataaagacatttttgaaagtaaagagcttagagcaacttcatnnnnnnnnnnnnnnnnnnnngaactggaaaaagagttttcaacagctctaaaaaatatatctaatgcttatagtgttggtaaactcttacaattagaagctgaccttactaaaaaactttataaatatgctgcgaagaaaacaaatcaattgggttttgtacgagaacatgctaaagcagaaaatgccaatggatttttagaccatggaaattatttggcgtatggtttgggtgctacaactttatgggtgcttggtattcctcatggttttgctgtaatgcatggtaaaactaggcgaggggcattggtttttgatgtggctgacctcataaaggatggcattattttaccttggtcatttgtttgtgccaaagagaaacagagtgaaaaagagttccgttctcaaattttacagagttttgtagagcataaggctttagattttatttttgatgaggttaagaaggcttcgatgtattataaagaagagttatgatggtaactttcatctcacaatgtgagaaaaatgctctaaaaagaacaagaagagttttagactcttttgctaacagaataggtgataacacttggcagaccattatcacccaagagggattaaatgctgttcaaaagttacttaaaaaaacagcgtctaaaagtacggctgtaagttgtcactggattcgtagtcgtagtaggagtgaatttttgtgggtagtgggaaacaaagatgagtttgatgaaaatggtatagttgctgtaaactatggagttactaaaagatttataggagagaaagagataatgttagagaatatttatgcgaatacaaatggacaacgactagaccaacacctttttgctgtggggtgcttggctaaagctttgatacaaaagataatccccaatgatgataatttggcagagtcagcttatgtagctggatgttggcatgatatagggaaaatagatgaaaactttcagggttggcttattaaagagttaaaaaaacaaaaaaatataaagatattcctgatgaaggcgtacatattgaaaaaggtactttttcatttgagaaatatcctcgacataatgagttctcgctcttactttttgaaattttgtacaagtcaaatttaaataaagactctctattacgagctaaacacgctatctattggcatcatgcaaagcccatacgaaaagaagaaattaaaaatttagtgggtatttacaataagattacagattttgagagtagctatagtgatactattgatacactcaaagaattattggtttctgttgataaaatagcaaatgtatatgatgaagagtgtagggaagtatataagataaatgtacctcgttttgatgatataaaagagtttttaagaggtatggatttacctatatacaaaagttattcagcagagaatagaatacaaggatatgatagcgatataaaatttaatgccaaaaataaccttgcaagaacagccatagtaacagcagatagattaatttcaaaattgacagccgaagagttagatattcatttgtcaaataaaactttagatgatttgattattaaacccttagaaaagaaaagaggattaagagctgaaatagatatttgtttagatggatttaaagacaaatacccaaatagtcaacgaaatgagaaacagaaggaggtagctcaaaaacttgcacataaaaaaattgaagtaggtgtattaaatggtccagcagggtgtggaaaaacaaagatagctttggagtgggcattaaatacatctgctaaaaaaatctattggatttgtccgagaattcaagtgtgtcaaggtatttttaaagatttgtcgtctaaagattacttatcaagtgcagatatagaaatagtaacaggagaaattaaaaaaagtttaataaagactaaaaacgacgaagagggaaatactttagataaagaagtattttcatctgatattatcatcactactatagaccaaatagttaatagcattacaacacataaagatattactactctaatggactttatgaatgctcatgtaatttttgatgagtatcatgaatatgttaatatgaaaggatttaatcttctttttgcagagttgatagaagctaagaaaatgcaacaaactaaaataagcttaccaaatactttattggtctctgctacacctcatcctctctttgtaacaaaatttttaaatttagagaagcgagatattgttagtatggagagtttcaacaagtcaaaatataagataaactttgtagaacatagtgaacttatgagtgggcaaaaagataaaagtacttttgtgattagtaatatagcattaacagctcaacgaagttatattgaacatcaagtaactgaaaaatctattttgtttcattctaaatttattaaaaaagataaagaggctttatttaaagaagttgttgcttcttttgaaaaaaaaggaaaagaactatatgatgttttacggagtggtccagctctacaagcttcactcaatattacttgtagaaaaatggtaagtgaaatgagtaatgcagaagattttttacaacgattaggaaggcttgatcgttttggagagtttgatgaagtaaatcattataatgtagctatttcagaaggtgtaaaaagagatgatgcaaagagaggaacatcaaaacaaggtgatagtagttcatggtttttaaaagatgaactgtttagtttaagaagtgcgaaggcttggtatgactacttagcagaacatctaccctctgatagttattcaatttcagatatatataaattgtacgatggattctattcagatgtagatagtcttaagttaatagaagaggacttggttgaagctcttaaaaagagtgttgaattaataggtagtaccatcttagaccctaaaagttatccaaataataaaaaagaagataaaggagtcataaaaataaagaaaaattcattacgtggtaatagcttatttattcagatggcaaagtgtcaaataaatcatttagatatgtttgagagattaaatgaatatgcctatgataagatagaagatgcaatgacctactcatctaaaagaatagaagataatggtttactctcttttatgtcaagtgtacatcatgagattacaaatacaagaccaatcaataaaaaacaaagaaaaaatgaatatagaagaaatgctagaaatccaagcacaccaatatatttgagttatacaccaaatgagttaataaaaataggaggtgtctctcctactgaaaatgctttatactatgctattggacttgacgataagcccattggtattatttcagaagaacaattaaaaaataaaaaggaaattacaaatgaaaagtgaaagaataacaggaattagaagtgttgattttaagatagtcgcaaaaggtcatggcgttgttaattggaatggaccaacaaaactaaaaataaaagacgagttaggagatatgaatcatacaatgcctaagttaagagggtattcaaactttacaggagaagagagtagtaaaaagtttaaatacttaaaagaacctactgaaattgattttgatgaaacacctctatatattagtcaaaactgtgtccgtcatcatctctttcgtgaacaagcttttgatgtacattatgcaactaaacattcaaaagaaatagataaattattggcttctctagttggtttagttcgaggttatgttgtaccagccaagatacctttgaaaagaacaagctgtttactattggaagattttgtagaccaggagggtaatggaaactatgaacaattttctgttgcaggaaaaatggatgaaaaattagaaaaaagagataagaattcattctattctaaaacaacttttggaaaaactagatacatttcttatggctctattagtattgagcagttacagtttatctctttagataataagtttgaccgtgctgctatgattgtcgatatagagaaagggaaagaggtcgcaaggctaattgaagagtatattcagtcacttgatacatctcgttctccaaaagcaatattccatgcaaattatgtaagaaatgggacaatctttgaagagggtgaggctggaatattacttaatgatgatgctgtggcaattgttattgatgaggtgttgagaaaattaagtgaactctctatcagacagtcaaagtcatatatgtatgtagatgaggttacagttgattataatgacagtattaaaatgatgagggttaaagaaaaaaatgaaagtataaattctactcctcaatcagaatatgcacaatatttttatgcaaaagataagtaatgttaatacgaatagaatatgaatcctcatggcgaaattcttttcttgatggtagtaatgatgagcctattcctagtaaaggaagaaagtatatcgcttcgggaaaaggattaacaaagagtgaaaactatatacctagagaagtcgaaaaaagtacagtgatgggtattttaaatagactgataggtgaccaacgaaagctttatcaagcacgagaagatgaagtatattattttaaagaaatagaatctttagtaacctataaagatatacctaaagatataagtagtgaacttgtttatttacgaaatatgtcaggtaattttgatgagaatttattttctggcatgattaaagctaatgataaaatgtttacatcagaatattctaaagcgttttggggtgttcttgaattagatttagatgaagttatttcatttattattaatgctgtaaaaatacaaaaagatataagtttagaccctttttatatcgttaataaatttgaaaaaataaaaaagctaaaaccagtagatgaatcagatgagctacttaaagctattaaaattttagaaaataattttaatgatatttcaacatatagaaatgataaaaagaaaataaagattttggaagtttattgttcagcactttacttacagaaagatagattgtctaaagaatatgatgtaagtgctttacttacaaaaacaaaaaccattaaagggttttcaaaaaagaattttacaacaaaagattttatggctcatattacaacaggtggtaaaaagattgcatatgggaatccatatattgtaaaaaaatttgaaaaaggagtggggaaaacaacttctatgttaaaaaaagtaaatggaattttagagattactctaaaaatcaatgaagataaagccgaagaattagaggagcatatagaaaatgcaggtgtttctactttttatttaggtaaaaaaggtttggcttatgtaacatatattgacacacgggaggaagattgaaaatggattattacatagatataaaactcatgcccaacaaagagataagagaaaatgtacttctaaatcaagtctatacctcttttcacaaacgattatatgacttaaaatcaaccaatatagctgtgagtttcccacagtatagattgaaattgggtagattgtttcgtattcatggaacaaaagaggcattagaaaagctagaagagaaagattggcttggtaaatatggagtatattgtaaggtttctaaaatagaagccattcctacaactgtacaacatcgaaccatctcacgaatacagcaaaacatgaccgaagcaaaactaagaagactcataaaacgaggaacaatccccgaagaagatataaaaaaataccgaatcaagatgtttcaaggaggcttagacaatccttatgtagaacttgtaagcatgtcaaatggtcagttacatagacgatttatagagtttggagagttacaagatgaagagacaaaaggtgagtttgatttgtttggattaagcaaggtttcaactannnnnnnnnnnnnnnnnnnnnnnnnnnnnnnnnnnnnnnnnnnnnnnnnnnnnnnnnnnnnnnnnnnnnnnnnnnnnnnnnnnnnnnnnnnnnnnnnnnnnnnnnnnnnnnnnnnnnnnnnnnnnnnnnnnnnnnnnnnnnnnnnnnnnnnnnnnnnnnnnnnnnnnnnnnnnnnnnnnnnnnnnnnnnnnnnnnnnnnnnnnnnnnnnnnnnnnnnnnnnnnnnnnnnnnnctatgcagactccgaacatggggtgttctgttcttcgtagggcattttttagtctggttagggttagggtggcttcattgagaacttttttgttcatcatctgttcgttcatggcttcttctctcgtgagtctacctagcgaacagtctggtgctatgggttttgttttctctttcagtgtttctatttgagtctttagttttgctatgtctgtttctattttctttttatatttctttcgattatagagagtgtttaatagaaaaaagtataaaataatggacaactcgattaaggaatttatatgactcattttaacaaacttattttatcagcatttctttgtgctacacctataatggcagaaggtaaccctgctgacctctcttcactcattggagagatgatggaaaaggataactctttgaatgctaccattaaccttgcaggtaaacagagaatgttgactcaacgaatgagtaaggtagttttattgatttcattagatgtcgatagtaaattgtatagtaaaaagcttgacagttttgcaaaactctatgaccaaacattaaagggctttaaaaagggtgatgatgctttagggttgagagctactaaaaataaagatgttttaaaacagatagagtctgtcgaaaagttatggaaccctttttatgaaaatattcaaaaggtcgtagcagatggagctagagctaaggatgctattgcttttatagttaaaaataatgaagagatgctttcaagttctaatgatctggttacagcttttgaaaaatcaaatgcagatttagattacttaagtaagttcagacttcgtgtggtaaatgttgcaggtagacagagaatgctggttcagaagatgaccaaagaaaaactacttgtacatgaactgaaagatgctgcatataaggagaagttaaaaaagagtatagagctttttgacacttcgcttaccatgttgataaatggtgataaagataacaatatctctaagcctacagatgctgagttaaaaggagagtatgataaagttgcaaaactttggtctaaactaaagccactttataaaaaagataaattaactaaaaaagagttgatggtaatagttgatgaaaacagagagcttttaaaagagatgaactctgccgttaaaatggctgagacagttttagagtattaaactttttactttcccattaatataatgggaaagtagttgtttatgaaaatttttggtcagcgtattagttgacagcaactttataagtagggtcatcttcctcatacgtacagaatggaccagctgtagttaagacttttttacagtcatcagctaagtgtctaagtgtaagtttctttccagattttttatacttttcggttaaagcatcaatcgcttcagctcctgaactgtccatcactctagcatttttaaagtcaattatgacatcatctggatcattttctatatcaaactgctctgcaaatgatgtaacagaagcaaaaaatagtggtccctctaggaaatagacttttttaccatcttcattctcttctgttcttgcgtggatttttgcatgttcccaagcaaacaccaatgcagagataataatacctgcaataacagcaatagccaagtcagcaaatacagtaataatggttacagcaaagagaacaaatgcatctgcttttggcatgtgtttgactcttcttaaacttgagaactcaaaagtaccaatacttaccatgaacataataccgataagtacagccacaggaacagcagagataacagggaagaaactaactactagaataagtagtaaaacagcagctacaaatgatgagagacgacccaaaccacctgaagagtagttaatgatactttgtccaatcattgcacaacctgccataccaccaaacgaacctgaacatacgttaccaataccttgagcaacacactctttgtttcctgaacctttggttccactcatttcgtccagtactgaaagtgtaagaagtgactctataagtccaaccatcgctactaaaaatgcagtaggtaaaatgatgtacatagaagcagccgtaaagagtgatgtctcaggcatcataaagtgaggaagaggaatagatgtaatgtcaccaaagagttgaccaacaagttttgtctctgttccagtaaagtagattacaagtgtaagaccaataatcgcaataagaccagcaggaacagctttggttacttttggtaagtagtgcattatgagcatggtagcagcgataagtgcatacatgatgtagttctctatgaaactgttttgtacagtttctatccaagagaggttctctgcattgcgaggagctaagaatttaaactgagccaaggcaataacaatagccaatccatttacaaaaccaaacattgcaggttgaggaacaagacggataaatttacccattttaagaagtccgacagctatttggaagagaccagcaaagatagaggctaagagtatgtgatggagtatcatcatagagagtgcttctgcatccagttcaggaaaaagagctttaacagctatacccatagagacaaaaacaatggcaacagcaccagtggcaccagaaatcatacctggtttaccaccaagtatagaggttacaagcccgatgataaatgcagcatacaacccaaccatagggttaacccctgcaatggctgaaaatgcaatggcttcagggatgagtgcaactgccaccaatgcccctgaaagaacatcattctttatgttttgtgtagagtagttttggagattaatcacataaattcctttgtgaaatattttcggaattttatcatagttggactaaattgtagggtgtagttaccgagactctaaaagaacctcggaagtggagactttagtttcacaaagagttgtaaatagatgaaatgaaatctatttcgcttcatactctatagaagagggttggctaaagtttggaacattatcataggtaaatacagcaaaatatttatccattttggtcgaaccaaagttatcaaaagtatagttgtctaatccagcataaattttaacaccatcaaatggactttgtggcgtgtgccaacggtttctaaccacataataacctacaagatcatcttcacttactttgtcccatgttactttaaccaatttattctcaacaaatgttttgaggttgactggtgatggaagagggtgttttcttcttttgatgtacttcaccataagtttggcagcctttttaccttcatgagcccagttaatgacatggtcacgagaaagtacagaggttggacgaatgataaactttgcttcatcgccattacgttgtttctcttcaagggctagttttgagtagtggtcaaatataaagtgatgctctttcttagaacccaactccttagaacttacttcataaccaataaattcgatacgctctctctctttaatatcctgataagtaaactcttctaaatctataaattcgacgttataacgaatgtctactttatttttaacagttgatgtattgtttatctgaatccatgcatcggtgataacggattcatctggattaggaagagaagtcaggtcaaatgacatataggcatatattttttcatcatttttattaaatccacaagccatgatttcaggagttatttcatctggagatatggtcatagagttttctaaggcaatggcgattttttcacttggaacagtatatttaatgtcgatagaaggtctatagtgtagtcctccaccttcatttccataccccaaatcaaaaaccataatctgtgagtcacgtcctaccggtagcgtggtcggacctgctagtttgaggattattttacccttctttagctctttttgaatcatattgttttcaaactcattacagtcccaatgagaccagataccctgtgttaatttctctgaagcaatacttgtaccaatggtcttgatatgctttgcattatgcacttggtcaaagtcacgtatgttggcaaccgtatcttgatcgataatagagagtgaccactcaccaaacttttcaattttagctgaaacacggttaagtggatagagagagacctttgtatctaaaataatggcattttctggaatactttttaaatcaaaagtcatgattccataagagattcctctgccttcattaattccaacctttaaagaattcacgccaaagtgtccatgatttgc

SEQ ID NO: 1578 - DNA, 18335 bp, synthetic construct
  misc_feature 1..18335: note = Synthetic
  variation 9336..9347: note = n is a, c, g, or t
  source 1..18335: mol_type = other DNA
  variation 1716..1820: note = n is a, c, g, or t
ttagagagaattgtagataaatatttcaaaggatagataaaaatgaatgataaagtaatgttaaaaaaacaggctgatacgataagatttttgtgcgcagatatggtacaagctgccaacagtggacatccaggtgcacctatggggcttgctgatatcgtaacaatcttagcgaaacatttaaaccataatccaaaaaatccaaaatggcttaaccgagataggttagtttttagtggtggacatgcttctgctttggtctactcgtttttacatttgagtggctatgatttgagcattgaagatttgaaaaatttcagacagcttggctcaaaaactccaggacatccagagtatggtgatgttccaggtgtagaagttacaactggaccactaggacaagggataacaaatgcagtaggttttgctatggctgcaaaatatgctggaaatattttaaatactgaaaatactaaagtaatcgaccataaagtttattgtttatgtggagatggagatttacaagagggaattagttatgaagctagttcgattgctgggcatcttggtttagataatcttgttgtgatttatgattcaaatgagataactatcgaaggctgtacttctatctcgtggagtgaagatgtaaagggtcgttttgaagctcaaggctggcaggttgcgaggattgatggacacaattatgatgagataaatgaagttttattgatggcaaaagaacaaacaaaacctttcctcatcatcgcagacacaactatcgcaaaaggtgcttgtgagatggaaggtagtcatcactctcatggtgctcctcttggtaaagaagagattgcaaatgcaaagacaaaagcagggtttaatccagaagagacattttttatcgatgctgatgttaaagcaagatttgagtgtgctgttgaaaaaggtgatttagctcaaagctcttgggaaaagatggttaaaaacgacttgaataatgagcaaaaagcacttcttgatgccttgttaaatccagatttttctcgaatcgaatggccagaatttgctgtaggaagtagtgtagcaacaagagatagcaatggaaagattatcaatgctattgctcaaaaaatccctggatttcttggaggtagtgctgatttaggcccttcaaacaaaagtgagcttaaagatatgggagatttccctcacggaagaaatatccactttggaattagagaacactctatggctgcgatttctaactcatttgcgctatatggtctttttatcccttatagtgctaccttttttatctttagtgattatctcaaaccagcggcacgtttgagtgcattgatgggacttaagagttattatatctggacacatgatagtatcggtgttggagaagatggaccgacacaccaaccaattgagcagttaagccaatatagagcaatgccaaatttctatacattccgccctgctgatgcgagtgaaaatgtaaagtcatggcaaaaagctttaacactacaagcgccttgtgcttttgtatgttcaagacaaggcttagaagtgcttaaagaccaaagagccataggtgatattcaaaatggtggatatctactaaaagagagagcaaatgcaactttaacactcatggcaagtggtagtgaagtttatactgtattaaaagctgcttgtgaattggannnnnnnnnnnnnnnnnnnnnnnnnnnnnnnnnnnnnnnnnnnnnnnnnnnnnnnnnnnnnnnnnnnnnnnnnnnnnnnnnnnnnnnnnnnnnnnnnnnnnnnnntgtaaagcataaaattaagatataaagattaaaacattggcaagacttatagtgtatggtgatattcatggttgtttagatgagttgactcttttgcgtcataagataggcattagaagtgatgatatagaagtttgcgtaggtgatgttataaccaaaggtgcaaactcagtcaaaacacttaaatatctaagaaaaaagggaattttctcagttttaggtaatcatgaagaaaccatcatacgctatattcatcatgtgaaaacgactaaaaagagaaaccctatcaagatagataaagaccaaaaaaatatcatcaaaaatctctcttataaagatattgattttttagagtctttgccatattttatacagtatgaagggtatatcatcgttcatggtggcttacaaaatgacatgaacctctctaatttgagtatgagggataaatcaaagatgataagacttcgttatcttagccaaaaagggagatttatctcttatggaaaagagacaaaaaattcgattttttggtctgatgtgtatgatggcaaaaatggttttgtaatttttgggcataacaagtttaaagagccaaaaatctcacctcatgcgataggtatagatacaggttgtgtttatggaaataaactaacagcttttatagtagaagatggtaagagaagatttgaaagcgttaattttggggagagagatgaaagcagttatatttgatttagatgggacacttttagacactcttaaagatatcgctttgagtgtaaaccatgttttacaaagcttaggaagagaagagattccaatagacaagtatcgctatcttgtaggagaaggggcattggctttgatgaaaaatgctatgcctgatgctgatgagtctttacatgtaaaagcattggagctttttgaaaagcactatgccttgcaatttgataaaaatacaaaaatgtatgaggggattagtaaaatgcttacatttttctctgctagaggctataaaatggcagttttatcaaataaaccagactcttttactaaaaaatgtgtcttaaagtatcttcgtaattggaagtttgacgctgtttttggtgttcgccaaggagttccaaaaaaacctcacccacaaggtgtttatgatatcttagagattttaggtgtgaagcctgagaactgtttatatgtgggagatacgagtatagatatgataacagcaaaaagtgcaaacctcccttctatcggtgttttatggggatttcgtgacaaagaagagttgttggctcatggagcaaaatacatagtaaaaaccccaaatgagcttatcaaacttgtagcaaccatagagcatatacaaaaagagtctttctaaatggattggtttcagatattttttcttgcgcttgttcaaggatttactgagtttttaccaatctctagttcagctcatcttatcttagttccacagttttttgactgggatgaccaaggtttggcttttgatgttgctttacatgtaggaacgcttttagctgttttatattattttaaagatgatatttggcagatacttaaagatatgttagaaaacgttaagcttaaaaaagaggtgggacaaagtaccttaggttggggagttatcataggtactattcctgttggattagcaggaattagttttaatgattttataagcgaagctttacgttcccctttggttatagcaagtacaactttaatctttggtttagttttactccttgcagatagagtagcaggcgttaaaaatgaaaaaagcattacactctttttagccttacttataggcatagcgcaagccatagcgcttatccctggtacttcacgttctggtataacgatgagtgccgctatgctacttggcttctcaagagtagcggctgcgagattctcttttttactctctatcccagttataatccttgctggaggattaaaaacacttgaactaatagcctcacaagtggctgtcaactggttagaacttttaggtgcagttgttttttcaggtttgagtgcttatgtttgtatctttttctttttaaaacttatctcaaaaagttcaatgttaccgtttgtggtttataggttaggacttggtgttgtgcttttttatctttacatgtaaagctgtttagagaaaaaggctataatctatctaaaggagttttttatggaaaaacttgttggtagatatactctacaagaagagatactaaacgctgcgacacatggttttgggatactgcttagtatcgtaggacttgttgttttagtagcatttgccacactaaatggctcagctcttctcatcactagttgtgctatctttggtggaactttgatatttgcttatgcttcttcaacgctttatcatgctataaccaatgaaaaagcgaaacaaatctttagacaatttgatcactcagctatctactttcttatcgcagggacatatacaccaattgttttagtactgcttggtggagcttggggttggagtatctttgctatcatttgggctgtaactatctttggtgttgtcttaaaatttgtctatcctcatcggtttaaaaaactctctgtagctctttatcttatcatgggatggtttatcattatcgctttaaaagagttgctggtagtgatgcctagtggtggactttggcttatgcttataggtgggcttttctactctgttggcgttcttttttatgtttacaagaaacttccttttaaccatgctatttggcatctttttgtgcttggaggaagtatctctcactattttatggtgcttttttatgttattccataaaaatatcgttgtaagatttgagaaaaaactttttataaagtcatttttgagccttttttttgctttgatactgttttttttgcctacttttaaaatcgcttatatagatgatttgagtgataagtattttgaagaatctatcaaaaaagcagccttagcttatgccagtgcgagagtagtcaatgctactgtgtcagttatccaagaatcacaactccaacttgaaccagctggagttggtgtgagtttggccatcgggcaagttttagaccctataaacgatatgagtgagaggctctcagatgtgttggtgatggctatcacttctttgggtgtgcaaaaattgacctatgagataagcgtgagtgttacaccttatttgttagcatttttgcttttagttttttcttttaccgtttggataaaaaatcaaaagatagaaaaaatacagatttttctgttgcaactctcttttattatccttgccgcaaggctgtgtttgccactttcagctttaggaaatgagtatctttatgaaaacttttttgcctcaaagatagaaaaaagtagagaagctttgcagataacacagttagatatcaatgctttagcagatgtaaagttgcaagaggaagaggggttttggagtaaggttacaaatacaactcaaactatcaaagaaaaaacagttgcatttcaaaaagcttttgtttatgctttggaaaatgcaggaagtttgatagaacaccttttatcactcacttttttatatattggagtttttcttattcaagttattttatttcctttagtagttttttggttatttatgagaagtttcaaacttctttattaagagtgtttgcccgcctttaataaaacgggcaagatggttaatcgaccaaacctttttcataccattttctaagccatgcatccatcggatacataaatttgtaaatggctggaacaacaagaagtgtcaagatagttgaactaagcaatcctccgataatcgctagtgccataggtgcatttgcctcgtgtccagctccaccaccaaatgctagaggtatcatcgcaccaatcatagcaaaagtagtcatcaagataggacgtagacgtttttctcctgcctcaaaaagagcttcatcgatacttttcccttctttaatcgcacggttagcaaaatcaacaaccaaaatggcgtttttcccaaccattcctaaaagtaaaatgataccaatcataacaaacaagctaaaggaatttccactcaaataaagagcgatgataatacctgtaaaagagagaggcatagagatcatgatgataaatggctggatgattgattcataaagtgctgccaaaatcagataaatcaagattactgccaaaagcacggctgctccaaaagctttgttggtgtcttcaaggtattcaacgtcaccagtgtaatgataagcatacccttgtggtaagatttttggcatagcttcattgacaacagcgacgattttgtctaaagaggtgttataagtgttcgcagtaacaagaactttacgttctctatcaaaacggttgattgaagcagttccagtactctcatctagttgcaacaagccctctaaacttacaaagtctccatcactatttcttacttttagtttcttcaaatcttctaatgattttcggtaatcatcttgataacgtactgtgatatcaaattgacgtccattatcttcaaagtaagaagtggcattatcactagagtaagcagaagctaaaacagaggtaatctcttggacacttactcctactcgttgagcattttctctcaagatagaaactttaatctcaggtttaccactctcataatccctatcaacatcaacgataccttctgttttacttaaaacttccatgagttttaaagaagctttatcaagctcatccagactatcgcctgtgataactacttgtactggagcacttgtgctttcagtatcaaaatcatcaactttttccactagtatagtcatatctttaaaagatttgagtttgtctctataaaactggataatctgctcttgtgtacgtccaactctctgctctactggtttgagtttggcatagattttgcccttgtgaatctctttggcagagttatagccgatagatgagattgagtataggatatctttatcctcttgtatgagggcattgagtggttccatctttgctttcatggtttctaagttgatgcccacaggtgctttgatagtgatttgaaattcgctattatcttgcataggcaaaaagttcattccgacattcaaagaggttgaagcaactaagagaccaacagtagcgattatcgtaatgactttaaaacgtaaaattacttttaatatacgtacataaactttgtcaatagctttgaaaataggctctgttgcatagtaaaatctactctcttttgcacttaaaactctagcaccaacactagggataaacataacagctacaagataagagataacgataccagctgctacggtcatagcaaaagagttaaaaaacatccctacgataccatccataaatgcgactgggataaaaacagccaaaagaaccgatgagatagctaagatagaaaaagcaacctctttgattccctcaaaagaggcttggaaaggagcttgtccctcttccatttttttcatgatattttcaattacaacgatagcatcatcgataaatatcccaatggcaagtgtaagtcctatgagcgttagacgatttaagtcatagcctaaagcatcaataatcgcaaaagttcctataacagaggttggaatcgcaagtgctgagaccacagtcgcagtgaagtttctcaaaaaagcaaatacgataacgatagataaaaatgctccaaaaatcaaatcaaaacgaacattgtttatgttgaccatgattttttctgattggtcttgaagaactttgatttcaaactcttcgcctgctaaatgttgtagttttgggagagcttgtttgactccattgatgatgtctagcgagttttcacctgcaatcttttttacttcgagagtaacaccacgttgtccgttgtacgaagagtaacttttcgcatcacttaacccatcaactataagtgctacatctttgagttttacaccaggttttaccaaaagttcaccgatagcttcaacgcttttcgcatcaccttctgctttgatgataatctcttgggtttgattgatcatctttcctgcgccttgtttgatgttttctctagcgatgatagagctaacttcagaagcactcaaagagtattttgcgagtaaaaatggatcaagaaatatacgaatctcacggtcttgatacccaacgatattgacttcaccaacacctttgatgcgttgaagttgcgcttttaatttctcatctgcaaggcgcattaaagctttgctattatctcccttatcggcgataaaaagactgataacagcacctgaagcacctagtttttttactatgggcttatcaacctcactaggtaggtcaatcgccccaatcttatctcttacatcgtttgttgcttcatccaggtcttttgttagctcaaactgtatggtaacaacactaaaaccttcataacttgtcgacatcagcttatcgatgccatcaacccctgagacagcttcttcgattttgtcagttacttttgtttctactgttgaagggtctgctccattgtaatttgtttgaactgttacaactggaaaatcaacatttgggaaaagatttataggcatggtgttgtaagacattaacccaaaaactataaaagtcaaaacacccatcaaagtagtgataggtctgttaatcgctaatttatacatgggattattccactatgatattgccattgccaaaaagtcctggaagaaggtcttttgctttgacttcagcttgcatttgacgtgtacttgagagtacagttgggtagattttggtgatagtgccttcatggtttttatcacttccatcaactttgtagataaatttttgtcctactttgacttgttgccagtacttttcatcaaacttgagtatgagctttatatcctctacactttcaactgtcaaaagtttcgtttgtgaacctaagacgatatttcctagttcagtcatctttttagaaactatcaaatcataaggagctctaagctctgtttttttgaaaacaatctctttattttttgctgtgagcattttgacttccatatcgtagcgataattctccatctgttctttgttgatgacatcagcgatttttgcatagcggttataaactttttgggcatgttctgcatttttctttgcgatttcatactcatttttttcttgagcattatctaaagctaggagtaaatcccctttttttgcatgacttccaacttctacatgtaagcttccaacgatgcctgagatggaaagtccaagttctgaacttttttcactcactacatcaaaggtagcataaacttcccctgctatgagggcttgatataaaaatacaatagtaaaaaaaacttttttcatgataaacgccttgtnnnnnnnnnnnnataagaatgatactcgttgtaagaatttcaatatcttcactttgaaattcacctttttgaactccttcatgcaagcaagctgagagaaaatcaaagtcttgctcaaaaaagctctcaaaatattttccatacaatcctgttttatcaacgagcatagcacttataaagttttgtaacagtatgagaatttgctctttatcttcatgtgtttcgcactcttcaaaattaaaatacaataaaattttttctctagcactcatctcatcagtaatatttttcatgtatgatttttggtgaatttgagttatcatgtcccaaatagcaaagatgatttcctctttgtttttaaaatagagataaatcgtaccttttgctacacctgcactcttcgcgatagcttccatgcttgtttgctgtatgcctttttcacaaaacaaagcgatagaagcacgagctatatcgtttcgtttttcctctttgtctatgattctagccatagaactccttttatgactgacagtcattcatttttgaaataatacatccaaagttttaatttgtcaagaaaaagtttatatataagaattttttaaagttaaaaatcattattttttaatgtataatattattttatagatttttaaaggatttttatgactaaaaagattctctcattggatttgggtattacttcaataggctacagtatcttagaagaattggaaaataatagatactctttgattgattatggtgtaagtatgtttgataaagctactgataaagatggtaaatcaaaaaaacttttacatagtgcaagtagcagtgcttcaaaacttgtaaatttacggaaaaaacgaaagaaaaatctcgcaaaactttttgaagagtttggattcggagagaaaaactattttttgtatcaagaaaaacaaaatttctataaaaacaaatgggaattaagagctaaaaaagcttttgaagaaaaattgaacattgaagagttgttttcaattctttatgccatagccaaatatcgaggatataaatctttagatacaagcgatttgcttgaagaattgtgtgtagagttagatatatcctttgaagaagaaaaggcgaaaaaagatgatgaaaaagggaaaatcaaattagcattaaaaactatagaaaatttaaaactcaaatacccaaacaaaacagtagcaactatcatctatgaagaagagatgaagaaaaagacccctacttttagaaatcatgataattatagatacatgataagaagagaagatattaatgatgagataaaaaagattatattttctcaagtaaaatttggattgtttgagaaagattttaaagttaatgaatttacttcacaagttatcaaaacgatagatgaccaaaaagaatcatcaaataatgaagatttatttgcaaggtgtaaattttacaaagaacataaagtatcacaccaatactcactcttggctgatatatttaaaatgtatcaagcggtgtcaaatatcacttttaacaaagaaaaaacaaagataactaaagaacaaatcaaacttatacatgatgatttttttgcaaaaatcaaaaagggcaaaaatatcacggatataaaatacaaagatattagaaaaattttaaaacttgatgataatgttaagatatttaataaagaggatggaacattgagtattgtcaaatttcattttctaagtcatctctcaaaatttggagatgtttttaatgccattttagaaaaaccaaatagatatgagattttaaaagagatttttgatgtactagggtttgaaaaatctccaaaaactatctatgaaaagttaaaagataaagtggatgataaaactattatcgaacttatcaaacataaaacaggttcaagtttgaggacatcatcctatgctatggttaagtttattcctttttttgaacaaggatatactttaagtgatataaaaaaagagttaaatatcagcgaagaggagaattatactcattttaaaaaagggataaaatatctcagtctttcacaatttgaaaaagatgataacctttctattaacaaccatccagtcaaatatgtcgtaagtgctgttttgcgactcgtgaaacatttgcatgtaaaacatggtgtatttgatgagatacgagttgagagcacgagagaactaagtcttagtgaagaggcaaaaaaagagattgaaaaagcaaataaggctttagaaaaacagatagacgatattgtttcaaataaagagtaccaagctattgcagagtattatggaaaaaatctccgaaaatacgcacgaaaaatattgatgtatgaggaacaaaacagaagagatatctatacaggagaggggatagagtttaaagatatatttacttctaaagttgacattgaccatatcatccctcaaagtttaggaggattgagtgtaaagcataatttagttttagttcatagagatagcaacttaaaaaaatcaaatcaacttcctatgaattttataaatgataaagaagattttaaaaatagagttgaagatttattcaaagagcgtaaaataaattggaaaaaaaagataaatctccttgctactactcttgaagaaactttcaaagacacttttgagtctaaagaactaagagcaactagctacatagaagcgttgagtgctcaagtgctaaaaaggtactatccatttccaaatcaaactaaaaattctatggagataagacacatacaaggaagagccacatcaaatataagaaaactcttacatgtaaaaacaaaaacaagagatactaacatccatcatgcaatagatgccatcctgatagggcttacaaataaatcttggcttcaaaaactctccagtacttttagagaaaatttaggcaaaattgatgatgaagcacgagcaaatatcaaaaaagctatgccacttatagagggaattgaaccaaaagagttggtagaaatgatagaagagagatacaatgagtttggtgaagaaagtatcttctacaaagatatttttggaaatacaaaaacagtcaatttttgggtatcaaaaaaacctatggtatcaaaagttcataaagacaccatttatagtaaaaaaccaaatgatatctatactgttagggaaaatatcacagctaaatttatcgctttgaagattactcctgtgactaaagcagaagtgtttgttgagagttttaaaaaagagattttaacgaaaatgtatttgtacaaaacaaatccaaatgatgtgatatgtaaaatagttcaaaaaagagcagatgaaatcgttaaacttttaaatgaatttgtttggcttgatgcaaaagataaagaagcgatgagtgaagcaaaaataaaattagatgatttggttcattctccacttattgataacaatggcaatgagatacgaaaagtgaagttttatcaaacaaatctgacaggatttgagataagaggaggacttgcaaccaaagagaaaactttcataggttttaaatcagttttagaaaatgatactttgcaatatgaaagaatcgatgtatccaatacaatagttgttaatggtatttataaattaaaagaaaatgatgatagctttaaagtttataaaaatgatttggtattttttatctatccagatggaggggttaaaggtggaaagatagtaagttttcttgaagataaaaaaatggctgcattttcaaatccgagatttcctgcaagtatttcaaatcaaccccatatatttttgactatttttaatggcaaagcaaatagtcataaacagcattctgttggaaaagccacaggaattataaaactaaatcttgacattttgggcaatatcaaatcctatataaccataggagatgttcaaagtgagcttttagaatttatcaaaaatataaaaagttgacctatgggatggaagatagtacatctctcaagaccctgtaagataaaagttgtgagtgaaaatttattgattcatttttatgatgatgaccaaaaagtaaaagtgactctaggggatatagattttatcctttttgataacacccatttttcgattacaggaactagtttggagctattggctaaaaacaatatcgcagctttgtttatcgatgaagagtttcatccttgtgctatcttaagtccttatcatcagcactctacgatgagagaaattgccgatttgcaagtttccatccctcaagattttcgagaaataatctggaaaaagatagttacatgtaagattcaaaatcaagcatccgtgttagagttttttgtaaatcctacatgtaaagatttgctagaacttgccaaaaaagtccaactgtatgaccaaaatcaagatgaagctcaggctgcaaggttgtattggaaatctttttttaaggaaaaaagttttagaagagaccaaaaaagtgaagatatactcaatagtatgctcaattatagttatgcgatattgcgagcttctgctgctagaagtgtaagtgctagtgggatgttgcctgtttttggtatatggcataaaaacagatacaatgcttttgctcttgtagatgacttgatggaagtatttcgtccagtttgtgacttacatgtaaagcttttgtatgagacaagatataatagagaaaatactttaaaactagaaatcaaaagagacttagcctctcttttgagtatgcaatgtataaaatatcaaactgggatatcttctgtttctcaagcagtagatagcttcataagagagtataaaaaagtgatgatgagtggagaggtggaagccttagcttttccatctattgattttggtttttttgagtatgagtgcatttagagtcatgtggctaatgttgatgtttgatttacctacaaaaagtaaaaaagataaaaaaagatatcactggtttcacaaagaattagaaaaagagggttaccacagacttcagtactctgtatatggaaagatatttagctcttttgattctgcaaattacggtaaaaaaagaatcaaagagtttgtcaaaaaaaatatcaaacatggaaacatcaggattcttgtctttacagataaacaatttgcagcgatggatataattatcggagagccaagtgtggaggaaaaaaacgaaccaaaacagttattattattttaaaagaagggcgagtagccgaagctaccgcctaaggtcggctatcttaaagatagccttagtttaatacccctattaaactagcgtgtgatacaacgcttcaaaattatacataaactttatttaattttcaaattttgggtagaaaatgcacaaaatatcttttttttatcggttttaatacccctacaaactagcatgtgatacaatctactcgcaacagtatcatcacaaggaagtcgttttaatacccctacaaactagcatgtgatacaattgcttataagcaggactgtatttgaacggagttttaatacccctacaaactagcatgtgatacaatgagcctaagtattttgaacttgatgagcaagttttaatacccctacaaactagcatgtgatacaattttacttttaggaagctcaacataaaaactgttttaatacccctacaaactagcatgtgatacaattatgtatagagagtatggaaattcttcatagttttaatacccctacaaactagcatgtgatacaatcttatgccagctcttcatccaagtcgtggagttttaatacccctacaaactagcatgtgatacaataatatcttagaacactagacaatgattctggttttaatacccctacaaactagcatgtgatacaatcgtgatgagatgtatgagatgacaccaaaggttttaatacccctacaaactagcatgtgatacaattgcatatgagaaaacaaatatcgcttctctgttttaatacccctacaaactagcatgtgatacaataatgtgctggtaaagctttatcgtatgctggttttaatacccctacaaactagcatgtgatacaatagaaatcctattcacaatcttaagctaaagagttttaatacccctacaaactagcatgtgatacaatattaatgcaaatctaaacaaagcaagatatgttttaatacccctacaaactagcatgtgatacaattatttttcaaatagttcaaataaagaatttagttttaatacccctacaaactagcatgtgatacaatcttcactcacttgcatagtagtcaaactctgttttaatacccctacaaactagcatgtgatacaattgattggacgaacttcgtcaacttgacctagttttaatacccctacaaactagcatgtgatacaatgaagactgggctaagtatgttatctatgtacgttttaatacccctacaaactagcatgtgatacaatcccattgtaaatcatcaatactttcaagcggttttaatacccctacaaactagcatgtgatacaatcactaaaggcttcaaaatcattactacctagttttaatacccctacaaactagcatgtgatacaataaactctaaatttttgtatttttctaattggttttaatacccctacaaactagcatgtgatacaattgaagttaatgatactgcttatgatactttgttttaatacccctacaaactagcatgtgatacaatattatatctatactaaatacaatcaaccaagttttaatacccctacaaactagcatgtgatacaattaaagtaaatagcaatagtgctgacttctagttttaatacccctacaaactagcatgtgatacaatacatctttttgaaagtattttatttcgtagagttttaatacccctacaaactagcatgtgatacaatatacctttaagagtacataacgccctcatgtgttttaatacccctacaaactagcatgtgatacaattggaaagcctgaaacagctaaatactactggttttaatacccctacaaactagcatgtgatacaataataccactcagcaccctcatacaatggaggttttaatacccctacaaactagcatgtgatacaattgataaaaatggaaatgctgcgaataaattgttttaatacccctacaaactagcatgtgatacaatgtgtataaaatgttccccttgtcaatttaagttttaatacccctacaaactagcatgtgatacaataaaggaaagtaatgacaattagagaactaggttttaatacccctacaaactagcatgtgataatcttgtattggctataggaatgtattttagtagcttaaaaggtttgaaaatgaatgaagaactttatgaaaaagataaaaaagtaagagaatggctttttgttagtacagtttggatagcaacaatagcttatacaatttatgtacatataaaatatggaagtgtatagaaataaaaagagaagttaactttatctttatttaaacgaataaaggttatctttttgtaaccaaaaaacattataaattcacacacatcaaagcaactgcactatcgaagacaaaggagtgagggcatgtttaaaagtaagtcaatcaaagtaaaatttgttgcgtcaatcttggtggtaggtatcgtatcacttgtgggtacagcgatttttgttaattttgaaagagataaaaattatcgacacactgttataaaagagatagatatcttacacaataaagtgaatgatgcgatcgagcaaaaaagagatttggtgcttacaaatgccgtagccatcgcttcaaatgcgatagttaaagatgctttagtgagtgacaataaattgtttttactcgatgaagtaaaaagtttaagtgatacttataaaaacaatacaaactttaaagggattaaactccatattcatgatgcaaatggaaagagttttttaagaaattacgatttgaaaaagtttggtgatgaccttttaaaatttcgctctatggcacgaaaagtacatagcgaaaaaaaggctatcagtggactggaagttggtagtgatggactgatggtaagaggtatctctcctatcatggaaggcaaagagtatcttggtgctgtggagtttttcggtggtgttgggagtatcaatagagattttgctaaagaaggaaaatactttatccagcttttaaatcaagaagcactcaaaatcgctacaaaagcagcttctaatatcaaggtaggagagtatgttgtcgcaaataacaaatggtttccacaagaagatatcgattttgcaaaaagtttagattttgataagttgcataaagatggatatctcatcacacaaaagtatcttgttacaatccaaagtataaaagatatcgatgggaaagaggttggagtgcatctctcaggcttacctttagcagaactaaatgcttcttttgagacaaatgatgccattatgacgacgatgatgttggttttttctgtggttgttttactcatagttctcatggttatagttcttttatcaaaagttatcatttctcctttgggcaagttagaaagtgggttaaatggattttttgattttttaaataaaagtatcgataaaactaaacctttagaagtaaattcagaagatgaatttggcaaactcgcccaaaaagtaaatacaaatatctctaacatagaagtctcactagaacaagaaaaagcgatgatagctgatgttgaaagagttgtaaaacttgttgaagctggattttactcttataggatgagttcacaaagcaacaatccacagttaaacgaattaaagagaatttttaaccaaatgttagagatttcacaaaacaattttgaagatattctctcttctatcttggagtttgcaaa

SEQ ID NO: 1579 - DNA, 14912 bp, synthetic construct
  source 1..14912: mol_type = other DNA
  misc_feature 1..14912: note = Synthetic
ttggagatataaatgttatggaaaatcttcaaaaaagaaaagaagaattagttggacaaataggtgaagatgaaattaaaaaacttaagaaagtgaaattgcttaagttaattcaaaatgaaattcaagagttgctgaattattggaatattaaacaagttcacgaactggttcagaatgtttttaatattcctatatcaagtccattattctataggtattgtgcaaaaaatataaaaaaagatgaaaaaatagttgtatctcaaaaagtagatattaaaaaaagtgaaagctctgttcaaaacattgatgaactgactaactcgactttagattttcttaaaaatctgcctaaaaaataaaggattaaaaaatgttaataactaaaaaagatgcgatgaaaattcttaatgtatcagctactaaattgtatcagctggtaaaaaaaggcaagttagagacttattctcccgattttcctgttaactcaaataaaatttgttttaagaaaagtgatttagaaagatttcttcttagaagataaaaaataaatgaaaaatataaaggattaaaaatggcaagaaaaaatatgaatacgagatataaaaatgtgtatataattaatacaactaaggggggagacgggaaaacgtttctttctttgcaagttctacctgttttatttttaaatatgaatataaatatttttgaggttgataataacaataattcaaaaaaaatgattgaaaattctcaaaaaataaattttaaatcttttaaaattgatgatggattagacgcaattgatgaaatagagtttaacaatatgctatcgcaagatgatgcaattaacataattgatgctggtggcggtgatgacacgctaaagcttcttgatattttaaaagaaaaagagttatttggtttaacatatattatccctttaactaacagcatcacaaatattgataatgctctacaaacaattaattcaattttagactttgaccaagatgcaaaaattaatcttgtcctaaataaatgtccatcttttgattttgatgctattaggcttaaatttaaatcattttttgggaatgaagattttggattaccatcgaggtacgaggagtttgagtgcaaaattcaaaatttaaattatgtaactgagacagatttacctgatattatcagttcaaaacatcaatatgctcttgttgatgcttacataaaagcaaaaattattatggaaaattttgatgaagttaaagctgaatgggcaaaaaaaggtaaagaagagttcttaaaagcaaaaaaattaaatcgaattaatgaggagatttatgactattgtcaaactttaattgagaattttaaattagattaggagtttaaaatggaaaataataaatcaaaaggtatattagttagtgatactcaactaactgatattatcgataaatatgagtttttaatgcttcatttaaatacccaaattacaccaacaataaataaaatgatacaacttcaaaaagaggtacaaaatttagatgtaattttagataaaacaaaaggaattgagacggctttaattcaagcaaatgaaaaaattgaaaattcaacaaatcaaattttgactgaaaaaattgaagaagctgtaaaaattaaaattgatgaaaaatcaaaaattttaaatgaaattattcaaaaacaaaatcaaaaaatctataaaaaagaagtatttataattgctataagttttctgtttttaggtattttaattggattaattggatgttttttatgaaaaagcaaaataaatcaaaaagaatagaaatacgtgtcagtgatgagttttctcaagatttgaattcaaaaattcatgatagtggtttaaaaaaagcagattattttcgtcaaattttatctcaaggtaaagttgtaaaaaaagattatagcagtctagccatacaagtgcgaaaagtcggaattaatataaatgaggttgcatttgtacttaatgttgcaaataaaaaagaagctttaaatatttatgattatcaggctttactagttgagttaaaactaatccaaaatcaattaaacagaattggagcttaaaaagatgatagttcgtgtaagacgtgctaaatcaggattatcaaaatatcttcgagatggaagaaaagctggttcaatctactctcgtgaccagaaagatgtagttactcctatttatggttgtttagatgattttgagagagctgagaattattgtgtccaaaataaaaattgctctgagagttatatgcatataacaattgctttttccgacaatgattggcaaaaaattgaatctttgccaactaaagaagaacaaaatgcactaatgcaagagctagttcaagattttatagctcaccacttctcgggatatgatattaataatgaaataataagttatgctgagttacatagagtaaaaatggcatatgacgagcatggcaacaagagataccctcaccttcatctatgtatatcatttatgaacttattaagcgatacaaaactccgcaatctatttgcaaagaattcatattatgatgaagttatggtgcgaaaatcaaatttcaaatttggatttgaacaaacaaaaagaagagaattcagaatcaagagttttgattctcaagtaggtcgagatagaagagagtggattgaattactagatgatttaaacgaccgagatgaacttatttatttccttgaaaatcaaatgaacttcaaagagggaatagattacagagttgttgatacaaaaaataacaattatgtaaaattaattaacaagtcctataaaacagataaaagtggtaaaaaaatagttcaagatataaacttacagggtaggggttttgaaagatttgttgatgcaaattcaactgaaaaaaatcataaaaaacttgaagatatgacacaacaagagttagaggaaattctaaatgatgtatatgcaaaaagagtcgaagaaattggaaaaagacggagtaaaaaagctacagaagatttaaaaaaaatctatgaagatgatgagcaattaaaaaaagattttgaaaagaaatattcaaaaaaaagtaattataactctttcaaatctttaacttttcagcaaaagattttttataaacactatggcgtaaatatcaaagattctttaaagggttactatataaagactgatgatacagttgaagataatacaacttttatcaatcgctcaaaaggtataaaggttcaagataaaggtgatgaaataatctcttattcaaatgtagattctattgaagaagaagttagattaatgattgacataagtctggcaaagggttgggatttactagagattgaaattgatggtacacctgaatttataaaagaagcaaaaaaacagatttttaaaaaaattgaagagcaaaatcaagttcaggttaaaaagcaagagaaaaaagagctaaaaaaagttgataaaacaactagaccagtatctcaattggataattacatcattgcaaattcttcaaaaatctttgaagcagaaaaaataaatgatattgaatttttaaaagagaatttaccagctcaagtagtgttagagtttgctttaaaaaaatataacatcaattttgatgagtttgaagtaggggatggaaataaaattaacaataaaaccaatcgtcaaaagcctaagtctattgtcgatttcttcacaaaagagattggaatttcaataaaagaggcgacagagatttgtaatgatttaatgactaaacagcctaaaaaagtagttgatatagttaaaggtgaagaaaagttagaagaattagtgcaacaacatcaagagcttcaaaataaagattctaaaaataaacaaattgaaattaaccaagaagaggaggttaaatatcactcaaataaaaataaaaaaagatagatatataaaattaactctcttttttatcacgatgttttttattgtattggtcgataaattttcttaattctttatttgtatcagagttttctcttttgcaaagtttgataaattcatcccaagcatcttgataaacattgaatgtttttttaatgtattttttttcttccaattcagtcctttttttgattgtaaatattataacaaaattataataaatcaaaaaatgaatcaaattaatttaaataaaaaggttttaaaaatgatgaaattaagtaaaaagtttgttttagctttaggttctattttaattacaaatagtttatttgcgattgagattgaaaatttaaaaaatagtgagaatgaacaaataaaggtaactcaaaaatgcacaattgaaaatgaatcaaatgattttaaaaaagctctagtagaaaaatatgaagtatattttacaactccttatcctatgtattttgataaaggctttgtattaaatgacaaagtttatatttttgataaagatgtaaaaaatccaattgaaaaaatggattatacattttgtaataccataaaaaataaaaatagtatcaaattatcaaaagaacttactaatttaatgtttgaatattataaattaaataagcaagtagttcaacttccaaaatacctaatcaaatttgaaagaaattcatttgtaattaaaagtgttgataaaaagacactaacagagttaaatcagttaattgcagaagctattagaacttatagataaaaaaaggaattacatgagaataaataaatatccattttttctatggcttactcaaagtagagaggattttaaattagattttaaaaatctaaaagtatcaagcgatgatgttggagaatcgtcacttaaaaaagttcccatatattttatagctttactgagatatttgcctttcttatttgttttaccttatttatattatccaagtaataaaaatgatttaataccttttattggagcatttgtagttgttataagtatgttatttgtttatttaaaaacaaatctaatcttttttaaaacctacgtaataactatttgtattgtaaatgtagttttaatatttttaattaatgattatgctgtttttttagatattggaattactttttttgcagaaattggaatttttgcaattttatatttagatattttttatttcaaaggttataaaaattggtattttttggagaattttaaaaatgagattgatattaaatttgccgaaaaaaaacaaagaaaattcctatttttcttaaaaccaaaaactggatttaatatctctaaaagattttatgttaaaggttatttcttaaggattgaaaatgaagatgttaaataaatttactattacggttttatttttaaatagtgctattttcggagctgatactactacacctgaaacacaatttacaaaaggtgtaaatgaaagaacatcttgtcaagttgagtgtcctccatttaaagatggtttttttggaagaattgctaattttgagtttgaaagtggtgcaactacttgttatatttattctaaacaatctccacaaacagcgataggaaaagtcgtaaatataaatcagcattgtgcaaaaacgatgttaaatcctgaatcagtaaatgagattaaatcaaatactagtacagtaaatagccatttattcaccttaaaagataaattaaatgacctttatactaatgctggaacaacaaaatatataaatcttccaaaatatatggttgctggactgttggcagatgaaaaaataattgatataccaatatcaataactacaaatgaagttactttaaatagtggatatacaaatacacctaatcttgttagttcagatttagtaaatccaatactaatttcaagaacagtagatgctctttcaaattcagttacctttattattaattttttaagttcaagtgacaagatattattgtcattaaaagtaatgttatttttatttgttggtgcattatcaatactcttagcattatctgaacaaactacaaaaaagatttcaaaacttcaaaatcatgaagatatagctcaaaaagtttttttaggtgtattttctttaatagtattcttttttagtgtaaataaaatagaaacaacaactggacaattatcacaaacagggtatcaacaaataattagacctttaatgtatttaggaattaatacagctgataaattaactgaaacagcaacatcatctgttttaagatataagtttgctggggtaggtgtaaacttacaggaggattttcaagctttaaaagatttagagtacaaagaaagaatcaaaaacaattattataaaactcttttgaatgagtgtaaaacttattataatactgatgcaacatctcattatgtaagtcttttaaattcaaatactttatttccaccaagcgaaatcatctatacaaaaggaatagccgaagaagaaaaaagagctattaatttttatacaagaggaatgatgaatggtgaagcatatttaacacaaaatgagattccagcagtttcatattgttatcaaattgaaagagcttcttataatagtaatgcttttttatcaaatttatcttttaaaatagaaaattataattctgcagtttctactcaaatggaaaataaaatcaataaaatagttgatttaacatataaaaatatatctgaattaggttttgtatctattgtaaatcttggaactacggtaatggcttttgatactttttcgcttttaggaaaaaatgaaaataagcaagaaaactatgagtataagctagaagagtttagaaatcaaagtggctatgatattcaaggttttgctaagcctgaagaagtaggtggtattacaggtctgattaattcagctacttatgaagttttaacaaatgcaccttattatgcttttgttccgtttgcagataatatactaaagtatattaatagagtttttaatccagtaaaagaatctattagtgcttggacttctggagctgaaacaattttgagtattatgccttttactagagcatttcctaaagttctaaccataggaataaatgcagtttttgattctattattggtatgcttacaatatttttattaaaaagtataattggagcattacctttaattgcaataattggagctggatttttagttataactttttactttttaagtgtagagatactttatatagtaattccatttgcctctatttttgctttttcgactggtaatttggacatcattaaaaacttaataaaacatacatttttattagcattaaaacctattttgattgttttttcagtaataatggcgttatttgcttatgatatgttaaatagtttaaatcaagttgttgtaactggtatgtttgaaccattatttatgttggctaatgatattcaagctgatagtggttcaagtcctctttttataactggagaaattgcccctagtcatggagcaggagcaattttattattcttaaaatccactcttatcttagcaacttcatttattacagtatttgtatgtttttatctagtatttaatggagctaatattatgttagatattttaggaatgagagatggtgggtttgatgttggtggagtgattggtgataaagtggaatcaaaacattctattgcaaaaatgaatacagtagtttaaaaaactgctgtatgtttcatataaaatactaaaatattattgtaataatatatttattttgttataataatattataataaataggaggagaaataatgaaatttttaaaaatattaagccgatatttactgattcaagctcaaatgattaacttaaaaattattgctttatttggatttataataccattgattttatctcttttgagtatttttaaagacgctagagtaaaacaaggagatactcaaatgagtcatcactataatttattaaaagagtcaggctttattgattcttttgcaaatttatttagtccttttttagagttttctgcatctttttttgatttggaacaaaaagaattagcaacatttattattgctggttttttgtttggttttgttcttttacaaataattatacatttagtttggatagtttttgaaataactctttactttgcaaaaaagaagaattattttgaaacagaaaaagagcttgaggaatatatgtatataaaaatcttcaaaaaaaacctaaatgagggattttggagtgatgctgaaaatagtaaaaataaataaaggagtttaatatgtctataattgaagcaattttaggagtttatggtactaacttaaaaaaaagtattaaagtaggtgaagatgaatttccagcttggtacattgaaggtatttcaaaagatgaacttcaagaaaaatttacaaatgaagaaattgaatatatttattttcatgcaatttagaaataaaatctgattttctcagaaacaaaaaaagcataaagaatataagcttgatttaaagagaaatcagaaatattttattagttgaaaattgtaactacatatcttatggaaattcatacatatgctgtggaaaattgtacagatattatggaaatataaaagaacagattttcaattaaatttgcacacattaatttggagatagacagatgtttataatagaagaaaaagataatataaaagttgttttaaacataaactcaaaaaaaaataaaaatttagaatatgttaaaaacagaattaatgatattgtcgatgagtttaatatctcgctttttttagatattaaaatagataatttagttccaaaagatgaagtaagagttgaatactattcaagagcttctgcaagtgaaaaaattggggataactatttattttttttagataagtttttggatttaggtgctgaaaaaaacataacaactttacctatggattaaactgctaattcacatatactgtggaaaaaaggaaaactatgcttaataatgaaaataaaaaaaaactaaatgaattagaaatctttaaagataaagtagcttttgaatttaaagatggttggactgatttaatttatgaacttggaaaagatattacagaactttgtgaattaaccaattgtgaattaccatatattcaacaaataaaagagaaatttggaactttaagattctattgcaatatgagtaattttaattatcctgattcagttaaaaaaagtatcagggcattaatttcaatagctgaaattaaatctgctaatgtttgtgaatattgtggtaaatatggggaaacaagaactaatggaattgtttttacttcttgcaaagagcataggttagaaaattcaattacacttgaagaatatagagttctaactgaaaaaagatataaagatagatttgctcctgaatattctatttaaaaagagtaaattttaaaataaaacactccaaaatagacaaaaaggtatttgaaactgaatcactaaaataaaagtgattcaagaggtgttttactcttgccttatagcatttttttaatttttctaaaatcaaatatttttcttcaataaaaatataataattgataattttgtataaaaagatataattttagataaaaaaagataaattttaatagatttgtataattagaaataaattagtagaattaagtataaaaaagtataaaactaaaaatacttaaaaaaacaaaataggcacatcgaccaatcaccgtacaaaaatcgcatacgctaattttgagtgattgatgtgcttcaagggattctcccttaaaaaaccctaatatttgatgtcaaacaaaatctgagaaattgtttatttaataaagaggctttttattgttataataaacaaaataataaaggataatcttaatgaaaaaaattttgtcacttgatttaggtataacatcaataggctattcaattttaaatgaatttgaaaatgataaatactccttacttgattatggagtgaatatgtttgataaaccttatgacaaagatggaaattcaaaaaaagtaatacatagtcaaaatacatctactacaaaactttatagtttgagaaaacaaagaaaaaaaaatctagcaaaattatttgaggaatataactttggtaaaaaagataattttttaaatcaagaaaagaaaaatttatttataaataaatgggaactaagagcaaaaaaagcttttgaagaaaaattaacatttgaagaacttttctctattttatatctaatcacaaaacatagaggttataaatctcttgatacagatgatttacttgaagaattttgtgaaaagttaggtttaaatcaagaagtaaaaaaagaaaaaaacactgatgaaaaaggcaaaataaaacaagctttaaaaattatcgaaactttaaaactacaatttccacataaaactattgctcaaataatttatgaagaagaaattaaaaaagagaatcctactttcagaaatcatgataattataattatatgataagaagagaatatatcaatgaagagataaaagcattagtttcatctcaagaaaaatttggtttatttgataaaaattttgattcaaaagcctttattgaaaaacttataaaaacaattgacgaccaaaaagaatcatcaaatgatttgtcattatttaaagattgtgagtattttaaagaatataaagtagcacatcaatactcacttttagcagatatttataaaatgtaccaatctgtatcaaatataacttttaacccagagaaaataagaattacaaaagagcaaataaaattaattgccaatgatttttttgacaaattaaaaaatggtaaaaatattactgatataaaatataaagagattagaaagattttaaaattaagtgatggttttaaaattttcaataaagaagatagttataaattaaaagatagaacacaagaaaatattatcacaaaatttcattttgtaaacaatctttcaaaatttaataaagattttattgaaaacattctagaaaaatcaaataaatatgaaatattaaaagatatttttgatattttaagggatgaaaaacaaccaaaaccaatttatgataaattgaataacatattttcagaatatgatttgataaaagatgaatctattaaaaacaatactatcctagagctaattaaaaataaaactggaagtagtctaagtatttctcatcaagctatgatacatattattccatattttgaagatggttttactattgatgaaatcaaacaaaaactaaatttaagtagagaagaggattatttatcatttaaaaaaggaattaaatatttaagtgttgcacagtttgaacaagatactaatttacctataaataatcatcctgttaaatatgtagtaagtgctgtattaagacttataaaacatcttcatagcacttttggaacttttgatgaaataagagtagaaagcacgagagaattaagtcttaatgaggaatcaagaaaaaatattgaaaaagttaataaagaaaatgaagccaaaataaaagctattttagaaaatcaagaatatcaacaaatagcaaaaaattatggaaaaaatcttgaaaaatatgcaagaaagattttaatatgggaagaacaagagagatttgatatttataatggtaaatctataagttttggggatatattctcaaatagtgttgacatagaccatatagtaccacaaagtttaggaggacttagtgtaaaacataatttagttttagtacatagagatacaaacttacaaaaactaaatcaacttccattaaattttataagtgataaacaaggatttacaaatagagttgaatatctttttaaagaacataaaatttcatggaaaaaaagaaaaaatttattagcaactaatcttgatgaaatttataaagatacttttgaaagtaaaagtttaagagctacaagttatatagaagctttaactgctcaaattttaaaaagatattatccatttccaacgcaaacaaaaaattctatggaagtacgacatattcaaggaagagcaacatcaaatattagaaaacttttaaatgtaaaaataaaagtgagagatacaaatattcatcatgcaattgatgctattttaattggacttacaaataaatcttggctccaaaaactttcaaatacatttagagaaaatatgggggtgattgatgatattgcaagagaaaatatcaaaaaaacaatacctcttattgaaggaattgaaccaaaagaattaattgaaatgatagaagataactataatatttatggagaagattctgtattttataaagatatttttggaaaaataaaagctgtaaatttttgggtatctaaaaagcctatggtttcaaaaattcataaagacacgatttatgctaagaaaccaaatggtttttatacagtaaaagagaatattataaatcaatttatagctttaaaaataaccaatactacaaaaacagataaattttatgaagatttcaaaaaaaatatattagaaaaaatgtatgtatatatgactaatccaaacgatattatttgtaaaatagtagaaaatagggcagatgaaattaaagagttattacattcttttgaaagcatagataaaaaagataaagaaggattaacagaagcaaaacaaaaacttgatgaattaattcataagccattattagataacaataacaaagcaataagaaaaattaaattttaccaaacaaacttaacaggttttaatataagaggtggattagctaccaaagaaaaaacatttataggatttaaagcctttttagaaaacgacaaattatcttatgagagaattgatgtgttaaattatcaaaaaataaaaactcaaaatgataatagttttaaagcttttaaaaatgatattgtgttttttatttttactgatggtaattattctggtggtaaaatagttagttttttagaagattcaaaaaaaagtgcatttcaaaattcaagatttccatcttctttaaaatatcaaccaaaatcattttgtgaagttgataaatttgaagtacataaaaaaactatgccaaaatctataggtaaagctattggaataatcaaattaaaccttgatattttaggaaatataaattctttacaaacaataggaaatgtacaaagtgagctttatatctttttaaaggagcttaaaaatgggatggaaggtaatacatttaacaaaaccttgtaaaataaaagtaaaagatgaaaatcttttgcttacttttttagatagtgaaaaagaagagagtataaaagtaactataaatgacatagattttatactttttgataacactcagttttctatcacaggaaaagctgttgagttattatcaaaaaatggtattgctactctttttatagatgaagagtttcatccttcatcaattcttgttccatatcatactcatacgcttttaactgaaatggcaaatatccaaatatcaataactcaagaatttaaagccaaagtgtggcaaaatatcataaaatctaaaatatcaaaccagtcagcaactctaaaatattggaataaaaaagagtttttagaactagaacttctaagtcaaaatgttcaattgtttgattctaacaatgatgaagctcaaagtgcaagaatttattggaaatcactttttacaaataaaacttttagaagagaacaagggagtgaagatattatcaatagtatgctaaattatacttatgcaactttaagagcaacaatggcaagaagtttaagcacatctggatttttacctgtgtttggtatttggcatcaaaatagatacaatgcctttaatctagttgatgatttaatagagccttttagggctttttgtgatttttatgtaaagcttcttttaaatactaaatattctcaaagtttatatttaacaattccaataaaaagagatttagtgagattactaacctttgaatgtgtcaatataaataaaggaaattcaaacttgagtaaagcaatagaattatttgtaaaacagtataaaagagcagtaatagctgatgatatatcattaattgtttatccaagtataaatgaggaattttttagaaatgagttcttttaatattatgtggttaatgttaatgtttgatttaccgacaaaaacaaataaagataagaaacgttatcattggtttcatgatgaacttgaaaaagaagggtttatgatgttacagtattctgtatatggaaagatttttagttcccccgaatctgcaagttatggtagaaaaaggataaaagagttcataaacaaaaatatcaaaaaaggtaatataagaatgcttatgtttacagataaacagtttgcaaatatggatataataattggagaaaaatcaacagaagaaaaaaatgaaccagtacagttgctattattttgataaaaaaaggggataatggaaaaccattatcctaaagtcagttacgaaaaaaatcgtaaccttagtttaatacccctattaaacgactataccttacaacttgtaagaactcaattttataatctatagacttaaaattatataaaatatacaaattccaaaatttctttaattttttatcagttttaatacccctataaacgactatgcgttacaatgaaaatgaggaaagaacatacatcaaaatagttttaatacccctataaacgactatg

SEQ ID NO: 1580 - DNA, 13198 bp, synthetic construct
  source 1..13198: mol_type = other DNA
  misc_feature 1..13198: note = Synthetic
gttttacaatttttgaattctttaaaactcttagttgatgagaaactgctgattggcttacatttataagctcactaattgctccaacacataactcttcatcttttaacacagcaattatttttattcttgttgtatctgcaaaagctttaaacagttcagcaacatcataaaaagtttcatcacaaactaaaatactttttattttttctacttctttggaatggtcacaacattctaatcatattctgatctaaagaaaatgcctagcactctaaaagagtgtctagacttcaattacttttataattcaaaagaaccttttgaatcacgagtaactccacctgtcattacattatatgtaataagatatttatattgacctttttctataagtttaacatcaaaagtatagtttcttttatcatttattgtattacttttgtattcaactatttctccatttggtttatataatttcaaatttacatttactccatctaatgatttagttttataaagaattttaacgttaaattcattatctcccaattttaaatcatcataaacttttacatgtacactataatctttagtagtttgttgtgataaatatatctcttttgcatttagagataaacttcctgttaataaaattcctaatacaagtagtatttttaataaattcttcattttttatccttatttatttcaaattaatttcttattttgttcaacattttctgatttttcataaaatataagatatgttgaaggcaatattaaaagagtaagtattgtagaactaattactcctccaacaacaacaacggctaatggatattggatttcactaccaacgcctgtagcgaatagtaagggtaaaataccaaataacgtagtaaatgcagtcattaaaacaggtcttaatctgagtaatgtggcatcttttaacaatattttcaatttagtgtgtggatacttatctcgtaattcatctataaaactaactaaaactattccatttaaaatagctattgcaaaaattgctataaatcctacaattgctgatacagatagatatacgccactaattgacaatgcgataatagctccaattaatccaaaaggaacattaagcaaaattaatcctactttttttatagaattaaatgccatgaataaaagtaacattacaagtaatatggttaatggtataattatcattaacttattagttgcttcttgcatatttttaaaatctcctacccaagatatataatagcctgatgggatggaaatctcttttttaataatttcatctgcttctttaacaaatgaagcgatatctcttccatctacttcaattgataaaactaaatacctatttaagtcttctctttttataaaagaagctccttgaacaacacttatttcacaaatttgttctaaattaacaatagaacctgaagaagaacgtaaactgatttttttaatactatcaatatcttttttagcatcttttatttttgcaacaacaccaaaacgtttaataccttcaattttttcagtaatttcttcttcacctataccatttttaattacttgcattacttcatctatattaattccatatcttgctaatgctatataatttggttcaattttaatttgtgattgtcctaattgtgattctaattcaattccctcaacaccattaacattagaaattttttctttaatttcagtagctattttgtttaattgttcttggtcttctccaaaaaccttaattgccagttctgcttttacaccttctaataattcttccactctcattgctattggttgtgttggagtaaactgtaaataattaaacttttctgaaactttttcattcaaatcattcgttaatgattctaaattattaattttcccatttaatgtaagtaatacttccatataattaggttgagctgtttctcctttttcacttcttcctatcatagataatactgatgttatctctttaggatattcttgtaaaataaatttctctatttcttgtgctgaatttattgattgtgaaagactagttccaggaattgctgtaactctaaacataattgattcttcttttaaagtaggcataaattctcgaccttggaacatcagtaatattacgcaaaataagaaaagtgtaacaatacttataaccaacttttttgaattatttaatgcagtcattaatataggactataaaaagttttaatttttcgcataactatattatcagtatgttctgttctttttaataataataaacataacacaggaactaatattaatgcaacaattaaagatgcaatcattacaaatacaatatttaatgccattggtttgtaaagttttccagctagaccgtctaaactaattaagggaataaatgcaactgcaatcactaatatggcaaaagttactggagtaacaacttcttttgcagctagtgttactatttctaattttgtcaaatgctttgaatcactacttaattttctaaatgtattttcaacaattactacagtcccatctactatcattccaacggctatagctaaaccacttaaactcattaaatttgcactaagcccataataatccataaaaagaaatgcaattaataatgataaaggaagtgatataacaacaataaatgctgaacgtaactcaaataaaaataggaaaagaataattgttactaaaataattccttctgtaagagctgatgacattgtatcaacagcttttaatgtaagctctgttcgatcatacataggacgaatttctacaccttgaggtaaaacactatttaccgtttgaactttttctttaatttttgaaacaacttcagctgcattagtttgacttctttgtaaaatcattccaataacagattcatttccatttattgagactgccccaaatcttggttttgaactctcttctacacttccaatatcttctatagtaatagcttgactattttcagatttaattacagtttttttaatatcctctattgatttatataaaccaacacctcttattagatattgttctttattaaattctagatattgtcctcccgcaacttgattgcttttttgtagggcaataacaatatcattgtaagttatatttacattttgtaattttttactgtctactaatatattatattgcttttcatctcctccccatccaataacatcttcaacacctttaacacttttaaacaaaggtgtcactaaatattcttgcatttctcttaattcttttaaagaatatttgcttgttttatcatacagttgataccagaatacttgacctaaacctgttgtatttggacctaatgtaggttttccccaagattcaggaatatcaaccgtagataatctttcatttacaagttgtcttaaaaaatatatatccatattatcttcaaaaaaaacggatacatatgataatccaaaaattgaattagacattattgtttttactcctgccattccagccatagctgattcgataggatatgttattaatttctcaatatcttcagcagaatttcctggactttctgtatatattactacttgattaggcgtaatatcaggaaaagcatctacaggaattgatttataagcttttattcccattatactaattataataaagaatataattaccattaatttatattttaacgaaatgtcaataattttttctaacatttaatctcctaatgtccatgtccgccaagagatgattttaaaactatagatttaattttatatggttcatcacttacgtattcttgattgtcttctacaccttctactgccacatattcatcattctcttgaataatctttatatctaatggcttaaattcttgtacattgtcttcttctttatgggaaacttctttttcatcatgtttttccttatttggtacaaaaattacccattcattattcataaaagataaggcagattttttaactgaaataaattctttatcagtttcataatataaaattgaccccaaatataaattagaataaagttttattttttcatcttcaatactagataaaacaataattctttgagttgattcatctaattctggtaaaattttttcgatataacttattatatttttaccattgaaatttgttgaaattttttgaccaggttttaaatattctgaatatgctattggtaaataagatttaaggtaaaaagatttctctttgacaatagagacaatttccgtatctttagataccgcagaatattctgtttttagaagtgatgatacgatacctgagttgtgagcaaataatgtatattcagatatcgtattttttatatcttttacttctatgtctaaagtttttagttgagaaataatagtttctaatttggcagaaatatcttttctttgaatatttaataaatttaattcttgtttcgaaacaatatctcttttatttaatattaaattaccattataattttcttccatacttttaagttgttcttttaaagcaagatattctgctgacattctcgataattcgatagattgaataagcgcaactttatctcctttttttactaaatctccttcttttacataatatttaacaatttttccatcaagtgacgccattaaagattgttttgatgatggtagttgtataacttttgaatttaattccactgatttgccgaattttcttatttgtgcattttcaagagttatttcatttgaaaaagcagaatttaagaaaaataaactgataataattattttagtcattatgttctccttggatataattaattgaaatcgcattttggtttaatgctgtttctatgttaattatatctgtcatagtttggataagttttatttttgaattttgaatatcaaatatagaaattttaaacatctttaatttttccatagatatttctaaagcatctaattgaagttttaataccgtttcgtttttcttttttaaatcttctaacaaaactctttcttttacaagtttttcatattccattaaagcttgttgtttctctttattcaccaataaattcattttcattgcttctaattttgcaattttaccttcctctgattttatattaaaaataggtaaaggtaaactaattcccacttgattaactatctgatcaggttcttcactataagaatatattaggtcaaatgaatctataatatttgaatctaatttagcttcagctaacaacatatcttttttactttcttctgaattaataaatgggttcttttctaaatttatactcttagtgattttaaatttatagtcactttctaaattaaaatgtatttcttggtcaataccagaaaatcttattaaatcataataagtattcattatttccaaatttaattcatcttttttcttttttatatccattaattcaatttctgattgtaataattctgcttttgagatagcaccaactttatattgttgatttgaaatatcatatactttattagcaatgtcttcagattcttttattacattaaaaaatttcttatttttagcataaattgtatattttatagataactctttaatgaattcttgtttatcaagattatatttatccacttcatttttaatagtggtttctgataaacgagttttatcattagctacattccatggaactattttttgcgttaaactaaccccatatccattatctttatttatttgttctttgaacttataatttgaataattaagatctattgttgggttgttaaatcttgttaatattgaacctttttcttttactaaatcaatctcgatctctgatgattttagattcgaattcgattcaatagctttatttaataaatatctgaaatcttctgcatttaatatttgtgatgaacataaaaatatcataaaaacagaaaataatttattcttaatcatttattttccttatataatttagtattagttctatttaaaagaacttgattatgaaaataaattaaacagtaggtggtttaagtaaagggttcattataagaatagagtaatttgtataatcagtataaaattctttgataaaagtaattgtataaaaatcactttctatattcaaataggaattatgaatttcatgttctaaaatacataatgaatgatttttacatttttttgaattctcattagtcaaggcagtagtctttattgattgattaacaatatttttagactcattatcgtaaactttttcgaatgtaaactcattaaaagaatgataaaaaatagagaaaagtgcaaaaataaatacaaatttacgaaacgtatttttattattcatatttatcctttgcctaaattgtatactattctatattaatataattaataaatagttaatgttttaaaaaattattcataaagcaaaaatttctataaaatatttagttttgacaaattgtattttataattttatataagtttaaatcggggattcttgtcgtaatgtgaatttaaaatttttatttattcaagaatatataccaatttagataccatatcaattatctaaatacaaaatggaaaagaactataacaaaattagtaattcaaatattaaaaaatactaagttataattccaaaaaaacatagttacttactttatagtttttataaattcataaaattttgtggcaagatacaataagaatgttaataagttttatgtattaatctactttaacaaaattattctattctaagttataaaatgtatttgaataaaggtttagcaaatgaaaaagctattgtctataaatttaggtattacctctattggttattcagttttaaatgaactagataatgataaatactccctaattgattatggtgttaatatgtttgatactccttatgacaaagatggaaattcaaaaaaattaatacatagtcaaattaaatcaacgaaaaaactttatgaattaagaaaagaacgaaaaaagaatctctcaaaactttttgaagattttggatttgctaagaaagaagattttctaaatcaagaaaaggaaaatctatttataaataaatggggattaagagcaaaaaaagcttttgaagaaaaattaacatttcaagaacttttttcaattttatatttaatcgcaaaacatagaggttataaatctcttgatacagatgatttacttgaagaattttgtgaaaaattaggattaaatcaagaaaaaaagaaagataatggaaaagataatgaaaaaggtaaaataaaacaggctttaaaaactattgaaaccttaaaactacaattccctcaaaaaacaattcctcaaataatttatgaagttgaaatacaaaaagaaaatccaacatttagaaatcatgataattataattatatgataagaagagaatatatcaacgaagagataaaagcattagttttatctcaagaaaagtttggtttatttgataaaaattttgattcaaaagcttttattgaaaaacttatagaaactattgatgaccaaaaggaatcatcaaatgatttatcattatttggaaattgtgaatatttaaaaaatgaaaaagtagcacatcaatattcattattaggtgatatttataaaatgtatcaatctgttgccaatataacatttaattcaaatccaactataaaaatttcaaaagaacaaattaaattaattgctaatgatttttttgacaaattaaaaaatggtaaaaatattagtgatataaaatacaaagagattagaaagattttaaaattaagtgatgattttaaaatttttaataaagaagatagttataaatctaaagataaaacacaagaaaatagtattactaaatttcattttgtaaacaatctttcaaaatttgataaagattttattaaaagtattttagaaaaatcaaacaaatatgatattttaaaagaagtttttgatgttttaagggatgagaaacaaccaaaaccaatttatgataaattaaataacatattttcaaaatacgatttaataaaaaatgaatctatcaaaaacaatactattttagaactaatcaaaaataaaactggaagtagcttaagtatatctcatcaagctatgataaatattattccatattttgaggatggttctacgattgatgaaattaaacaaaaattaaatctaagtagagaagaggattatttatcatataaaaaaggaattaaatatttaagtgttgcacaatttgaaaataacaataacttacctataaataatcatcctgttaaatatgtagtaagtgcagcattaagacttataaaacatcttcatgttacttacggagcttttgatgaaataagagttgagagtacaagagaattaagtcttaatgatgaatcaaaaagaaatattgacaaagtaaatagagagaatgaagcaaaaattacagctattttagaaaatatagaatatcaacaaatagctcaaacctatgggaaaaagcttgaaaaatatgcaagaaagattttgatatgggatgaacaagagagatttgatatatataatgggaaatcaataggctttggagatattttttcaaatagtgttgatatagaccatatagtaccacaaagtctaggtggacttagtgtaaaacataatttagttttagtacatagagatacaaacttacaaaaattaaatcaattaccattaaattttatagctgataaacaaggatttatagataggattgaatatctatttaaagaacataaaatctcatggaaaaaaagaaaaaatctattagcaacgaatcttgatgatacatataaagatacttttgaaagtaaaagtttaagagctacaagttatattgaagcactaactgctcaaattttaaaaagttattatccatttcctaatcaaacaaaaaactcaatggaagtaagacatattcaaggaagaactacttcaaatattagaaagcttttaaaagtaaaaacaaaaataagaaatacaaatattcatcatgcaatagatgctattttaattggacttactaatcagtcgtggcttcaagaattatctaatacttttagagaaaatatgggtgtaatagatgatgtagcaaggcagaatattaaaaaagtaatcccacttattgaaggaattgaacccaaagagttaatagaaatgatagaaaataattataacgcttatggagaagattctattttctataaagatatttttggaaaaacgaaggctgtaaacttttgggtatctaaaaaacctatggtttcaaaaattcataaagatacaatttatagtaaaaagccaaatgatttttatactgttaaagaaaatattttaaatcaatttatagctttaaaagtaaataatgatactaaggcaaataaattttatgaagattttaaaaagaatatattggaaaaaatgtatgtttataaaacaaatccaaatgatgtaatttgtaaaattgtacaaaatagagcttatgatataaaagaattattaacttcttttgaaacaatagataaaaaagacaaagaagcattaagtgaagcaaaacaaaaacttgataccttgattcataatcctttattggataacaataataaaccaataagaaaagtgaagttttatcaaacaaatttaacagggtttaatataagaggtggattagctacaaaagaaaaaacgtttataggatttaaagcctctttgaaaaatgataaattattttatgaaagaatagatgtggcaaataaaaataatataaaagataatgatttcttaattattaggaataatttaatttgtatcaattttaaaaataaaaatttattaggttttgttgaatcatttgatgaaaatactaacaaaatcagaatgtatgattcaagatatcctaaaagattagaaaatcaacctgaaagatttaaagtagcaagtggcaaaggtagaaaagaatttggaattgcaggtgctattggaattataaaactaaaccttgatattttaggaaacattaactcttatcaaataataggcactatacaaaatgaactttatagtttttttaaaaaacttaaaaatgataaaggaaacttacctatcaatacttagaactaagtaaaagataaaaatcttctcggacaagtacatctcttcccaaaaacaaacttttagaatgtaaaataatttgcttaatctcttaaaatataagtaattttttcctttgaataactttagttctctttcccttcacaaaaggcttaatatctttttgatgtattcatacgtatttgaggttatgaataattgtcacaaaatcataaaaataaatattttaataagacttccatattttataacttaaggttgtaagtaataagaattataatatgattacttctatttatccaaaaaaggggtgatgaaaatcatcaccctaaagtaagttacagatttttgtaaccttaatttaataccccatattaaatgactttctcaatttaaagcaaaatttattagaaataagattaaaaaaatagctcctaaaaagaaaaggttaaattcctttttaggagctatttttttaatctttgtatagaatatatacaataaaagtatttataatttgtttatttactgttataatttttttgttcttctaaaataaatctttttcagtaatgaaaatttttataaataataataaggaaatattatgaaaaaattaagtttagtagctttattggctctaggtgctctgggttctgtatcaacaatacaagcaaatgaattggaagttagtggtaatattggagcagcttcaaattatatttggagaggtatgacgcaaacaaaagataaatcgtctgttaatggtggagctgacttaaaatataatggtttttatgcaggtacttgggcttcaaatgtagattttggtacacaagcaaattttgaagtagatgcatatgctggttacagtaatacaattaatgatctttcttatgatttttcttatactaaatatatgtatcctgattcaaaagatgaatcagattttgatgaagcaaaacttgcgttaggttatactcttggagatttaacattaggtacatcttattcacaagcaatgtatcaagaaaaaggtggtcataaaccattttatattgaaggaactgcatcatatgactttaaaatcttaagtttagatactagctatggggattatgaagatgtaggaagtaattatacagttggagcaagtaaatctgttaaagtagaaggacaagcaattaaattggcacttgtttatgcttcatttaattcagatgattcaaatttactaccaaatgaaaagaatttatttgtaacagcaaaatattctttttaaaaaatgcatgagttgactattaaagtcaattcatgtaaaaataaaacaactactttttacttgccatgataaaaaatagctcaaaagaagtataggaaacttcattactatagttatttataaatatctgtaaaaaacttccaaatttcaaatcaaataatgtagtaaataacgctattaagttttataatttatttaattcttgttgcaataaatcgaaaaagagtaaataaaatgagaatattgttgataaaactataggtttatgtttaaagatgtttaagtaaagaattatattttaatttattatgacattaaaggttcatcatgtctcttataaagattataacttcaatccaaaaaaaagagtttgaagaaccaccaattctaaatcaagaattaaaaaatgagatttttaaattaccaaatgaattagaacaacaagtttattcttttaataacagtaacaatcaaattcattttattttaatgtttggatatttcaaaatcgcacataaattttttgattcagctacatactatgaggaagatattgaatatgtaatttctaaatttaaacttgatgataattcatattcatctaatattgcacaaagtactctaactttgtataaacgacaaataagacaacatttttcttgtgttaaatttacttcaaatatatatgaaattcttcaaaaagaatcagatttgttagtaaaaaagctactaaaaatgcaagatattttttatttattagtagaaaaatcaatggaattaaaaattgaaattcctagctatacacaaatagtaactattgtttcatcatcaattaacaaacaaaataccttagtttataaaaaaatcagaaaatatgaaaaccatgaagccttaaaaaatcttgattatcttttaaaagaagatgtttcaaatccaaccaaatatgttcttggtaaatataaaagaattttacactcagttaatgctgctaaagttagacaatctaatattgattttagatatttaaatgatttatcaaaacaacttgaacctattttaaaagagctttcattagatgataatactattattcactatgcaaaatgggttgaaaaatctgatatgcatcaaattagtagaaaagtaaaacataaacaatattttgatttgatatgttttgtgctacatcaagtaaaaataagaagtgactatttgattgatatttttgtacaagtgatgcaatcaataaaacaaaccacattaagagaacaccaaacaatttattatgatcaaaaacatagtagaacaaagaattttaaagacttaacacaattcttacaaacagaaattattccaaatatattaaatttagaatcaattattaaaaatgatttctcaagtgatgataaaatatcatttatagagaatataattacagaattaacaaaaaatgaagagtttcaaaaaataaaatctattgattttaattcattaaatgaagagacttccttttatgatatgctagagaataactcttcaaaattacaaataagaatagctaagattatccaaaatgttgattttgatacaaacaattc

SEQ ID NO: 1581 - DNA, 4724 bp, synthetic construct
  misc_feature 1..4724: note = Synthetic
  source 1..4724: mol_type = other DNA
cggcgctctcccagctgagccacagccccacagtaggaagacgcgatactataccacactctatccccgaagttcaacctcagttgcagcccagaaaacacaaaaccctccgttaggagggcgtgtcgaccgaagccatatggttggctgtcaagccaaacctgcggtgtaaaccttgttggatcgcacggacaggcatctatctgatggttgtagtatacttagcgaattaattgatgtcaagagcattataatggacttgttaacataaacaaaggagccgttatttgaaaaccctcggtcttgatttaggaacaaacagtgtaggatgggctttggttgatgatagtaagcttgatcgcaatggtaagcctgaaattaatatgggagtatacgttttccccgatgcgggagagcttgaaggtggactttttgtttctcaccgcaagaaacatggaatgactgtaagaatgcgacgcaatttgcgtcggaagcgcgagcgacgtgatgctttggtacggaagcttacagataataggatgctcccgcaggatgtcaccgaacgcacccgctttatgtgcatgaatgaaaccgacccttacctattgcgacaaaagggattggattacgaactcactctccttgagtttggaagagccctgtttcatatatcacgtcgccgaggatacctgagcactgccttactcaaagtgaaagagctcgaatcaattcgtgtggcagcagaagagcatctggcatcggccgaagtagaattggaagagccgaacgaagatgtcgttatgactgcggaaaagaaagaggaaagcaaacttctcaagaatatggctgatacccgtaggaatatccaattgactgaatctcggacactgggagaattctatgccaagaatttagccaatcatactcccgttcggggatacgggaaaaccattaaagagggcactaaagttgtaagcaggaacccatcacgagatccaataggaattcgggcagaaagactactgttcgagagtgaattcgagattctttggaataagcaggcggaatttcattctgtccttaccccggggctgaagggtgaactgtatagaattatattcggtcaaaggccattacggtcacagtcgttccttgtcggcaaatgtacgtttattccaaatagaaggagactagccaaagccacactactggcacaacggtccatcatccttcagtacctgaacacactgtcaattgcagacgccacgaatggattagtgagcaaattgtcggcggaacaaatagtagcactttcaaataagctaaaccagaaaggcagcatcagttggcaggaagccaaggacgctatcagtttgccaaagcatttacggtttagtgatgagcccttaaggagttctcgcaaaggtatgtcggttcgtgggcgacttagaataaagggaaataccaccgctgaaagtgtgcgaaaagctattggtaatgatcggtggctagctttggacgttccgatgaccaattcaaaatatgacactcctccaaccatgcaggaagacttagttactcgtcttatcacatgccgtgaatttaagaacatagccgaagggttaaagagagattttggattcaataatctcgaactgtatatgttggcaactatagaatttccagacggccacctgaaccactgcgcggaagttattcgtaagattgaaccgcaccttttggctggcaacgtctattccgttgcatgtgaactcgctggatttcgggaacagaacacttcaactgaacaggttctagagatagttgacatgttaccaaagcttccgaatttgaataatcccgttgttcaacgatccgtagattctgcaattaaggtcattaatgctgttctcgacaaatatggaaaacctgatcgcatacatatagagatgcctcgcgacgtgagcagaaccaatcacgaccgcgagatgacttggaaatcgcaggaaaacaatgcaaaggcaaatgctattgcaaggaaacaacttgaagaattgggagctattacagaatcaaccgtcgacaaacagatcaaaaagattcgcttatgggaagaagccggacgggtttgtccttattttccagatgtcccggtaaccttgcagcaacttctcgaccattacgacatcgatcacattgtgccacaaagcgtctgttatgacgattcatacgcaaatttgactatttgccctaatatagaaaatcaacaagtcaaaaggaaacagaccccgtggcaggcgtatggcataacgaatcgatggaaggatattgaagcctatgtcaatgggctgaaatcaatgcattccaaaaagaaggaacgaattctttcccaagagatcgatatcgaaggttttacaaacaatgcgctcagtgacacacgatatatctctaaactaattctcacgcatgttaaacagctgggggtcgaagtcaatgtctccagaggacaattgacggctttattaagggatcagtggggtctaaaacagtgtattcctcaactggaagaggagcaattgaaactcgcagtgtggaaacagaagacagtaaagaaagatgccaagccgaggtttgaccaccgccatcatgcccttgatgcgattgtgacggcattaacggatagttcatctttgcgggttttaaggcggtggtttgagcggaaagaagataatctgccaaacaataaaatccagaaggagaaaccatggggaagtatcgctaaagatattactgacctgatggacaattgcgtcgtagtacacgcatccacgcggggaattggtggcccattacacgaacagaccgcgcttaagccaccaagcaaagaggtggtggacaggacgattgctgcattgcctgagaaccaacgattaagaatagacaggtgtgtggtcgtcggtaaacaactggtctattttgacgacaagggtgtcccaacaaaagcatacgatctcaagagcaatcaccatgcagttgtttgggaatcacaatatcctaatgccaaaactggattgtatccccgagagattacagtagtcacaaccattgaagcttcccgcagggcgcaggcaggtgagccagtaattcagaaggtgcgaaatggattcaaatatttgttcagtgtttgcaagaacgacatagtcctgtggacgggagaaaatccgggactcaagcgagtaggagccttctcaggtggtgattattgggaaatccaattgcaagccattacttctgctgtgaaaggtaaggaaacacttataaggataagaagtgtatccgatctcgacagccttctaggcagagttgatcggaactctatcggcgaaatagtctcaacagagcctgagaacctggcatgatcagtcgtatagttgagatagcaaatccagcgaggctgacctttaaggatcaacaactcagaatagagaggaacgactttccgccagctaccgttccacttgaagatctgggagtattgatcatcgacagcaatgaggtcttgctcagttcgtctcttctaggtgcctgtgcggaatacggtgtgagtgtcctctttagtaactcaaagcacgtacccgttggtctcatgcaaccgatcgaaagccactctttacatgcaagagtattgcgtgaacagatactgacaagtgagcctgtcaaaaagcggctgtggcaaacattagtccacgcgaaattgcgagaacaggcagcagttctaagggatgctacaggtaaagaccacggactaaccaagatggcattaatggttagaagtggagaccctgaaaatctggaagggcaaggcgcgcgtatctattttccaaagctctttggctctggttttgttcgagatcgagattctggcggagttaactccttgttaaactattcctatacagttctgaggtccgcaattgcacgagctgttctttgagctggtcttcaccccgctctgggtattcaccatcacaatcaatacaactcctacgcactcgcggatgacctaatcgaacctcttcgtccaatggttgattggcatgtttatcgtttgttacaagaaaccgatgaagtatccgacctgactccttccataaaaaaggaattactatcgatgctcgtgtcggaagtgacactcgataacaaacgctttccattaatgaccgcactcgaatactatgcatctaatgttcgcgagtgcatgaccgggaatttgaggaaactgaaatgccccggccgataacgtacggaggtatgcgttcgatgtgggttatgaccatgtttgatttaccgactgtcactaagctggaaaagcgtcgatacacaaaatttcgcaatatgctgttggatgatggatttcaaatgtttcaatacagtgtatacggtagaccgtgccccagcgaagaaaatgccaaagttcacattgatcgagtaaagcgaaatatcccggctgcaggacaggttaggatactcattttcaccgacttgcaattttcaaggatgcaggttttcattggaaaatccgaggtaatgacagagaaaggaccagaacagctcagttttttctgaactatttctggtccttttgatctcagtttttgcttgccggcgaacggcaatagtgtatcagatagatgtctgtccgcgcgccccaacatacatagttc

SEQ ID NO: 1582 - DNA, 17202 bp, synthetic construct
  misc_feature 1..17202: note = Synthetic
  source 1..17202: mol_type = other DNA
ctaggcgtgtttgcatcattataaaaagagggggtctaaaatccctcaaagcaaagctagtgtcttatgaataatggtgggggttgagggatttgaacccccgaccaagacgttatgagcgtcctgctctaaccgctgagctaaaccccctcgagcggataagaaaaaacactatagacaaaagataggtaagaagcaagcctgttttatgatgtttcggtgcaaaatatcttggcagttctatcatgcttatggtatagaaggacatgacgtgaataagcatagaaaggaacgtggatcaatgaaggttttatttttgcatcaaaacatgccggggcaatataagcatttatgtcgtctgtttgcggatgatccgaagaatcaggtggtgtttgtcacgaagccgaaaagttttgatgtacccaatatccataagttggaattcaaagttccacgtgaggcttctatttctacgcatcgttatctctcaggagcagagcagggcgtgcttgcggggcaagaagtatggagatcattgaataagttgaaaaaaactgagggctttattcccgatgtgatatgttcgcatccgggttggggtgatgcgatgtttgtcaaagatgtctaccctgatacgccattattgagttttatggaattttattatcgtgctagtggtgcagatgttggatttgatcctgctgatccatgcggggaggatgataaagcgcgtattcgtaccaaaaatattgtgaatcttttgagcctagagagcatggattggggtatatccccgacattgtggcaacatagtttgcaccctgaagcattcaaatcacgcatatctgttttgcatgatgggattgatacagatttttgtgcgcctgattccaatgctacgcttacattagcgaataaaacattccgtgcgggtgatgaagtggtcacctatattgcgcgcaattttgagccttatcgtggctttccaacctttatgcgtgcagcggaaataatccaaaaacgccgccctaactgcatgattcttgccattggtgcagatgaagtcagctatggtcgtaggctgcaaaaaggggatacatggcggcatcgtatgctgaaagaagtcacgttagatatggatcgtattatctttccgggcgtattgtcttatcatcaactcatcaatttatttcaaatatcagcagcacatatttatctcacctatccgtttgtattatcatggtcatcgatggaagcgatggcggcgggctgtgctatggtatcttcgcggacgctccctgtgcaagaagtgatgcatcatgagtataatgccttgcttgcagatttcttttcacccgaagatgtggcgaatcaagtggtgcgtattttagactctaaggatcggatgcaggatatgcggatgcaggcacgtaagacgattgtcgatgcatatgctcttaaagatttattgccattgcatcaacagcttgtggtagatttagcacaacgcaaacttccgccaccgacgcatgaggtcatgatggcgcgacatcaaaataatcgtaatttttctcaattacttatgaatagagcagcgtagggagtttgatcatatggcaaaaaaatcgcgtgttcctcagcaacaattatcgcaaaaaatgcaacaaaaacaggcatttttgcaagcagtacgcaaacaacaaggcttcaccctgccaaacactgataaaaaaattgtggtgaatgtggggtatagctctgcgcacatgaattcattacacgcaacctttaagaaagaagcatggcacgaggtgcgtgttgatgtggatgcaaaaatgcagcctgatcttcttatccaatcgatgacggctatccctgaaattcccgatgatagcgttgatgcactttggatggcgcatgtaatgcatcgtttaacctatgatcaagcaaagctcttggtgctggaattggtgcgtatggcgcgtgtgggagcagatatagtcgtatccgtacccgatctgcaagtggcagcagcctatattgcgcgtggcgaagatgagcatgaactttatcatccaccagcgggtacagtatatcccgtggatatgatgtttgggtttcgtccgtttattgcgcgtggcgatctagcgcgtatgcataaaagtggttatacagcggagatgttaggaagatttttgcgtgatgcaggggttagtaatcttcatatttcacggtctaatcatgagattgtggcgcatgggaaatattatccttatgagcatcctgaacgtgttgagcgtatttctatgcaggaagcaccgtcatctatgccacacgtgccaccaaacgcagcggggcaagcgcatatccagcaagcggtgcgtcatattgatcccctagaagctgaaccacaattatggaaaccattggggcttgtgcgttaacatgctatattttaggaataatcagtgaaatcttcaaacgatattcttcatcttggtgcgtatcctttagtacggatgcgccgtaatcgcaaatccgcatggtcacgcaatctggtgtcggaaaactcactttccgtgcatgatttagtctggccattattcgtacaagaaggtagcgaacaatgcacccctattgctgcgatgccgggggtgaatcgttggagcattgatctcttggtgcagcaagtgcgtgaagctgctaatcttggtatttctgctgtggcattatttcccgttgtgccagcgcatgtgaaaaccgaaggagcagaagaagcctataatgcggataatctgatatgtcgcgctgtgcgtgcgcttaaaaaagaatcgctagagatcggtattatctgtgatgtagcacttgatccgtatacgatccacgggcaggatggcttgatggacggggatgtcattgccaatgatgcaagtgtggaagtgctgatgaagcaggcgttatgtcttgcagaagcgggagcggatattgtcgcaccctccgatatgatggatggacgcattggttcaatccgtatggcattggatgaagcattattccatgaagtgcagattctctcttatgctgccaaatatgcctcggcattttatggaccattccgtgaagcggtaggttcagcgcaaaatcttgggaaggcgaataaatttacttatcaaatgagtccggccaatggtgaggaagcgatccgtgaagtagcactggatatttctgaaggggcagatttagtgatggttaaacccggaatgccgtatttggatgtggtgcggcatgtgagtgagcatttttctatccccgtctttgcctatcaggtcagtggtgaatatgccatgttgcgtgcagcagcggatcagggatggttggattggaaaaaaaccatgatggaatccttgcttggattcaaacgtgcgggcgcaacgggtgtctttacctatgctgccaaagaggtggcgagttggttgatggatcatgcgttgcatcatacgaaattgcgctaggttctgttgattttttctactgctgtttgctagagtcatttgacaaaaaaattactcattttttatgtcaagtgcgactataacactataatggaagcactatatcaaaaaaggcagcccgcagactaccttttttgatttcatttgtcggagataaactccttattaacggctggacaccaattcccaaaagcgttgttcaaccattgtacaatgtactttacatgattcttataacacactaatttgtttttgcaacgataaaatgaataggtgtgtggtatgagatatgctttaggatatgatatgggggtgggttcgctaggcttcgcagtgatagcacttagtgaggatggagaacctgaagatgttctggatataggtgtgcgtatcttcagcaccgcaagagaacctgataagggaggtaaaattggcgaacctttagcggcgagcagacgtgctgcacgaggtgttcgcaaacgtagtgatcgcttaaaaatgcgccgaaaatcattgatgaaacaattaatccgctatggactcatgccagattctgtaacggagcaaaaaatgttagagacattaaatccgctggaattacgagcaaagggagtcacagaaccactaagcctatatgaattggggcgagcattattccacatgcaacaacgccgagggtacaaaagcaacaggcatgaaggagataatgaacaaacgggtgtcattgaaacaggtggtagagaattacggcaaaaattagctgcttatgacatgacgttgggacaatatctttatcataaaccagatcaacaacgtggttcacgttttcgtaagaacatggaaggcacatatacctattaccccatgcgtgatatggtggaacgagagttcaccacgctatggaacatacaacaaggttatcatcccatgcaactaaatgatgaagcacgggatgcagtgcatcgtgctatattttatcaacgtccgcttaagccacagccacgtggtgcgtgtttgtattacacaatggaggagcgcgcacccatggcattgcctctagcgcagcgatttagaatccttcaacaaattcataatatgcgcattatcggaggacatcatcagtttagcgggattcctctttccgtagaagagaagcaacgcatatatgaaaaaatgcttgttagtgagagtgtgaaggaaagtgacgttaaaaaattacttgcactccaaggaacgcagcacatcaatttgttccgagcgaacgtcactgataagctcaaaggagataaaacggcggttgaaatggagaaagtttatggcaaggaatggtattgtgtaccgcttgaagtgcaaaacaagatagtttcccttctcacggattgtgaaaaaataacccaacctcatgggaaaagcagattattagaacatgaagaaatcattgaacgcttaatagaatgttttgattgcacggatgaacaagcacatgcaatggcgaacgttaaacttagcagtaccatggcatcatttagtgctaaattgttagcagaacttgtaccgcagatggagccattaggaggtaataggtctttatctgaagctattgccatgctgaatgttccacaaagtcgcatggataaagagtgcgatcttttgccctattatgcggaactattggggaatcactgcactaaaatgccctctgctgataagcatgtccgtgattatggacgtgtgtctaatcctactgtgcatgttgcactcaatcagctacgcaaggtgcataatagtttaatcacgcgatttggtggcaaacctgaatatatcactatcgaactggtgcgagaattaaagaaaggacaacgtgaaattgctgatattattaaggaaaatgacaaaaacaaaaaattacgtcatcgatggaaggaggaaatcaaacaggaattaggaatagaagcgaatgatcgcgatttagcaaaaatgaaattgtggaaggagctagctgaatccaacgcagcgaatgaacgcatatgtgtatttacaggaaagccgattcgcctatctcagttgctttctgctgatattgaaatagagcatatcttaccgagatcactcacgttggatgatacgagtgccaataaaacggtgtcttttgtaagtttcaataggctcaagggaaaacaagcacctgaagcattatttgcaagccctgtcttatgggaaggacgcacgattagctatgaagatatggtggagcgtgccgatcatctaagaaacgcgaaagcatggcgttttcgtaaaggtgcgatgcagagttttgaagaaaaatctaccaagattatctataaaggtgaagaagttgatacgggactggagagttttgctgcccgtcatttgattgacaccagccatatggcaaaacttgcaaagaaatatcttgcctatgggtgcgctcagggagaacgaggcatgatcgctacacccggtaccttaacggggttgttgcgtcaagcatggggttggaatagcctgcttgcggaggatgatgccaaggatcgcacggatcatcgccaccatgcggtggacgcattggtgattgcgcttactactcgtagcatggtgaaacatattgcagaggcggcaaaaatagcagaaataacagggcgcaaactttcctcggtggtaggtgaaatgaccaatccctttgcgcataagcggcacatcattcaaagtttggtagataaaatggttgtgtcgcacaagcctgaacatggtacacccgctatgaacggaggcactacaggacggttgcatgaggatacctattatggaagaacacaagaaacacctaagagcaatgcagtctatgtggtgcgctggaaaccagaggaatttacgacccgtaaacatgtagagaaaatcgaggataaacttttacgtgatacgatactcacctatcttgagggggtatcagacaaagaaaccgcgacatatgtgcaacaattttgcaaaaatcagaaaattcatacaattcgcgccctagacgaaaagaatgcagtctatgtggtgcgctggaaaccagaggaatttacgacccgtaaagatgtagaaaaaatcagggataaacgtttacgtgatacgatactcacctatctggagggggtatcagacaaagaaattgcgacatatgtgcaacaattttgcgcacatcagaaaattcgtgcaattcgcgccctagacgaaaagtctaaaaatgccatggtagaagtgcgcgatccagtgaccaaacagccctataaatttatggtgggcgggagcaatcattgcgtggatatatttatcgaaacaacgggtaaaaaagcgcatatatggcaatcggagattatcaaaacatttgatgcgaatcaaaaagattttgtgcctgagtggaaatccgaacccaatagaaaattaatctggcgtttacataaagatgatatagtgggatatgaaaaggaaggaaaaaccatgtatgcacgggttcaaacactaaaagctaatgggcaaatattttttgtgcaacacaatgatgcagatggcaaaacatcattcagtatgatgccagcacctgcacaaaaagcgaaactacgcaaaatatccgtttctcctgatggggtggtgttagacccgatgcgggtgcagcagggggaatgagatgctcgggcgggtgatagaaattgcggaagatggcagacaccttgccgtctttcgtggtttccttaaagtcaccgccgaaaaacaggaaattgcccgcatccctttggatgaaatcgctgtgattatggcacatgcccatcagctttcctacagcaacaatctgctggtggaatgttgtaataggggcattgcctttatgtttactggaagtaatcacacccccgcagggtttttatggccaaccgaacagcatcatgcacaagcaggtattatgcaggcgcaacttaccgctacgcaaccattatgcaaacaattatggaaacaactcatcagtgcaaaaatctattttcagggtgagcagttgcacgttcagcatggtgaggatgcaggcttgtatgccatgtcgaagatggtaaaatcaggagacataggcaatctggaagcgcaggcggcgcgacgatactggcaacgcatgatggggaaggattttacgcgcaatcaggatgatacggatattcggaacaagctattgaattatggatatgccattctacgttccactaccgcccgcgctattatggcagcagggttgcatcctacgttaggaatatttcaccgtagccgtattaataccatgtgcttagtggatgatgtgatggaacccttccgcccattagtcgatgctcatgtactcaccttgatcaagcaaggtgtgggggaagtggataaagtagcaaaaacagcactcgcatctattcatctgaacgatgtatgtctggatggacaggcggctccattgggcatggcagtgctgcgagtggcaacgtccttggcagaaagctaccaatcgggtaaggcacggttattgttacctgaaagcctcatgctaccaaaaaattataggttatgatgatgacaatattaagtgggtatcgtattatgtggctgatggtgatgtttgatttacccgtaacaacggcagaagaacgcaaaaaagcaacgaaatttcgtcaagaattactggatgaaggttttgaaatgtctcagttttctgtctatatgcgttattttgggagcagggaaagagcagatgctgcaaccaagcgcatactaaaaagagtgccgccacttggcaaggtaagtatgatacaattcacggacaaacaatttgaaaatattgtatcctacaccaaccgcaagcctactccgcctgcggaaaaaatggagcaactgattcttttatgaacaagattagagcatttttctcagaaaaaattggcgtaaattgctttaatttcaacaatttacgcctaagctagtatacactattgggaattggtgtccagccgtaacgtattgtgtcatttactgaaggaagtcaacagtatacactattgggaattggtgtccagccgtaacgtattcacctgtttttacagttaaatcatgagtatacactattgggaattggtgtccagccgtaactgttgcccctactgatttttcgattttaggagtatacactattgggaattggtgtccagccgtaacacataaggcattctgcaatggcacaaatcgagtatacactattgggaattggtgtccagccgtaacgtctcgtataatctttggcagttcctcgagagtatacactattgggaattggtgtccagccgtaacctaacgagtcttgacacataataaaaagattcggggcaggttcttacacacaagatgctacgcatcgtgatatgtctgccttttaggtgcagtgcaggatcgatttttcttgatttgtcgtagcatataagtgttatttaagcatatggatggctatcatgcctcaatataatgcaagtactatatatcaccactaacaacggcgcatattatgacacaacgctatcgtcttgactgccaacacgcccttgcgcggatcacagattctattacggatgcccaacttcgtttgtttacgcaacgtttttatcgagcattatcgcttggtgatctggatgatattgcaccagaaattgccgtgcagatcgccgcacttgtgtatcatgatgggcatcatgttccttcagataaaccgaaaatcacgatccatacacctgattttctcaaacaagcctatgggcgcacccgtgttgccgtgacgatcttcaacaaagatatgccttttttggtggattcattgtcgattgcactgaagaattgtggctttactatgtaccgcaccattcatccgcaattatcagtcaaacgtgatgagaagggtatgctattagataatgatcatccttccaccactcgggaagaatcatgcatctattttgaactatcgcctttatccgatgatatggatgcaaaaaaacttgaagcacatttatgcgctacgttggatcatgtgtataaagcggtagaagattggcgcattatggtggcacgcgctcgtgaaatcagcacccatattgtgatgatggggcatcatttacctgccgaagatatggatgaagcaactgccttttttgattggctgctgaaaaataatttcatcttcctaggttatgttgcctatgatttttatgatgcagagggcaaagagtgttttacgcccgttgagggatcacaactcggtgtattcaaaatcgctgagtttgatttattgcagcgtggttatgcgagtcttcctcctgaggtgcgtcattttgccctacaagatcatcctattgagatcacaaaatccaatcgtcgctcggtggtgcatcgtgatgtgttgatggattatataggcattaaacgttatgatgctgcggggaaggtgattggggaatcgcggtttcttggcttgtttacttccccagtctattatcaacaaacgcaagaaatcccctatattcgccagaaggtgcaggctgtgctggattctacaggttttagcaagggggggcatagcggtaaggcattaaaagcggcgttggagttttttcctcgtgatgaattattccaaatctcaaccgatgatttgttagaaatcacgatgggtattgtagcacttgaagaacgccctgatatacgggtctttttccgcaaagatatttttgagcggttcatgagttgttttgtctatatgccccgtgataaattcaatacgtttgtattgcatgagattggtaaagttttggcgcggcatgtggatggttcaatcaaagccatgtattctcagcttacggaatctgcccttgcgcgggtgcattttattgtaaaaacccaaccggggcatattcctaccgtgaatatgcctaagctgaatgaagaattgcgctttatcatcaattattggcgcgatagtttgcgggaatcactacacgatgtgtgcggtgaacaacgtggtgagtatgtgtttcgtgaattttctgaggcattccctcgtgattacaccaatactacccgtgttgaggatgcgattaaagatattttcttgcttaaagaggtgctggagcatcgcacggcacgctttaatctttatgtggatgaagcaacgagtcgtattcatttgaagatgtaccgtattgcggatcgtgcgcccttatcggatatgatccccatgattgaaaatcttgggtttaaggtgcatgatgctgtgccgtaccgtgtctatgtgcgtcaaggtgcggaagaacagccgattaaaatggttgtgcgtgattttactttgctgcctgcaacggcggattcctatgatcttgaaaaaatcaaacctttgcttgaagaagtgttggagcatgtgtggtctggtgcgacagagaatgatattctcaacagcctcgcgcttcgggcagggttgaatacacgtcatattaccattttgcgtgcctatacacgctatgccaaacaagcagggcttggttattcggaagcctatatcgatcaggctttgtgcaaacatgcgacgattgcagcgcaacttattgatttatttgaagcacgctttcatccgcaaaaacatgataagacgatgctgcaagattgttatgggcatgtgatgcacgcactcacccatgtggataatcttgcagaagatagaatcttacgttttttcgcagaaacaatacaagcgactttgcgtaccaatgcctatcaacacggtgcagatggcaatgtgaagccttatctatcctttaagtttgattcgcttgccgtaccagatttgcctttgcctcgtccgttgcgtgaaatctttgtctattcacttgcaacagaaggcattcatttgcgtggtggattggtggcacgtggtggcttgcgttggtcggatcgtcatgaagatttccgcaccgaagtgttgggcttgatgaaggcgcagcgtgttaaaaatacggtcattgttcccacaggctctaaaggtggctttgtggtgaagcaatcgatggatgggatggatcgtgatgccaaagtgcaagcagccattgcgagttatacgcagtttctatcaggcttgcttgatattaccgataatcgtaatgcagatgctattatcgtgccgcataatgtggtgcgctatgatgatgatgatccctatttagtggtggcagccgataaaggcacggcaaccttctccgatattgctaatgctattgcgcattcttatggtttttggttgggtgatgcctttgcctcaggtggttctgtgggctatgatcataagaaaatggcgatcacggcgcgtggtggttgggtttctgtggagcgtcactttcaagaaatggggagagatattcatacgcagcccttcactgtcatggggattggcgatatgtcgggcgatgtatttggtaatggaatgttgctttctcatcagattgcgttggtgggcgcgttcaaccatatgcatattttccttgatccaactcctgatcctgcaacctcttatcatgagcgcaaacgcttatttgagatagcgcgtggcagttgggatggctataatgcctcactgatttcacagggtgggggggtctttttgcgtagtgccaaaacgattatccttacgccagaaatacagcaactacttggcacaaatgcaaaagaattgacaccgcatgagcttatccgcatgatgctgcaagcacctgttgatttattatggaatggtggcattggaacatatgttaaatcacgcaatgaaacacacgaaatggtaggtgatccaagcaataatgcggtgcgcattaatggcgatgaattgcgttgtcgtgtggtgggtgagggaggtaatctcggttttacccaacttggcagaagcgaatatgcgcggcttggtgggcgaatcaatacggatgccattgataattccgcaggggtagattgctccgatcatgaagtgaacattaaaatcgcactcactcatgctatcagcaaaggggcgatgaatgaagcggatcgcaacccgcttttggcacgtatgacggatcgtgttgctgaattagtgcttgaagataatcgtcaacaaaatcaagcattaagcatggcacaagcgcgtgcaaaagaaatgttagaagtctatgcacgttatatgctgacgttagagcaggaagcgatattggatcgagcggtcgaatttttgccgaatccgaaagagattgatgctttgaaagctaatggggcgaccttaacgcgtccagaacttgccatattgcttgcctatagcaaaatcgcgctctatggtgtgttgtcgcaatcatcattgcttgattcatgtgcgtttaatacgcgtttattgcgctatttccctgaagcgatgcaagaagctatgccgaatatcttgattgatcatccgttgcgccgtgaaattattgcaacgtcactgaccaatgagattgtcaatcgtgcgggtattacctatatcgataccatcaagcatgatacggggcatgatgtgtgtaatatcgtgcgtgcgtatgtggtgacgcaagaattattccagttggatagtttgtgggaagcgattgaagcattgcccaataaagtagaaagcagcgtgcaaatacagctctttatggaggtgacagccttccttgagcgcgtgagtgtatggtttttgaacaatatgccacaaccattagatatggaaggagtgatccgtgatttccatcctgcgatggagtcctatcgcaaggaatatcaacattttatctcgcaatccatgacgcttcagtgcgaagaaaaaatcacaactcttgagcagcaacatattccgcatgaggtggcgaagcgtcttgcgatgttggatattttattggcggctagtgatattgtgttgctggatcagcaaagcccgcatcaacaacgcgccattgggactatttattttgatgtcgatgcgcgccttgaactagatgggttgcgtcatgccgtctcccttctttctgcggaaacctcatgggatcgcttagcggtgcgcaatgtgattaatgaactctatgaagaacaacgacgtttgacctcgtgcatcatggaaggattagccttgggtgcatcgatcgatgaagcgatgcagttgtgggaacgtgtcaatggaggtgaaattgagcgttatcgtcgtatggtgcatgatctcaaaaccacaaccacaccgacactttcgatgtttgtggtgttgttgcgtaaacttgcgacgatacgctttgtgccgaatgaatcagcgggtattgtgaatctggcggactaaatttatcattgcgtcaggtgaacgtgtggtgtatggtacgctctaccatatttcataggatataagcgtgagcgaccatagttcgatacaaaccatttctattgaacgcgaaatgaagcgttcttatcttgactatgcgatgagtgttatcgtatcgcgggcattgcctgatgtgcgcgatggtttgaaaccagtgcatcgtcgtattctctatgcgatgcatgaatcgggctgtgattataatcgaccctataaaaaatccgcccgtattgtcggggaagtgatgggtaaatatcacccgcatggcgatagcgcgatttatgatgcattggtgcgtatggcgcaaccattttcgatgtcgtcgatgttgattgatgggcaggggaactttggttcgatggatggcgatcctcctgcggcgatgcgttatacagaatcacgtttggcgcgtatttctcagcaaggattattggaagatacggacaaagacacggttgatttccaagaaaattatgatggatcagaacgtgaaccgcgtgtgcttcctgcacgctttcccaatattttggtcaatggtgcggggggtattgctgtgggtatggcaaccaatatcccgcctcacaatcttggtgaagttgtggatgcaacctgctatgtgattaatcatcccaatgccacgatcgatgatgtggtgcgcttgatccctgctcctgatttccctacggggggtattattcttggacgttcgggaagttacaatgctgcacgcacagggcgtggatcagtcatcatgcgtggacgtactgagtttgaggaactgcccaataaacgcaccgctattattgttacggaaatgccttatcaggtgaataaggcgcgttttgttgagcgtattgcagaattggtgcgcgataagaaaatagagggcatctctgatttgcgcgatgaatccgataaaagcggtgtgcgcgtggtgattgaagtgaaacgcgatgcgattcctgatgtggtcttaagccagctctatagctatacgccactacaaacatcttttggggttaatagcttggcgttgcatcatggcgcgccaaagcaattaagcacgttagaaattttgcgtgcattcattgccttccgtgaagaagtgattatccgtcgcaccacctatttgctgaataaaacgcgtgataaagcacatttgttgcttggcttagcgattgctgtagcgaatattgatgaagtgattgcggtgattcgtaatgcgcctaatccgcatgttgcaaaagaagaattgatggcacgcagttgggatgcttccgatgtattgtcattactcgctttggtggatgaccgccgtaattatcttgatggcaatctaatacggttcacggatgagcaagcgaaagcgattcttgaattgcgcctgcaacgactcacaggtttggagcgcgataaaatccatgaagaactcactgaattaggtgaagccattacccgttatttgcagatattggcatcgcaaacggaacgtatggacatcatgaaagcggaattgctggaagtgaaggcgcaatttgctgtgccgcgtcgtactacgattgaagatgcggagtttgaagcggatatggaaagcctgattcagcaagaagatatggtggtgactgttaccagcggtggctatattaagcgtgtcccgcttgatacctaccgtgcgcaaaaacgcggtggtaaaggtcgttcgggcatgagcatgaaggatgaagatgtgattgaggcattgtttgttgccaatacgcatacgcctgtattgttcttctccaattacggcacggtgtaccgtctgaaagtctataacctcccgcttggtacgcctacgacgaaaggcaaggcgatgatcaacgtctttccgctgaaggaaggtgagcgcatcaatacgtttatgcccatgcctgaagatgaaaccaaatggaatgatctgcatattatgtttgcaacctcctttggtacgattcgtcgaaatgatctttctgatttccaccgtattcaaagcaatggtaaaatcgccatgaaacttggcgcaggtgaggaattggttgcggtgcatgtctgctcccctaatcaagatgttttgattgctactgaatatggcaaagcaattcgcttcgctgtggatgctattcgcgtctttgcagggcgtgattcgcaaggggtgcgtgcgattaaacttgcggaaggtgatcgtgttgtatcgatgtcgatcattacgcatggcggggaaacggaatcagaagaacgtgcagcatttgtgaagaaagcaaatcagttgcgccggggcgcggaagatgaggctgaggctataaccccaagcgatgatgcggatgatgaaaccacatcctatgagctgagtgatgcacgttttgcacagatgttggagcgtgaacaactgattttaagcgtcaccgccaaaggttatgggaagcgaacttcttcctatgaatatcgcatggcaggacgtggagggcaggggattacgaccattccaaccaatgaacgtaatggtgctgtggttgcaagtttccctgtggagcaaggcgatcagttgattttgatgaccaacgccgctaaaattattcgttgttcggttgatcaaattcgcataacagggcgtgctgcgcaaggggtgcgtttattcagtgtcgcacatgatgaatatgtggtgtctgctgtgcgtattgctgcatcgatggtacaaaacgccaccgatgatgaggaggaagaaaatctatgcaaaccacctcaataggcgtttatcccggaacgtttgaccccatcacgaaagggcatatggatattattacacgtgctttgcgtgtcgtggatgaattggtagtggcggtagcattggatacaggaaaacagccaattttttctttggatgaacgtgctgccttggtgtgtgaagatgtgcgcacctatttgggagacaatgcacggcgtgtacgtgtgtgcagcttttcaggattgcttgccaattttgcgcaagagcaaggagcgcatgtattgatacgtggcttgcgtgcggtatctgattttgaatatgaatttcagatggcttgtgtgaattccaaacttgccccacatattgagaccatctttttaaccgcttcggaatccacacattttgtttcttcgcgttttgtaaagcaaattgcccgccttggtgcatcggtggaggcgtttgtatctcctaatgttagtgatgcg

SEQ ID NO: 1583 - DNA, 23447 bp, synthetic construct
  source 1..23447: mol_type = other DNA
  misc_feature 1..23447: note = Synthetic
tgtatgccttgctagcggagctgtagcaaaaacattactgaatcgctaaattgtagttctggccaccattgttatcccatgtccccgcctggttgtaaaaagcggtgttgagcgtcgagcctgatggcaccgtgatggttgcggtccaagttccgtttgactgcttggtcatggccgtgttggtcgttccgctccatccgttgtagccccagtgcatagtcatcgagctggcggacgttgcgagtgtccccgcatagacgatggtggcggtttgaccgtgaacgaggggactcggcgacgaatacacatcctgcacggaaaaattgtagttgttgctattattgttgtcccaggtcgaactttggttgtaaaacgcggtgttcagtgtttgcgcaccaaaaggtaccgtgatcgtcgctgtccaagttccgttagattgcttggtcatcggcgtattggtcgttccactccatccattgtagccccagtgcatggtcattgagctagcagaagccgctagagacccgttataaataacggtggcctgctggccagcatcaagggtcccagaatttgtgtagacaccgctttgtaccggcgcattccataaagaactgccttgctgggtcaaaatcatagcatagtgaccaggtacggtgacgctgatgttcccgttgccgtccaccgtatagcttgacgcttcggatgcaccattgatcaggggagtcatattggtcagaacgctaccaaacggtgttccggcttgcgcgacgggaatggtctcgctctctgtattatcggtatcgttgagaatgacaatgtcgcgctcgttctggtcaaaacgggcgaaagccagaatattggtggaattatccgcgaccagaggcataaacgagccgtcgacgagtgctgggtggctcgttcgtagttggatgagcttttgatagagttggaatacagagtttccgccatttgcgacctgagaccaatcaaaggtccagcgcttccctgcgtcattggttccaccacccaacatgccgtattcgtcgccatagtagatagtggggataccgacatacgtaaattgcaaaaaggccccaagataatccttccagtagtttggcgtgccgccatagggctccgtgaatgtgctgccattcggctcggtgtaggttttgttattgatgctttcagcagcccgctcgccaaaacgaggggtatcctgtgtcgacagttcgttaacttgggctagttgagccgcccgcggaaccgcgttaagtgttcctgtcagccagctttccatcgtggttgcgttaattgcgtccgcgttaaatccatcgtcgtaaccagtaacccattcggataccggttggagaaaaccattgtaattgaccgagccgtcccattgatctccattatttagccattccgttggctgggatccttcaaaccattcgccgaagacgaatgcatttggattggcggttttgacagtgtttcgaaactcttgccaataactgtggttggtgggatcgttgtagttgccgttagactcggggtcgtaaccgttggctccgatatgtcctggagcgtcgagtctccatccgtcgatgttgtagggtgaagacaaccatgtctttgcgacattatcgatctggctgcgcagcgcacttgatccgtagttcaactttggcatggtgccaacgccagcgaacgtggcgtaagagttgggccagttggtgaacgtgtagtagctatagtactggctggattggctttgctgagcgctagtgaaccaggcattttgattactcgtgtggttaaagacgccatctagaatcaatcgaccttcttgtccagcgttgttgctcgtgttgtgcagatctgtggatagttgctggagtgctgtattgccgccaaagtgtggatcgacgttgtaatagtcttgcgtgtcgtatttgtgattggtcggtgacgtgaaaattggattgagatagacgatattggcgccaagtgttttggtgatataagatagtttttggtcaacaccctccaaatcaccgccggaaaacgcaacttggtctttaccacccggatctcccaactcgggatctgatccccacggtagttggactgtctggttgccgttccacgagtatgccccggtcgtaacatcgttcgacgtatcaccattgtagaaacgatcaaccattatctgatacataatgccgttctgtgcccaggtgggtgtactgaagtttggagcaaggacaaaatcatcatatgtgttccactgatttccgctgagcgatggtgttgggaaagcactggtggatgttcctgaaccattgtagtataacgtcgaagatccatcgtttgcctggaagtagtagtacttgacgctggacgatgcaggaatcgtcccctgccaaaagtcgtacagtccgttgacatccgtgcctttcagtgccatggggtaataagtggtggagccagtagaggtatcatacaccacgacattggcgctggttaagttaccatgcgtcgcacgcaaggtcaccgtgacggcttgcgcggacgttggttcttgcggcgacatatactggggcccttggtcagcaaacagcccactcgcctgaacaccggaggacgatgcagccgcttggggtgtaaaacatacactccagccgaaaagtgcggatagcggaatgagcgctatcggatactttgcccactttcgaagtttcaacttctttcacgctccttcacttcaatacaaacgtttgcctgatagcgagaaaaatagagcaaacgttttcattatttcagcatacggtttgatgtcattcaattgtctaaagctatgttttatttacacagacaatcgtcccattacataacgatttgaaccgaaaatacgaaggttctgtgatagataccgataagacgtcaaaatctccaattgattttgtaaggtgattagacgtacgattcagttagtttgcgcatgcaaacgattgcgcatgtccgagaagggggataagagtgcaagaaaaaacgtacgtatggtcagggtatatgtggaaaaagcgtcaagacccgttggtctggcctttgtggatgcggtttgtgcctattctgcttgtggcggttattggaatgttggcagttcaacgaatttccataggagctgtcgtttcgactgcgactgtggttgccaaccaagattcgcagcaatttgaggatttatctctcatcacatcggtacaaaccagtattgacgctgcgtatatctccctgcttcaagcaacatctgccaagccaatggataccgttgccatgagcacattcgcgcagacagccacgggcatagaccaggcaattcaaacattgacggcgaccgaggctcatatcgtgttacccgattgggatgcaatgaagcgggatgcaagtgtattgatttcagacgcgatacggaagccttcaaacgtaagccaagatttagccaacctgcaaaacgatgcgcaaagcgtctcgaatgacctgacgatgttaactggcgtcgacacaaatcacacgttgggtattgatcgtgccgaacagtcagcaattgaaaagatccatgccatatctatggaaatgctcggggtgatgacctgcgttgccgttggcatttttagcattgtggcgtggcaaacgcgtagacgcattcgtcggctgacgcaggggctacaccgagcagctgtcggtgatttgtccatacgttttgaaagcattcgggatcgcacagaaattggctttattacacgggaagtgcagttgctggtcgatagtctttcccggattgtgaaattggttctcgctgcagtcggtgatacggtcattcaggctaacttactgctcgaacgcgttgagacagctcgtttagcggggagtgagattgaccgggttgtccagtcgctgaatatagcaattggtgattcgtatttcgagttggagcgtggtcgggacgagctgtctgcggcttcttctgcggtctcatgtttgtcgcaagcggttgaggaagtgagcgatcgcgcagccgaggtgaccagttcatcgcatgttggcttacagcacttggccaccattcaaaccatcatgctcgaacttggacaatcgacatctgtgagccagcaggtttatatgtctacgcagcagcagttcgaacgattggtatccaaggtacagatgatttcgcagatcgctgaaaccacggaattgctggcgttaaacgcaagtattgaggctgcgcgcagtggtcaatcgagtttcaccgtcattgcggtagaagttcgcaagttggcgatgcaaacgtccgatgtctcgcagctgattctggaagccatccgtgaactcggtgtatcgatgcacgagaccgggttgtctgttcgtgcagcccagcgacttacatcagaagctgtggcacacatcgagcaaaccaaagggacgtttgaatccattgttgttgggatgtcagaacttgaaaggtcatccgcgaacacagctgtgacggtacgggaaagtgtgacttgcatggagcggattatcggcatgctacgcaatgccatcaacacgatacaggctatttctacctacagtgccgaagtcgctgtgagcttgcacgctcaattgagcgatttcgaaaccttgaatcgtacgagtgaaacggtttccgagacagctcgtcatttggaaacatccgtcgcgcgcttcaccgtataagatgaacgcttggttgacgctggtgtaaaagggcgatatggttcgttccggcaatggttcctagaaggaagcatgtaaagtgcaagctcgaagttccattgcatatacttgcccgaggaggctgtttgttgttacaatgtttctgacctgtagcgaggccgtgcggcgttcgcggccgaaggagagaacgcagcagtggcaaagctaaagggctgtatggaagccgaaattagtaatgctctcacaaaatgggagaaggagtaccttgggcgagggtctgtatctgtgaagacagatgttttacgcgacatgattatcgtatccttgcgtggcattctgtcgactgccgagtatgccttgtgtgaaacgcgcgacggtatgctttcggtgaaacgaacgcggaccagcttggtcgagtctgggattgacgaattgaaagacatgattcgccgcatcacaggtgaagaggtgacgagctttttcaccgatttgagtacgcgcacgggcgagcgcatcatggtctttcggttatctgaggatttggaaaagaagtttattacagcggattgacgaaatctgcgcatatacctaaagcactcggaggttgacctacgccgaaggattttggtggagggtggcagtcgaggaagtcaaggacgcatgggagttcttcgtcacaatggtggcgactgaaaaaccggcgtgaccctatagagtcggcatcggcggaagctgatgaacgtgactgtatggggcgcgccggtttttatgttgtatgccgatatgtgtcggatgtggtcgagagaggagacgacgatgttcattcaggacatgcagcagtggatgttgccgatttggcttggtacgtgggcgtttgtcggtttgaccgggttccttgccgcgtgcatgggcaaagcgaacggattcgtgcgttggcatgtcgctgggcttgcgctgcctgtcatggcagcgggggttgggctattcgcgagggcggatggcgttgcgctgggaccctggcaggctgacgggattggctggttgatggctttttatattgctttgcttggcatcgtgattcaacgattttctgttcgctatctactgggagatcgccactatggccggtacttagggtggctcacctggacgacgggcgcggcgagcatgacgtggatgagccgcacgctatggatggaagtggcatcctggacggcaatggatgcggggctgattgccttgattgctctcgcttggcaaagtggccccgtgcgcgccgtaacgaagcttacgattcgccgtttggccatcggcgctttcgcgatcgcgatcgcctgtttgtggtacggcatggccgcccatcggggagacatcgcgatctcgctggcgcgggtcggagatttgccgtccatggttcgtatgggtgtggcgttgttgctcattttggcggcgatcgttcaggcgggcggttggccgtttgggcgttggttgcttgagtctgctgtgacaccgacaccggtgtccgccatcatgcatgcagggatcgtgaacgcgggcggactcttgctcacgcgctgggcgcctttgctcagcgtagctgggccgttgccccacggtgtgttactcgtcctggcttgggccagcgttgggatcgggtcgggtatcctgctggttcacgtggattacaaacggcaattggtcgcatccaccatggcgcaaatgggactgatgctcatgcaatgtgccatcggcgcatacgacgcggcgatcgtccacctgattttacatggtgtgttcaaagccactctgtttctgcggtcaggcgatgcactgccgcctccggaacaggtgcttgctcgatcgcgagggacaaaacggccgtctgcacaatggcctgtggcgctcggcgctatctttgcgcttgtctactttgcagtggagccacatgcatgggtgcgggcgctcagtgcgctgatgcttggcgccggggcatccttggtcgcgagacaagcgcgatcaatgcgggagggacgctggcttggagtcgcaatcgtcctggttgctgcggccatcagtgaaggtttacgtgcctggctttcgcacaccattcaggaaattgcccccgacatccacgcctacccggtagccatggcatggccgatcgccgcggttgccctgttagcactcatcggttttgctggtgcgatcgtcgcagtcaggccagatgcggccgtcgcctcgcggttatatctttggcttgtgcatctgggcgagccgcggcccgtcgccatggaggcacatccgcgtcatctccgtcgatacgaacaggaggcggttttacggtgagacaaagtcacgcagtccagcggaataccgcgtcgccacttggaaatattcaacttcaggatcgtgtgttggcatgggttacccaagcgatggatgtcgtggttccacagtggcccttgcctgtctttgtggcacgccatccgtggatgcatctcgaacatatgtcgttcgcagatgcgctgtccctcctggaggatatgcaggatgtacaactacgcccggcgctctctgtcatccaatccgctgtcgagcgtggcgacattgccttgcctatcttcgaacagcggcttcgtgcatgggtagatgagcatgtgccgccatctctgacagcgcgtctcgaacccgttctccgtgcgctgatttgggaagaagaaagtgaatcggcggttcctgagtatgtatgggcgtttgccaacgaggtggtggcggcgggcgaagcgccgctatcttctcgcaaggtcgtcgtgcacagcaacgagagcggccatgtgcgctcgcgcttggcgcagcaaaccattaaatggtgcaagttgtttctggatgctggccaggcggggtggagattgccaggtacacaagatggtttgtacaaggcatggcgccacctgatcttgcgcgatcctgccttaacccggactgaaaggcgtcgcttggccgactggccgacggattcggtggaagctatcgcgttcgcgatcaagatgttggctctcgaggagcacgaggctgttgcctatctgcgtgcgcacctcgcggcattgcctgggtgggttggcatgctgagttggcgagggcgcgaagagggctgcgagatcgagcttgttgtagattatctggcgctgcgtgtatcgctagaatgggccctgtatggcttaacgggtgctgatgcggctatcacggtgaacgatgatgtgacgaaggatgtggcgttgagcttggcggcactgcatcgctatgggggcatgacgcgatcctcctggcgcaatgttccgatcagcacgcgtacagaactgcttgccatcgtggatcggtttcgacgggtggaacggtggcaactgtggttggaagcctgggaggatacgcaagcacaacgcatggcggcagcgtgcaaggtgccaaccgacgagccggccgaagctgtggcggcacagttgctgttttgcatagacgtccgctcggagccgtttcgccgcaacttggaggcgtcagggccgtttgcgacctacggctgtgcggggttctttaaccttcccatcaagacgcgtcatctggattgttcctatgcccacccctcctgcccggcgattgtcacaccaacggttgaactgagagagtctttggtggaaccttcactcattgcgtatcgccgacgccaaagtggcattcgcttgatcggggatgtctttaaaaaggtaaagcaacatgcgttggcttcgttggtgctgccggagctgtctggcccctggttcgccctgtacagtttcgctcgcacgctcgcgccctccctggccgggggtgcgctggagcgctggaaaagcaaacaggttgcggccaacaccgaacttgtccttgataaggggcaggatgacggtggaacgggcgaaatacctctcggatttaccgtaacgcaaatggccgagattgcgggtggactgttgcgcacgattgggctaacggagtttgcgccgctcgttgtggtatgtggacatgaaagtttgactgccaacaatgcacatgcggcggcgttggattgtggcgcatgcgggggagctgcaggacgctggaatgctcgggtgtttgctgccatctgcaatcgccgcgatgtacgtggcgagatcgtcaaacggtttggcgtatcgattcctgacgacaccgtgtttatcgcagcggagcatgtcacaaccaccgatgaactcgtttggctggataggcccgagctgcaaggcgcaacgcgggaggcgtggaagttgctacaagcagccgccaagcgggcgcagtggttaacggcgacggagcggatacaacaactgccggacgtggagcctgttcggcacccggtgcgcagcgcaacacggcgtgcgcgcgattggagtgaagtgcgtccggagtgggggcttgctgacaatcgcgcctttatcgttggacggcgttcgttgacgaaagggacatactggggtggtcgggtattccttcacagttatgactggcggcttgatccggacgggagtctcctcgcgtccatcgtcgcaggcccggtgacggttgcgcattggatcaacctgcagtattacgcgtcaactgttgctcctgatgtttatggcagcggcagtaagacgacgcagactgtcacgagtggacttggcgtcatgcaaggaaacggcagtgacttgctcgcaggtctgccgtggcaatccgtagccgttgatgatggcgcgatctatcatgcgccactgcgtctatgggtggtcattgaggcgccagacacggcgatcgagcaacttttggcaattgatcacgcgttttgtcgcaaagtggagggcggctggttacgtttggcgagcatcgatccgctgacggggcaatggcgagactggtcagttgggacgagtcgggaacttgcggaaacacaggcacgctaaggtccttggaggcaagcctgtgcattctcttcgcgacgtgggggattcaatgtattggggttggaggaagtacaaagaattagcttgactcttttcttgcactcgtataatatagaagtcgagggatatcatactacatcaaggcttgcgaggttgctatgataaggcaacaggccgcaaagcactgacccgcattccattgaatgcgggtcatcttcgtttacggagatatgtaacttggggggatactgatgctgtatcgactgggactggacatcggcattacatccgttggatgggccgttgtagctcttgagaaggatgaaagcggattaaaaccaattcgcatccaagacctcggggtgcgtatttttgagaaggccgaagatagtaagacaggtgcgtcattggctcttccacgtcgtgaggcgcgcagtgcacgacgtcgcgtgcggcgccgccggcatcgcctatggcgtgtaaagcgattgttggaacagcaggggattatttcgatggaacaaattgaagcgctttatacgcaacgaacaccatctcctgacgtgtatgcccttcgtgtgtccgggcttgatagacgtcttacggcagaagaaatcgcgagagtgctgattcatatcgcgcaccgtcgcggatttcagtcaaatcggaaatcagagttaagggattcagatgccgggaaattgctgaaagctgtgcaggaaaatgaagcccgaatgcaaacaaagggataccgaacggtcgcggagatgcttgtttctgaggcaactgtgatgaatacggaggggaaactcattcacggccggagccacagttctgtatcgaacgtgaggaataaggcaggcgagtatcgccatacggtctcccgacaggcaattgtggaagaggttcgggcgattttcaccgcccagcgcgcactgggaaacgatttgatgagcgaagcgctagaagatgcatatctgcacattctttgttcgcaacgcaactttgacgatggtcctggtggggacagtccgtacggacacggtttggtctccgcgagcggagtgcgacaaagcatctacgaaagaatggtaggtatttgcacgtttgagtacaagcaacgcgaaaagcgggctccccgtagttcgtattccttcgagcgatttcagcttcttaccaaggttttaaacctgaggatctatcgacagaaggacgatggaggaaggtatctgtgtgcgcttacagaggatgagagatcacgtattattcagtgcgcgtatgaacagacgaagatcacgtattcaaagcttcgcaaattgttgaacatgcaggacgctgacactttctctggtctgacatatggtgcgaatcgtgcacgtgaaaagacggaggacgcagtgtttgtcgaactaaagttttatcatgatgtgagaagggcactgcagcatgcgggcatgtccattcaggatattcctcatgaaacactcgaccaaataggatggattttatccgtctggaaaagcgacgataatcgcagaattgaactttcgaaactcgagttgtctgacaacgtgattgaagaattattgccattgaatggggcgaaatttggacatctatctttcaaggcaattcgaaatatccttccttttttggaggatggctacggttacgatgtggcatgtgggttggccggctaccaatttcaagggcaagaggagcaccagaaacagaaactcattccgcctttagacgaaggggaagttacgaaccctgttgtgcggcgcggtatttcgcaagccattaaggtcatcaatgcggttatccgcaagtatggctcgcctgaatcgattcatattgagttggcgcgggagatgtccaagagtttggatgagcggcgtaagcttgaaaaagctcagaaggagaatcaaaaaaataacgagcggatgaaggaggagattcgtgagaaccttggcatcatgcacgtgactgggcgcgacatcgtgaagtataagctgtttaaacaacaacagggcctttgcatgtattcgggcgaaacattggaattgagccgcttgtttgaaccaggatacgcagaggtcgatcatattattccgtatggcgtttcatttgatgatagctatgataacaaggttcttgtcaaggcggagcaaaatcggcaaaagggaaatcggacgccgttggagtacctgcaagacaagccggaccagaaagccaagttgatagcgttggttgaaagcctccaactgtcgcagaaaaagaagaattacctgttaatggacaagcgtgccgtcgacttggaacaggagggatttcgcgagagaaatctttcggacactcggtacatcacgcgagctctgatgaatcatatacaaaagtggctgctgttcgatgaaacagcctctcaacggtcgaagcgtgtgatttgtgtcaatggcgctgttacagcatatatgcgggcgcggtggggactgaccaaggatcgcgatgccggggacaaacaccatgcggcagacgcggtcattgttgcgtgcattggggattcgcttattcaacgcgtcacgaaatatgacaaattcaagcgcaacgcgctcgctgaccgcaaccgttatatgaagcaggtcaacgaaaatcagggcaccatgcaatacgtagacgtggagacgggtgaaacgtttacctgggaatcctttgatgaacgtaagtttcttccacatgagacattggagccgtggccatgtttccgggacgagttgttggcgaggctcagtgacgagcccgccaaaaatattcgcgcaattggccttttgccgtattcggaaagcgaaccgattcagcctatcttcgtctcgaggatgccgacgaggaaggtcacaggcccggcgcataaagaaaccgtccgtagtccgcgaatcgtccgtttggacgacaagaagggaacggagattcaggttactgtctccaaagttaatctgtcggaattaaagctcacgaaagacggggaaattaaggactatttccgccccgaagacgatcggcagctgtatgagactctccgctcacgactgatacaatttggcggcgatgcgaaggcagctttcaaagagcctgtttataagatttctaaggatggaagtgttcaaacgcctgtccggaaggtcaaggttcaagagaagttgacgcttggtgttccggttcacgccggtcggggtattgccgaaaatggcggtatggtgagaattgatattttcgaaaaggatggaaagcacttttttgtgccggtgtacgtatcagacgtcctgaagcaagagctcccgaatcggttagccactgcgcacaaaccatattccgagtggagaattgtggatgatagttatcgattcaagtttagtttgtatccaaacgacgcgattaggattaaacctagcagggaagtggatataacttataaggatggatcgaaagaaccgttagggtgccgcctcatgtactacgtcggcgcagacatctcgagcgcgaatattacggtgaagacacatgatgatttcggtgaggccagacttggcctgcagggtctggaagtcttcgataaatacgtagtcgatgttctaggcggcgcccatcctgttcataaggaaaagcgtatgccatttcgcgtgagaaggaaggagaaatgattgtctcatcgacatgtgatggtgacacgatcggccaagctcagttgccgaaatagccagcttgtcatacgtcaggaggacgagatcactggcgaaatgtgtgaatacaccattcctttggaggacattcgcacccttctgttggaggaccgacagagcatcattacgtcggccctccttgcaagactggccgagtttcggatcgccgtatttacttgtgacgacaagcatttgccgaacggcgtacttttgccttatggtcagcattcgcgagggccgaaaatcatgcgatcccagcttgatatgaaacgtcctctcgtcaaacgtctctggcaggctatcgtgcgccgtaaaatcgagaatcaagctgcatgtttagccttatgtggttgtagtggtgaagaggggttgcttgcacttgcgaacagggtggcctctggggataagggatccatggagtccctagcagctcggatgtacttcaaacatctcttcggcaaggcgtttaagcgaggctcggatgattttataaattcagcgatgaactacgggtatgcgctggtgcgtggtcaagtcgcccgaagtttgtgcgccttcggctttcaaccatccatcggtctgcagcatcacagtgagctcaacaatttcaaccttgcggacgatctcatggaaccgtatcgacctattgtcgattacgttgtggcttcagagctcgacgttgactcgccggtgctttcgaagttacacaaacgacgtctaatgcagattcttacgcaaatggtttggttggaaaatgaacgatacgatctcactgcaagcattgaagcaatggtttccagcctttcgaatgcgatatcgacggaagacccaagtgctttgcaattgccaaggttaacggaggtacagatgggggtttatgagtaggactatgcggctaatggtgttgtttgatttgccagtgaccacaaaagctgaacgaaaggttgcaacccagtttcgacagttcttgctccatgatgggtactatatgatgcagtactcctgttattgtcgtatctgcggaagttatgagatggccgaaaagcacgagcggcgccttcaagctcatgtacccgagaagggttcagttcgaacactattggtcacggaaaagcagttcatgagaatgaaaatccttgtcggcaactatgtgccaaacgagcggagaatgcaaagtgagcaattactacttttttgaaaagtggaccatgaacgatgaaaaatggaatggaaattccttttttgaaaaatacacgagcgtccaatcccttatctcacaagggattggacgctcgtgtatcataccacatcgaggcttacgagggaactatgacaacgtgccatcatgaagcaaacaggacataatcataccacatcgaggcttacgagggaactatgacatacgttcggctttctgcaagcatgagtggatcataccacatcgaggcttacgagggaactatgacccaccacgcagacactggcatcaagcaacgatcataccacatcgaggcttacgagggaactatgacgatgctggttttatcgacgaggaactagacatcataccacatcgaggcttacgagggaactatgacctatgaaaccggaaagaacgaacccgacgtatcataccacatcgaggcttacgagggaactatgacttgatccgacgtccacgagatctcctcttgatcataccacatcgaggcttacgagggaactatgactttcaggaaccacatacaccgtttttatcgatcataccacatcgaggcttacgagggaactatgacggatttctgcatctgaaaaaagaactagcaatcataccacatcgaggcttacgagggaactatgacgtattaaacgcataccctaccacacccacaatcataccacatcgaggcttacgagggaactatgacagctgttgctcatcccacatgcgcgcgttcatcataccacatcgaggcttacgagggaactatgacgcggcttttcctggcacgcaactcgcgctcatcataccacatcgaggcttacgagggaactatgactctgaacaacgcgcagatcggcgtggatgtatcataccacatcgaggcttacgagggaactatgaccctggaaacaacatcgtgcgtgtcttccggatcataccacatcgaggcttacgagggaactatgacgaccagttgtagccattcacgtcactcacgatcataccacatcgaggcttacgagggaactatgaccatacctcgtgcgccgcgatactctcgatgatcataccacatcgaggcttacgagggaactatgaccctccgtcttgcacctcgtacgctggttgcatcataccacatcgaggcttacgagggaactatgacatccgtggagggcacaatgagtggattccaatcataccacatcgaggcttacgagggaactatgacctctttcatttgatatgtattcaacaccgtatcataccacatcgaggcttacgagggaactatgaccttgatgagcatgtacgaatcatccgcgaaatcataccacatcgaggcttacgagggaactatgacttcatgtgggcacacacgcacatctaccggatcataccacatcgaggcttacgagggaactatgaccgcaacacacgattcaatttgataaactcaatcataccacatcgaggcttacgagggaactatgacctgattcagtgtgatgatctgcatatggttatcataccacatcgaggcttacgagggaactatgaccgacatggacgcgaaaaaagatgtgcaggtatcataccacatcgaggcttacgagggaactatgacgcgggtgcaatagcggcggccgttgggacgatcataccacatcgaggcttacgagggaactatgacaaattggcactcccacagtcgatcatgaatatcataccacatcgaggcttacgagggaactatgactgcgtgaacttgctaatcgatatgatttgtatcataccacatcgaggcttacgagggaactatgacatcagcgccactacgcttcccgtgttgaaaatcataccacatcgaggcttacgagggaactatgacttgagttttttggtggcgcctttcgtttttatcataccacatcgaggcttacgagggaactatgactagaggacgttgatataggtagtattgtgcatcataccacatcgaggcttacgagggaactatgacgcaagaacgcttgcaggtgttgtttgtgaaatcataccacatcgaggcttacgagggaactatgacatcgtcgaacgttatatgcgaatcgagcaaatcataccacatcgaggcttacgagggaactatgactgcaaaaacacaacatgttctcgctggcggatcataccacatcgaggcttacgagggaactatgactgaacattccggccacatatgccaaaactcatcataccacatcgaggcttacgagggaactatgacaggttattcgaacaggaatgaacgggcaatatcataccacatcgaggcttacgagggaactatgacatcgccgggtcgatatcccattgtcttttcatcataccacatcgaggcttacgagggaactatgaccttctgcacgagctccgtcagagcgtcgagatcataccacatcgaggcttacgagggaactatgactaagacgaaggtacaacgagaatcgcaccaatcataccacatcgaggcttacgagggaactatgacgatggagtacggcgatctcgtcatgtcgccatcataccacatcgaggcttacgagggaactatgaccttgacgacgtagaaacggcaacgtttgaaatcataccacatcgaggcttacgagggaactatgaccttgtcctgcttgcgcgcaacatagtcctgatcataccacatcgaggcttacgagggaactatgaccaacgaacgtctgcatgacgcggctctataatcataccacatcgaggcttacgagggaactatgacaaccacctctcgctggagtcacttaacaacatcataccacatcgaggcttacgagggaactatgacatcgacggcacggtttatacgactttgcagatcataccacatcgaggcttacgagggaactatgacatctacaatgctaagggtcaggctattgtcatcataccacatcgaggcttacgagggaactatgaccctttcgcccttcacgcgcaggattacgcgatcataccacatcgaggcttacgagggaactatgaccaggtttttagcttcggcattagctgcaagatcataccacatcgaggcttacgagggaactatgactctgcaaagtgtattaacatctagttcgttatcataccacatcgaggcttacgagggaactatgactgctgtcttgtgtctgtattcgtttgtgctatcataccacatcgaggcttacgagggaactatgacaatttttaggtgtgtattttgcatgtgatgatcataccacatcgaggcttacgagggaactatgacggatttgggcgatacagttcggaaggtcatatcataccacatcgaggcttacgagggaactatgaccattctcgcgcgtggttggacactacacagatcataccacatcgaggcttacgagggaactatgacacgcaatagatggtgcttcctcaaaaccagatcataccacatcgaggcttacgagggaactatgacttcaggatcaagcatgtcgggatcgacagcatcataccacatcgaggcttacgagggaactattccgccatcttataccatgtgggagttaagaaaggctcctacctgcacgcttgagtaggtgcttcgaatgaagtctatgaactagatggccaaccataggacttgcatcatacgaaagatacgactttcgcgtattcatcatatgatataggcaaggcccacatgaggtgaaacgcatgccaaagaaacaatacgtgcttacgatggatgaccgcggatacattgctttgccaaaggaactgtgtgaccagctgcatattcaacccggagacacattgtgtgcgcgtattgatagggacggctttcaagtgcacaaggtacgcaatccctttgacgcgcttgcaaaagatgcaattcagcagcatcaagagggcaagacggttagtcatgaacaactcctaaaggagcttggattagattgaactggaaatagcatcgtattaaaatcaatagttttacgtgaggttcttgtttaaatatacctgtctaagtgctcgtgttacccactgagtgtaccgtttgttacgtctcggtcacaccacgtaacccgttcggatcgcgaacttaacactgggtcatggttctttcgttaggccctcaatcagctacaatgtcctattctctgcctgcccgacatagattcgatgtggaggacattctactttgggggagacacgatgggactcgtaaatacggcgtttcttgcgggacatggcaaacttccagtcggatcggccgcgaagacggcatttgacacactcgctgtagtcgtcgagatcgaaacgcgccgcggcgtcattctgtcagcggagtgcacgcttgccacgcagctggggcgggacttcgtgtgcagcttgctgcgcgggtggtccctggaagatgggatagagcccatgatccaacaggtcaaactgcactatcacggtgccgcaaaggccgctatcattgctgcgttgaaagatctggaagctgaatacacgcgccaggcggaggtgtgaagtcatacgccagccagacgagcataggatgaaagtatccaattgcaaaggaaagcgagactgtcatgtttgagttgctcaattttccgttgggcaaggaatcaaagatgcaccagtcggtcaggaggccgaggtgcgtctttttgttttgtgcgcaccgatccgttgggaggtggcaagcccatgacaacgtccattgcctgtgatgtgctggttgtcggcggcggcaatgcggctatggcggccgcgttgtcggcacgcgaccacggtgcaagcgtgatcgtcgtcgagcgagcgccccggttctatcgtggtggaaacagcaggcatacccgagattttcgcatcatgcatacaaggaccacggaacacatgttggacgtgtatccgccagaggaatttctcgatgatttgcggcgcgtggctggcggcgaaatggatgaggaattggcgcgcttagtggtggagcgttccgaaggtttgcccatgtggttgtcccagcaaggcgtgcgctggcaggaaccgctgtctggcacgctgcacctggcccgtaccaacttgttcatgcttggcggcggtcgagcgatgatgaatgcctattatcgcacggcagagaaaaaaggtatccagatctggtatgaagcgatggttgaggacatcgaggtgacagcgggcgtgtttggtggagcgcagatccgccgcggcggcgaagtctgcttggtccgagcttcggccgtcgtgtttgcggcagggggttacgaggccaacatcgactggctgcgacaacactggggcgatgctgccgataacttcgttatccgtggaacccggtacaatcagggcaacgtcattgatttgttactggcggccggggcaacgccaatcggtcacccgcgggcatttcatgcggttgccgtcgacggtcgggcgcccaaatttgacggcggcatcgtcacgcgtctggacagtgtgccgttcggcattgtgatcaacttggactgtgagcgattttacgatgagggcgaggatttctggccgaagcgatacgccatttggggcggtctgattgctcggcagcaggagcaggtggcctattccatcattgacagcaaggtgatcgacaagtttatgccatccgtttttccacccatgatggctcattccattgccgatctcgcaatgcagttgggcctggacgcggatcgcgtgcaggcgaccgtcgacgcatacaacgctgcagtgcagccgggcaacttccgtccggacgcacttgatgactgtcatacggtgggcatcgacccgcctaagtcccactgggcacagcggatcgatacgccgccattctatgcttacccgttacgcgcgggcattacgttcacctatcgcggtgtgcgcatccagcgcgatgcgcgcgtgcagcttgtcggcggggatgccatgggaaacgtgtttgcagccggcgaaatggtggcgggcaatgtgttacgccgaggctatctcgccggctttggtctgacgatgggcgcggtttttggcaggatcgcaggggagggagcagctcgtgtcgcacgatgaattgatggaggaaggcaagcggcagatgcgcgtctgcaacgcctgtcgttattgcgagggtttttgcgcagtatggcgggccattgagtggcgccgcgatgttcaggatggcgatctcgcctattttgctaacctgtgtcacgattgcaaggaatgtgtatttgcctgtccgtttgcaccgcctcatgaatttggcgtgaatcctccgcgtctgttcgcctccctacggcaagcgtcctaccgcaaatatgcgtggccgggcccgtttgcccgcgcgctcaaaggtcgcagcggctacgcgtgggctgccatcggcagcgtggtactgctttgtctgatttcacttgttgcaaatgggagcctgtttggtgtccggggtgcagcgttttacgctgtgttgccagaatcggtactggaagttgtgtttggcatgttggccgtgtggctgatctgcggttggctggtcggggcatggcgattctggagcgacatacgcgctgtcaactcgagcaccgtacaggtgcgcgacatcctgcgggctgcgcgatacgcgatgagcttgcgctatctaggcgggagcgaggatgaaccactgtcgcgatcgcgcaaatggtttcaccattgcgttgtatacggattcctgctcgatttcgcatcgacgtgtttggcggcgtatgattcgcacattctgcacgaagaggctccttatccagttgggagtccagtcgtcttgcttggcatcatcggtggcgcaggtttgcttgttggatgtgctggattgctgtttgtcaaggtgggtatgaatcgggatacggttgacgagggtgcgtatcagtccgggcgtgcatttctctggaccatgctcctcgtggctgccagtggactgctgttgcttctcctgcgcagtaccacggtgatggcggaggtgctggtgatccatctcagtttcgtggcagccctcttctttacagcgccatactcgaagtttggccattttgtctatcggtgtctggcgcttgtacggtacgcagaagaggagcggaagcatcactcgcccggtcattgatgcgatggaatggtaagcggacagcggccgtttgatcttgtttgttgctctccagtgagggaaaccaagcatgtgcctcagaaacagctcagccagcttcctatgttgattcttgttttactagcccattgacatcatgacgtaaccgcattatggtaaagatcatcgcatagcctactgctgtttcattgcgagtcgccagacatcctctggcgaatcatcgcgtgaagcccagcatagtccgacattcggattgtgctgggctttttgtgttctcaaggggggcgattgtcatggcatggcgcacgattccttgcgcgatttatcgcggtggcacgagtaaaggcatcatcgtgcgcgggcgcgatataccgagcgatccgaatgagcgcgatcgcgtgctgctgcggctctttggcagccccgatccgcgacaaatcgatgggcttggcggcgctacgccgacgacaagcaaactggcgattgtcgaagtttcgtcgcgggacgatgcagacgttgattacacctttggccaggtcagcatcgataaaccgtacatcgactatcgcccaaactgtggcaacatctctgccgccgtggggccgttcgcggtcaatgccggtttggttgaggtcgatggtgatggcatgacacaagtgcgcatctataacacgaacacggatgccctcattgtggcgcgttttttggtgcagggggggcggtttcaggcggctggcaacgcccagattcccggcgtgccgggagctggatcgcctgtgtatctcgacttctccagagtggcgggcggcgtcacagggcgcctgttaccgacggggaagcggaaggatgaactgttgcttgcaaatggacgacgcctgactgtgacgattattgacgcaggcaacttaacggtattagtggatgctgaagaactaggtttgacaggatgcgagattcgagagtcggagatggtgaccgcttggagtgtcttggaagatgtgcgtcagagtgtgggcaggatgctgggtttatacagggagggggaagttgtcaagcccgagacacatgctttacccaagattgcgtttgtacacaggcccattgcgtatcgtacaaccgacgaagtgctggtttcggatgagtcgtatgacatttcagctcgtgttctcaccatgggaaggctacatccgacatacgctgtaacaggcgcgatcgcgctggttgtcgcgtgcaaactgccgggcacggtggcatatagccgtgtccgtaaacgcggtcgatcttctgggatgatacggattggccacccggcgggtgtcatggaggcgggggccgaagtcgaagacggggactgtccgaaggttgcgaaagtgacactcatgcgtaccgcacgcccgctgatggcgggtatggcgtggatctgaaaggtggtgaggcagcggcaagacgttcatggcggattttgatgtatgcgctttcaaaaataagggttg

SEQ ID NO: 1584 - DNA, 14885 bp, synthetic construct
  source 1..14885: mol_type = other DNA
  misc_feature 1..14885: note = Synthetic
cacttttctgaagaatccctttgcaagcaagagacgaaagggcgagtgtcgttttggtacggattttttcatttatcgattttggacgggacatgaggattttaaggaacatggacaggcccgaaagcgtacaagcgtgacaagctccaaaatccttatcgatcgcgcgaaggacaagcgatcctcgaacaagctgtggtatacgaaagcctgttttcccttgaagggattgggtagtcaagcctgtgttattgggtaggtaaggtaggatgattcggtaggcagcgtcaacgcgtttacacgtttgtttggataaacggttttgaggcctgatggggtaagtgcttttaggatgacgtaaactgagcttgtcgccgtgtgggtggatgtaaacggaaacggatgatgaagacgtatccgtggacgtttcgcatcatcgaccaaggtgatgtccaatttgacatttacgtttgtgaagaggtttgcgagaaaaaggtgacaagctggagggtctaagtgatcggacaagcgagtaggtatagagggaaattgaaaaaaggcggtgtctttcaaggtgaaaaaacaccctggttctctcatggatcaaattcctgcatccgctcgcgccctggtcgaacaatttgatgaaacaaaaagaaaagggagttcttttgaaaaacagcacgtacgacaaaccttttgggttcgccgcgatcttgcgaaacgggtggatgaattgtgcaaaacgcgaagtgggaatggttttttcctgatcaacgtgatcaaacgaaactctggaactcagaaaaaacacgttttcacacgaaaacattaaaattgggaatgggttgcgtaaattccagtctgctcaggggtgcattgagtattttattgaacagtacccttattggaggaagatcgggaagttttaggccaaattaaaaataggtgagtccatggtaggagaagataaaatgctgagcaacggaaagatttctcagcgccttcattcgattgagttaaactgcaatcgagagatggttcgcaatgatcgattcgtgatcgctgtatggttttatcgatagggtgtcaccctgcaatttccttgacttcaggattgcaggcataaaagagaaaggatgtatggcgtaacagaatgtgcgtcatgacgaacctgccatgcgcgtggtaggctcctttttgtgctttgatacgatttacaaagggagctgtgtcatgcgatcttttaagaagggctcggcgacactggctcttgcgatgttgacgacatcgatcagtccaacgtttgcctctacgagaccagtgcagatcgaaataattaactgaaatttataattaataataaacggcgaagtgtgcttgatttttcgaagaattaatcgtattattcttttgagggatttatatcacatcgagaactgcgaggttgccataataaggcaatatgccgcagagcactgacccgtagcctttaatggttgcgggtcatctcattttatgaaatgaatctatgctttggggggacacagtcatgagttaccggattggacttgacgttgggattacatcggttggttgggctgtcctggaactgacaacgagcaatgaaggtaaaagaaaaccatgtagaatcattgatctaggagttaggatttttgaagcagcagaagatcgtggggagtcactggcatctccacgtagattagcgagaagttctcgacgccgcttacgcagacacaggcatagaatagctcgaatcaaacagttgatggatagacgaggtattatgccagtcccggaaatcgagaaaatgtatacgactgccaactcaaaacggcccgatgtctatcaacttcgtgccgaggcactggataggctacttaataatgaagagtttgttcgagttctcatacatattgcacaaaggcgtggatttaaatccaaccgtagctcggagttactcgagggagagactggaaaattgctcaaggcagtgcgagacaatcgggaattcctacgccagtctggatatcgcacggtgggagagatgttgtttcgggacagccgatttacccaaaaacgcaataagccaggagactatcgccatacagtcgggcgtgacctgctgctggaggagattcgtttagtctttgctgcacagaaacaattttctaacccacacgcctctcaaaactttcttgaggaatacctgtctatattcgcttcccagcgcaacttcgatagcggtcctggaggaaacagcaggtatgctaacttaatcgagggtatgataggaacatgtacttttgagagaagccagaaacgcgcgcctaaagcctcctatgcctttgagcgttttaatcttctaactaagctccagaatatgagaatttcccacaggaatgaggatgggactcgcaaatctgaaaacctgtctgacgatcaaaagagactaatcatcgatttggcacaccaaaagcaagtcctaacttatacggatattcgtaaattattaaaattggatgaaaattcctctttcactcccttgacttatggaaatgcaagggctcgaaaggaagtggagaaaagcaaattcgtttcgatgccgttttatcatcaagtaaaagcatcttggcaaaaaaatgggctcgacatggctactctaactccagaacgactagatgaattcggctggattttgtcagtatggaaaagtgacgaaaaccgaagaactaaacttgccgccttggatctctcatcagaggaaatagaaagcttacttcccattggaactggtaaatttggccacctatcctttattgcacttcgcaagttaacacccctgctcgaacaggggttggactatgataaagcttgctcatctattggctatggccaaagtgaatttcttggcattgaaaagacaaatcgcctccccccggttagtcatgaacagattaccaatccggtggttctgcgtgcactttcgcaatcggtgaaggtaataaactcgatcatccgcgaacacggaatacccgaatctgtccacatagaacttgctcgtgagatgtctaagacatttgacgaaagaaaccaactgacaaaattacggaatgaaaacgaacgtactaacaataaggtaaaacttgagattgctaatatgcttggtgtttccaaggtgtctcctattgatattgttaagttcaagctctacttacaacagcaagagcgttgtttatacagcggagaatcgtttgaccgctcacgattatttgagccaggctatgcagaagtggaccacattatcccttacagtatctcatttgatgatagttacaataacaaggttttggttaagactggcgaaaacaggcaaaaaggtaatagaaccccagttgagtatctcggtgtggatccggctcgcttagcccgttacatcgctctagtagacagcctgcacttgccgagaccaaagaaaaataatttactgcgtgatctatcaaaggacatcgtagaaagagaaacatttaaagagagaaaccttcaggacacccgttatattacagtggaattggcttctcatatcgagcgttatctcttattcgacatggctaattccactcagataaagcgagtggtatccgtaaacggtcctgtcacggcattctttcgtaaacgatggggtctcagaaaagaccgtgaactaggagacctacaccatgctcaggatgccgtaattgtggcgtgtgttggtgacgatctcatacaacgtgtgtccaagtacgataaattcaagcggagttacttagctaaccccaaagtatttacaaagtcattcgacaagcagacgaacacggtaagatatgtggacaatcagactggagagctgtttacttgggatagctttgatgatacacaccttgccctaaaggataatctgttcccacaggcatggcctcgatttcgcgatgaactacttgcacgactgtctcctgacccgacttacgctgtccacatggccaatatttccaacatatcgaaagacttaatgcccgttttcgtttccaggatgcctaatcgaaaatgtactggacccgcccataaagaaacagtgaagagtccaagacaacttagtgacggagtagtcatttctaaagtgagcctatcggagttaagactcgatggcgagggcgaaatcgaaggatattacaatcctcaagacgacactgtgttatacgctaaacttcgtcgtcttctacaagaggcaaacggcaacgccgaaaaggcatttgcctcacctgtatacaaggtatcaaaagatggaaaaacgtctacactggttaataaagtaaaattatcagagaaggccagctatggtgtaatggtccaccaagcacgcggggtggcaactaaaccctcaatggtacgtgttgatgtatttataaaagaagggcgtttttacttagtcccggtttatgttccagacattgtacgcggacttcttccgacgagagctattacgcccgggaagatctatgaagaatggagagtgattgatagttctttcaggtttcaatttagtctttatcataacgacgtgatcaaggtaaaacccaaaggaagaaccgtcattaagtttaaagatggcacagaacgattgcttggagaagaaattgtctattacaaatcaacaaacatagccaacggaagcatttttgtaaaaacgcacgatgacgctggggaagtcaagagtttaggtgccaaaacgctgactatttttgaaaaatacaacgtcgattacttgggtaggttgacgaaagttcatgacgagtcaagactggagtttaagttaaaagggagatgacggaccttgtcgcatcggcatgttttgattagtaatccggctaaactatcgagtcgaaatgaacagttagttattcgacccattgtaactgacgctagtggagatacgtacaccattccacttgaggacatacgatcggtaatgctggaggacagggcgactattgtcacgtctgccctgttatctaaacttgcggagtttaacatatctctatacacttgcgacgagaaacatctgcctaacggagttatgattgcctacaaccaacactcccgtgcactaaaagtgttgaaatcacagttgcacatgaatcgcccatttgccaaaagactttggcaatctattgtcaaacgcaagattgagaatcaggctgggtgcttagaacaagcgggttgtcaaggcggttcccgccttcgtactctcgctcgtactgttgagtccggggatcgctctaatgtagaatcccacgcagcaagactctactttcaatctttattcagcgagtcgtttgtacgtagaaacgacgattttgctaactccgcaatgaattatgggtacgctattgtaaggggtcaggttgcccgagcgctatgctcttatggctatctcccgtccatcggcctacatcatcatagcgagttgaataatttcaacctagccgatgacttcatggaaccgtttcgtcctatcgttgacttgcttgtcgcaagcgaactgactggagacgagcatgatgatctcacaccgcgccataagcaatgcctatatggcgtgctggctcaagaagtacttgtcaacaatcaaaagtttaacgttactgctgcgatcgatgtaatggtttcaagctttactcattcaatttcaaccctagacccaggagacctgcttctgccatccatcacagcgattaggacggaggtctatgagtaattacatgagacttctcgtattgttcgatttacctgtcggcacggggctcgagcgcaaggcagcgtctcgattccgtacttttctactcacagacggctactacatgattcaattttcatgttactgtcgaatttgcgggagtttcgagatagccgataagcacgaacgtcgtttagaagcaaacctaccagtaaaggggtcggtccgaagtctagttgtgacggagaagcaattttcaagaatgaaaattcttgtgggagaacacgtctccaatgaggtgaaaattcacagtgagcaacttgtgcttttttgaaaaacgactgagcataaccttgtggatagttcccaagttgctttttaactcaaaaaaactgccaaaatacccttcaaaagcgggattttagcagaggtattataccacatcgagaactacgagggagcgataacacacgcccgtggcggtgttggacggtgtttattataccacatcgagaactacgagggagcgataactctacgaacggttggatgatctcgaggtttattataccacatcgagaactacgagggagcgataactctcgagctcttgaagataggatagttctaattataccacatcgagaactacgagggagcgataacattgcaatcagtagtgttgggagcattacgattataccacatcgagaactacgagggagcgataacactatgttgaggctgttaaccctgcttatgattataccacatcgagaactacgagggagcgataacagtgttgcttctggcaattcaagatcataaattataccacatcgagaactacgagggagcgataactccagaaaacagcttgcaagcattgcaaaattataccacatcgagaactacgagggagcgataacacgactactacgatcctgagtcggagaagaattataccacatcgagaactacgagggagcgataacccagattgcgtgatcgcaagtgactggaatattataccacatcgagaactacgagggagcgataacccattgattcggccttgttttatcgcttcgattataccacatcgagaactacgagggagcgataacataggagccggaactgtaacaaactcttctattataccacatcgagaactacgagggagcgataaccatggggtttccttctttcgggtggtttgtattataccacatcgagaactacgagggagcgataactaacggttccaagactgtccacgatctccgattataccacatcgagaactacgagggagcgataacacactgaccgatatccacacaggcgatacattataccacatcgagaactacgagggagcgataacttgagactctcatgatcggttggtcaatgaattataccacatcgagaactacgagggagcgataacaagatcttttgggttgtcataggacaaatgattataccacatcgagaactacgagggagcgataacgtcacgcaaacaatagggcttgcggataacattataccacatcgagaactacgagggagcgataacggaactgcaacaacggcgagtgctactgtattataccacatcgagaactacgagggagcgataacataggagccggaactgtaacaaactcttctattataccacatcgagaactacgagggagcgataactgcatcaaccctttgaccgtttgcgctacgattataccacatcgagaactacgagggagcgataacaataacgtggtggcggcgattaacggcgcgattataccacatcgagaactacgagggagcgataactcgctagcacatccgcactgctgtctgatattataccacatcgagaactacgagggagcgataacagcgcacgtcgaatttgttgccgcgatgaaattataccacatcgagaactacgagggagcgataacctgcatttgtcacgctaggatacgctttgtattataccacatcgagaactacgagggagcgataacccccggctgcacgccttttgcaaccccactattataccacatcgagaactacgagggagcgataactacacgtttgcgatacaaaatgcagaagggattataccacatcgagaactacgagggagcgataacacccggctggatcaagtcaagtcccggcagattataccacatcgagaactacgagggagcgataactacaagtagaaaggggcgtgaagtatttgaattataccacatcgagaactacgagggagcgataaccatctctgtcgctttgttcgcgccagacgcattataccacatcgagaactacgagggagcgataactcttcttcgtcgacatccaactcttggagattataccacatcgagaactacgagggagcgataaccgtggaggctgtctaggatcgcgcgatggcattataccacatcgagaactacgagggagcgataaccgcatcggcgtcaaacccgcggaccttgaaattataccacatcgagaactacgagggagcgataacagtaggcgatccgatgttaaaccccgtgccattataccacatcgagaactacgagggagcgataactctataaaggcggtaactttttagtacaaaattataccacatcgagaactacgagggagcgataacctgagctcgtggaacgtttgcgcgtgcccattataccacatcgagaactacgagggagcgataaccatcaaagcgatgggtgttaatttttcgatattataccacatcgagaactacgagggagcgataacttgcggtcacatcaggaatttacaaaggacattataccacatcgagaactacgagggagcgataacaccagtcttgaagaagagatgaaacgagcaattataccacatcgagaactacgagggagcgataactgcggtctccgtgtattgtgtacattgacgattataccacatcgagaactacgagggagcgataaccggagaagacaagataacaaattgatcgccattataccacatcgagaactacgagggagcgataacatggacaagcagagtcttttaagaggtcgcattataccacatcgagaactacgagggagcgataaccggggctcatccctcgatcaggcaacacaaattataccacatcgagaactacgagggagcgataacttcatcaccgcgtcatcgacaacaatcggcattataccacatcgagaactacgagggagtgataacaagtaacttattctcgtcaggatacaagttattataccacatcgagaactacgagggagcgataacagatgaggcgggcgaccgagtgggtggagcattataccacatcgagaactacgagggagcgataactctccgcgttcgatgttcgcgacggactgcattataccacatcgagaactacgagggagcgataacctggttggacagcaggaaattgtctttgatattataccacatcgagaatggaacagtatcattttagttgagtcgacaaactcgtaattctggacagaatgataaaaaaaggaagaaggaatccagatgcgagtgtacgataaagaattcaaagaagaagcattaaaattatcttatgaaatcgggcccacagcggcctccgaacaactgggggttccacccacaacgctgtacacatggaggggtcaaagcaagaagcatggatccttggcatttgtagggagtggccaccagcgcatagatccgaaaactgccgaaatgaaagggttggagaaaaagatcagggaactggaatccgccaatgatatcctgaaaaaggcgttagcttttttcgcagagagccaaaagaggtagctgcacgagacttgtttcgttttatagggattcaaaagaaaaaagacgaagccaagcacagtgtaaaggaaatgtgtaaggttttgcatgtcagcgaagccggttactatcgctggcggcgcactcaaaacagtccctataaatatgatgatcttttggcgaagatccgtcagattcgtgcagaaaacaaggactatggaacgtaccgcatctttttggccttgcaactgttccacagctataccggtacctattatgtggttcggagactttgcaaaacgcatcagttgatgctgaagaagaaccatcatgccaagggaacgaccaaggctgaccctgctgcacaagcgagcgaaaacctgataaagcaggatttcactgccacggctcccaatcaaaagtggctgggggatatcacggagatccccacggcggagggcaaactgtatgtcagcgccgttttggattgttatgatggcgcgattgtaggatttaagatggcggacaacatgaaagccgaactctgtgtcgcgtcattcaccttggctgcccaaaaacatcaagcctttggcatgacgtttcatagtgaccgaggaagtcaatacaccagcaagatgtaccgagaaaccttggccaggtttggtgcagtgcaaagtatgagtcataccggaagatgctatgacaacgccagaatggaatccttttttgccacgctgaaaaaagagtgcatttacaaggttaaaacagaaacattgaagatggaggtggtcaaaagcatggttttccgatttgtcgaaattcactataaccggaaacgaatttacacaaccaacgatggttatccacctttgatgaaacgtcgtcaatattaccgagaccagctgtccaaggtagtctaaaaagcgggtagctaaggtcttgctccaaccatctgtcgcaagaccgtttttcattttgtttagggattcattcgtcaaggtcaggtcgtattttccagaaaagtacgtctggaaaatctccaccttacccttgacttcactcacaacccctaggcgtagccatgaatcggtattacgagtttcgggactaaactaaatttgacaattccaaatttgaaaagagaattttgggctttgacgcgatgtggtccgagtggtgtaaaagggacatcaagcgtttgcgtggattttcgcgctcgcatttctgtggtagaaggtgggtcccccgcgcggtgcgggggatttttatggttggcgggaggaagattgtcgcggcatcgcgagaaagtggcattggcgatggaacatgtagaaatcaagatcgtaaaggatcaaatggaatacgaggttgcgcgcgatcaccagaaaggtcttgataataccagtgaactgtggggtgtgatggacgaagatgcatggaacacgctccggttcctttccttcagaattatagcgcaataacgcaatggtttagacaagccccacaatgcataaccatggtgcactcaggtcgaatcgctattgcagataagcttcctttagtcccataaagaaatccctcccgatttacggagggactgtcgaaggttaattccaaatgtccacgataggtgtaccattttcaattctcatctttgcttcagagatgaaatcttttccccactgattcaactctgatacatcgggatggtttttgtacatgccaacatatacgataatttcccgtaaacgaaggaataatgggatttgcatcatccagtatttatcaatttcgtgttcttgagaataccccttcatgaaatgctccatgaagcgacttgcctgagattcacgaagttcccttccgtcatctcctccatagacatacaccaggtagtacatctgagtgacgatatcatttataaaccaactgtactgtgcttcatcaaaatcaaacaaaacaacccgtgagccatctaccctaaaattacccacatggacatccccatgcgtaagtccaaatgattggcgttctgcaggtagtgcctgaatgttactgatagtgttcctacatccctcgaacatattgacttgatcactaggaacaaatccatggatgtttgtcagataaaagttgtcacgccattctccacgctgaaccctcttagaggaaggtaagaacgacttggacacagcgtgcagcctgccaatcgctacgccacaattgtagtacagttcgtagtcatgtaaacaatcaggataaggaacagacctgccttctgcttttacaaacgatgcaacagtgaagcccgaaccatgttgtccaacaaattcagccaagtttcccctcacggatgcaactggagcagacactgccactccattcttcttcaagtagagaagccactcaagttcgcctctcactaaattgacgcttcgatgtgcgcttggtgtaaaacgaagaatataggtttttgcgccactttgatattcataaacaaagttcatcgacccatgacatggagtcaatgattctagtgatacaccaaataaagaggctccatagccaactatatcgccggtgaactgttgcagaagattcttctccaaacttattctcctctctaaagatgttgttagagggggacgttgcgtagtttaatgcacctaaagcaatgcattcttgtcactccttccatatctcaaaacatcatgatgataattttcttcagcataactgcccaagtgcgacacaacctttgcgtacctcgaactgcataatcataaaagaccagacgagacatcattcttcatacgatcctacgcccgttatccgaataacaaaagctctacttgtggtatccacgttccgaattcatctgcttgtaaggtcatccatcccaattcaatggccggtatgaagtttttctcttggtcatcaacgaataaaacaatctgttccgcatcaagtttatttgccaatacgtcatatatctcacggtgcggtttgcaacaccctacgtcactggatatggtaaaagttcttatgtatttgcgtacagtggccaagggtttcataagccattcggtacgatggttacttaatagatggatgtctgctatctcgctccatcttgccaaatggttcaaagctggcaatggttgaaggcttgattgtaaagagtctttggcgttgttcaagttgacagttgggaatgtcacacatagccgattccaaaattcttcttccgtaaatgcaccagtccataactgttctcgaacgttgaccttaaaatccgagactaggtcttcatacgaaatacttgcgctatctgataacagttgccaaaataggggtgacatattggtaatcagcactcccgcaatatctagaacgagttgtggcttattgcccaaaacctcgcctcccatcccattatctcagcatgatttcatatcgccattacgaactgaagattcctgcccgaatgcacatgagtcatcgcggtgacactctgcataatcacgcgctggtcaagcgatggtgatattgcttttttccacacctgaaagctgaaggacaacaggggtaaatttgcatctatttgtgtatctaagattacggtaaggatcgatcaggttttccttcgaatgatccaggcattttccgctttatcaaaaccaaccgtcggataatatgtcattgccgtaggggcagacaataacaatagcgatacttggtcagatcatcgtaactgtgtttgacgaatcagttcttttccgacaccacaccgttgataatccttgtcaacggccaaatcggacaagtaacaacaaaagcagaaatcagtcagtgaacgagccattccgactaattttgctccgtcccaagctgtgatgataaggtttccgtgatcgatcatcttttgtatacgttccacatcagccgtcggtcgattgattccagagcgtttgaaaacatccgcgacctcttctccagttattggtgcattgaagtgatattcgatcgaagacaatttcaatcctcctctttttaccacacaacaatcattcaacgcgctgtggattcgctcattcgaggtattcctccgatcgaatgggattcaaatagcgggccatggatgtcttagctttctttaatcccacactccgataaaaatcttcgttccctgtcgtagaaatgagatggacgcatgaaatgtcttgcaaatgctgaaggaggtcgttcatgatcaatcttccgatgcccatgccttggtaatttgaatggaccacaacgtcatagatggctgcattaaaaacgccgtcggatagcgcccggccaaagccgatgacacgatcattgtccatcgcgagggtgacatgcgtgctggcgttgaaaattttcgtgatgatgtctgcgttatgtgtcatccagccgacggatgcatagacgtcttgcagttcctccgggttgacggaagggaagtcattgtgtagcttgatgttcaatcgtaaccctccgtttcgcacaatgcgggatgatggaaccgttcagaactgcttttatggcattaagaatacgagggaatgctgtattttgtcgtattatctatgattatttatacaattcgattggtttgctttcttgaacatcagctccctttagagacagaagagagtgaattacagcaatgctttagtgaaaagtatctccaacggtttgctgtgcaacaataaacaacctgcgtctcgataccctaactttctatagaagtgctgagcatcttcattcgacaatgttgatgtcatcacgagatcaaaacctttttgtttcatttcattttcccagcagagaacagcttgctactccacgccgtttcctcgatgcttctcgtcaacccaaatcatgtttatgaatggtgtgttgtcccaaaagtgcccatacctaatgtttaagaacacgacatatcaatttacaaatcgatccaaaatcgtagtagaacatttccgttttcttcaaagtagcttgtatcctgaatcccaccattgtttcgtattgtcttttcagagcctgtattatccttatggcaaatgactaaaactttttctatgcctaactcacttgcctttagcaatgacagagctaatagctttgtagcgtacccttttcgtctctcagaaggtcgaatgccataccc

SEQ ID NO: 1585 - DNA, 14753 bp, synthetic construct
  source 1..14753: mol_type = other DNA
  misc_feature 1..14753: note = Synthetic
tctttccaatagtttggtgtacccccatacgggtcggtaaatgtgctgccatttggttgtgtgtaggttttatagttcatgttttcggcggcacgctcgccaaagcgaggggtgtcctgtgtggacaattcattgacttgtgctagttgagccgctcgtggtaccgcgttcagtgtacctgtgagccagctttccatcgtggttgcgttgattgagtttgcgttaaagccatcgtcgtaaccagtaacccattcggacaccggttgcaaaaagccattgtaattgacagagccatcccactgattgccgttgttcaaccattccgtgggttgtgacccttcaaaccactcgccgaaaatcagtgcgtttgcattagtggtctttacggtattacgaaattcctgccaataactatgattggtcgaatcggtgtagttgccgcttgattcgggatcgtacccattggcgccaatgtgtccaggtgcgtcgagacgccaaccatcgatgttgtatggtgaggaaagccatgtttttgcaacattatcgacctggcttctaagcgaagttgagccataattcaactttggcatcgtattcacgccagcaaacgttgcgtaggtgttaggccaattggtgaaagtataataactgtagtatgggctggattggttttgctgggcgcttgtaaaccagctgttttgattgctggtgtgattaaatacgccatctaggattaagcgcccttcttgtccggcgttgttggtcgtactgtgtaggtctgaggatagttgctctagcgctgagtttccaccaaagtgaggatcgacgttgtaatagtcttgtgtatcatacttgtgattggttggtgatgtgaatattggattcagatagacaatattcgcgcccagggttttcgtgatatacgggagtttttggtcaacaccctccaaatctccgccaaaaaaagcgacttgatcctttcctccaggatcaccgagttcaggatctgctccccacgccaattggacggttcgattgccgttccatgaatatgctcctgtggtaacgtcatttgatgtatcgccgttgtagaatctatccaccatgatttgatacataataccgttttgcgcccaagtaggtgtagtgaagttaggggcaatcacaaagtcgtcgtacgtgttccactgatcaccactgaacgttggcgttggaaaggcgctggtggaagatccggagccattgtagtacaacgatgaggttccatcgttagcctgaaagtagtagtacttgatgctggaggatgccgggatggttccttgccagaaatcgtagagtccattttcatcagttccctgaagtgtcattgggtaatatgtcgtcgatccagttgatgtgtcgtataccacgacattagcgcttgtcaagtttccatgggcagcacgtaaggtcacggtgacggcctgcgaggaagttggctcctgtggcgtcatatattgtggtccttggtctgcaaagagtccgtttgcctgaactcccccagacgatgccgctgctgcaggagtgaaatttacactccagccgagaagcaccgacacaggaatcaacgctaatggatatttgggcaacttccaacgtttcaacgtagattcacactcctcgtaataagttcaaacgtttgcttagaatagagaacatcaagtgcaaacgttttcatcattgcaccacactgatttcgcgcgttcaattggctacgaccacgttttctttgtacaagcaactgtaactttcaacaacgattttggtgtgtatggcgcgcattgcctactccgtatgttccgattcgctgtaacgcatatagggtacttactggcaagccacagaaacagcacgggagactctaagtgcaaacgattgcttgcttggagagtagaagttgttggtgaactgaatgtactttatctgtcttctattcggctttcatggacgaggtttcattaagcatggcatgaggaactacatgaacgatatcgccccaaaactttaacaggataattcacatatcatatcaagccctgggtgacgtatatatgatgctgggcaacgacaatatgctgggtcctggtgtaagggtgatgtgaaaacgctaacattacgggggatacaaccgtgagtagcgattgcttctaacatattgcgacgcagacgtccatgaatgggggagttggatgtgaaacggttgcagcgcaagcacatgcgggttttgggggcgcttatgagcgcatctgtggtgatgggtctggcaccagccatggttttggcggatactccatcaaagctcgtcagtgctcccgttggattgcagtcttatgcggtcacatcgtcactcgtcgacctgatctggcagcctgagtacaatgccggagttacctatgcagtgtacgaaaatggatcgcgaatcggacgcgtagctgattcgaactttaccgtctcagatttgcaaccgaaccacacctattcgtttcaggttgcaacaatcactggatcaggtgatgtttcgaagccaagtgccgccattgtcgtgaaaacactcgcgcaaggcaagatggtgaatgtcaaacagtttggcgcgattggcgacggcaagtcggatgacacacgtgccctgcaacgcgccattgacgcggtcccaaaaggcggcactctttacgtgccagccggaacgtattacaccgcaccactgcaattaaagagcgatatgacactctacctagccaagggtgcaacactattgggtagcagtaatatcgatgcctataaaccgatatggagccgctgggaaggcactgagatgtatcgctatatgagcctgattactggtgacaacgttcgaaacgtgaccatcacaggtgaaggcgtgatcgacggcaatggtgagacaccgattcacgataacgctggcaacacgtatggaaactggtggtcaaaacaatataaagagccactttccgatccggcggtgtcacttgttcaatcgcccaactacagtcaaggactgccctatgcgcggccgagcctcatcgaatttcttcactctcagaacatcctaatccaaggcgtcacagtgcaaaattcaccatcctggacgattcaccccgtttattgcgatcacgtgaccttggcggatgtgcatatcgtgaatccgcccacatcggataatacggatggcgttgatcctgattccgtcaacggcatgcaaattatcgatgacacgttcagcgtaggcgatgacgacattgccattaaatcgggcaaggatgcagaggggcgcagaatcggaatcccaagccaaaatatcgtcgttcgcaattgtcatatgttaaatgggcatggtgtctccattggcagcgagatgtcaggtggtgtgcaaaatgtcctcgttgaaaactgtgacttcgatggcaccaatgcggggcttcgtatcaaaacgctgcgaggacggggcggaattgtgcagaatatcacattcgatcacgttagcatgagcaacatccaggcgcaggcgttcatcatcgatgaaaactacgcgtcgaatggatcggctttaccgcctggtccggtgaccgatgctaccccggcgatacggaatttaaatttcgacaatatcacggtaaacggtgcaaagcaggcgatgtatttcagcggacttgcggaattgccgatacaaaacattgcctttcataacgttgccattaacggagctggaagtggtattcaggctgagaacgtggaaggcgtcaagatggacaacgtatccatcaatggcgtgccgatgtttgatggcgtgaataccatacaggatctcacattccaaggcatcttgccgagtgccgcgacctttttaacgggtacacagcccatcgcgctccctggaaaccttgtcaccaatgttgggggaaccatctcggcttcgtttgcatcgtcggcagatacaggcgtgaatatgcccattgtcactggcgaaggtacaaatggcaacggcgtgggcgtgttcttcaatgccgatcatcgcgtggagtttcaaatgcacgcaggttcacaatcggttgacttggtcagcccgcaggcgtatcacgacgggctttggcaccaggtcacggccacgtgggacaatgcaggggatgccaatctgtacatcgacggctcactggttgcatcaaccacggtcgcaccggcgacgacggtcgatggcgatccgacggttgcttcaccacaggtcaatccagtggccattgcgagcagcatgacggtgggcggaacaactgatgctagcttcatgggccagatcaaggacgtaaccatcatgaattaccctgaatctccgttgtcgatttctggatatcacatcacgaatgtgagcggcggtggtgttgttagccctgagggtctacaggttgacgcgcagcagtataacaatcggccgtatacatttacgtgggtgccaccctatttgattggcgatccgtttctgcaaaccacggctggctccagatcaggactgtcatttgacttacatcaagatgccacagtctatgtggcttacgacgctacggcgaagaagcccacttggctgaaacctttcgtcgacaccggtgaaacgttgagcaatgacgtgggggagacctacgaaatttatgcaaaggattttgctgcaggcgaagtttcgctcggacccgtagtcgatccgaagcacaccgctatgtatacggtgttcgtcggccaaggtttgccgacaacctatcagtttcgttaaacgattgggcgacgttctgttccctgaattggcggatcgaacggaacatataaagtgcaagatggatgcttcatcgcgtacacttgcccgaggaggccatttgttgctacaatgactcttgacctgtagcgaggccgtgcggcgttcgcggccgaaggagagaacgcagcagtggcaaagctgaagggctgcatggaatctgaacttagcaacgctctcacaaaatgggagaaggactacctcgggcgtgggtctgtgtcggtcaaaacagatattttgcgtgacatgattatcgtgtctttgcgtggcattctttcaacggcagagtatgctttgtgcgagacgcgcgatggcatgctttccatcaaacgcacccgcaccagtttggtcgagtcggggatagatgagttgaaagatcttgtccgccgcattacaggtgaagaggtgacgagctttttcaccgatttgagtacgcgcacaggcgaacgtatcatggtatttcggttatctgaggatttggaaaagaagttagtcacaacagattgaccatttttacacatatacctggacacactcggaggctggatcgcgctgacgaaagtcggtggcggacggcagtcgaaactgtcaagggcgcatgggagttcgacaccacggatggtggtgcctgaaaaaccggcgtgactctgtacagccagcatcggcgcaagttgatgtctgtgactgtatggggcacgccggtttttgtgttttgtgctgggggaagccgatatcgtcgagagaggagacaacaatgttcattcatgacatgcagcaatggatgttgcccatttggttgggtacgtgggtgatcgcgggttcgacaggactcatgacagcgtgcatggacaaaaaaattggcttcgttcgctggcatgtggctgcacttctactgcctgtgttggcagcagtggctggtctgctgctgcgggcgattggcatcaccatgggaccatggcgaacggacggaacggggtggctgatggggctttacatcgcgctgctcggcatggtgattcaacgctttgccattcgctatttacaaggtgatcgccactacggacgttacttcggttggctgacctggacgactggcgcggcaagcatcgtatggatgagtcgcacgttgtggatggaagtggcgtcttgggccgccatggatgccgggttggtagctctcattgcccttgcttgggaaagtgcccctgtgcgcgctgtgaccaaagttaccatcagccgcttggccatcagcgcgatggcgatggccatagcctgtttgtggtatggcctggccgcacacagcggggacatcgcgatcgcgctggcgcacgtgaaccgcttgccgcccattgtccgcatgggcgtggcgttgttgcttgttttggcggcgatcgtgcaagctggcggttggccgttcggtcgctggttgcttgaatctgctgtgacaccgacaccggtgtccgccatcatgcacgccggggtggtgaatgccggcggactattgctcgcacgctgggcgcctttgctgagtgcaagcgggccgtggccccatggcgtactgctcgtccttgcctggctgagcgtaggcctaggatcaggcatcctcctggttcacgtcgattacaagcggcaattgatcgcatcaaccatggcgcaaatgggacttatgcttatgcaatgtgccatcggggcttacgatgctgcgatgatccacttgattcttcacggtttgttcaaggccactttatttctccgatccggcgatgcattaccccgcccggagcaagcgttggccggaccgcgaagcacaaagccttcatctgcactgtggcccgcgatattcggagcgatgtttgccctcgtctactttgcggtggatccgcatgcgtgggtgcgtgcgctgagtgcgctgatgcttggagccggggtgtcattggttgcgaggcaagcgcgatggacgcaggagggacgcttgctgggactggcgacggtgctcattgctgcagtcatcagtgagggtttgcgtgcctggcttgcccacaccgttcgccacctagcccccggcatccaagcgtacgccgtaacgatggtctggccgattgccgcggttgctttgttggcgatgctcgggctggttggtgttttgattacggcgaggccagatgccggcatcgtgacccgtatctatctttggcttgtgcatcttggtgaaccgagacccattgccatggagacacacccgcatcatctgcatcgctttgaacaggaggcggccttacggtgagacctaatcatgcagtcaagcaagacgccatcttgacgcaggacagcaattgcgtgatcgactgggttcggcaagccatggatgtcaccgctccacaatggccattgtcggtctttgtcgcgcgccatccgtggccacatttggagcgcttggcgttcgccgatgcgttgacactgctcgcggacattcaggatgtacatctgtttccttcgctttctgtgattcgatccgctgtcgaccatggcgatattgcgttgcatagattggaacagcggctttgcgcctgggtggatgagcatgtggcggcatcgcttcagtcgcgactccagcctgtttttcgcgcactcatgtgggaagacgaacgcgagtccgatgtgcctgagtacgtgtgggcgttagccaacgaggtggtggcagggggagaagcgccactacattcgtatcgagtgagcctgcgtggcgacaccaacgaatacacgcgcgcacgtctcgctcagcaaaccatcaaatggtgcaagttgtatttggatgctggtcaggcaggctgggcgttgccaggtaggcaagaaggattttacaggtcctggcgccacttgattgtgcgcgatccggctttaactcgtgcagaaaagcggcgtctggccgattggccaggcgatgcaggcgaagccatcgcgctggcgctacaaatgctggatgtgccggagcatgaggctgttggctatctacgcgcgcaccttgcagcgctgccggggtgggttggcatgctgttttggcaaggacgcgaagaaggccgcgagatcgaccttgttgtggactatgtagcggtgcgcttatcgttagaatgggccttctgtgagtttcgtgactgcgagacgtccgtgcaagtggatgatggcgtcacaaaacgcgttgcttacagtttggcggcactgcatcgtcatggtggcatgacgcgatccatttggcgcaatttgccgttgagtgtgcgcaaggatttgcttgtcatcgtggatcggtttcgtcgcgtggaccgttggcaactctggttggaagcttgggaggatacccaggcagagcgtattgtaggggcgtgtcagacgcaaataccagccgcagcaaaggctgatgtggtggcgcaactactgttttgcatcgacgttcgttcggagccatttcgccgaaacctggagacgttcggggcatttgcgacgtatggttgtgcaggattctttaacctccctatcaaaacgcgcagtctcgatggttcctatgcacatccttcttgtccggcgattgtaacgccagtcgttgaagtcagagagagacccatggacgattcagacagcacgtatcgtcaaaacaggaacggcgtgcgttttatcggagacgtttttaaaaaggtcaagcaacatgtgttagcctcgttggcactgccggaattgtccggcccatggctgggtttgtacacgtttgctcgtacccttgcaccgtccgcgtcggggggcttgttcaagcgttgggcaagcaaacagtttccggacagaaccactctggtcatggagcgagttcaggatggtgatgaagtagcggatatccccgtcggattgaccgtcacgcaaatggccgagattgcaggtgggcttttgcgcagcattgggctgacggagtttgcgccactcgtcgtggtgtgcggacacgaaagttccagcgccaacaatgcgcacgcggccgctttggactgtggcgcttgcgggggagcagccggacgctggaatgctcgagtgtttgcggccatctgcaaccgccgcgatgtacgaaacgtgatggcaacacgatttggcgtatcgattcctgaggataccgtgtttgtcgcggcggagcatgtcaccaccactgatgaattggtttgcatcgagatgccagagctaaagggcgcagcgaaggaggcgtggggacttctacaaactgccgctaagcgagcgcaatggatgacggcggcagagcgcatgcgactcttgccgggcgtagaacgcgtccggaacccggtgcacagtgcaattcggcgtgcgcgcgattggagtgaagtgcgtccggagtgggggcttgctggaaatcgcgcgttcatcattgggagacgtgctttgacgcaagggtggtcgtggaaaggcgaggtgtttctgcatagctacgattggcaatcggatcgtgatggcagtcttcttgcttcgatcatcgctggacctgtgaccgttgcgcagtggattaatttgcagtattacgcttctaccgttgccccggatgtctatggtagtggtagcaagacgacgcagacggttaccagtggccttggcgttatgcagggcaatggtggtgatttgttggcaggcttgccgtggcaatccgtggcgagcggggatagagcactttttcacgcaccgttacgtctatgggtggtcattgaggcaccggatacggcggtcgagcaacttttggcgacggatcgcgcgtttcatcgcaaagtggcggggggatggttgcgtttggggagtatcgatccgctgacgggatgttggcgcgattggtcgggtaggccgatgtgcgaacatgtagaagcgaggggggtgtagtggtttgtggggcatgttggcgaacctgctcgcacgcggcgaaagattcaatgtaatggagcgagtggaagtacaaagaatatgcttgactcttttcttgcactcgtataatatagatggcgagggatatcataccacatcaaggcttgcgaggttgctatgataaggcaacaggccgcaaagcactgacccgcattccaatgaatgcgggtcatctactttttggaggtatatatggcatatcgactgggattggatattggcattacatccgtagggtgggccgttgtggcacttgagaaggatgaaagcggattaaaacccattcgcattcaagatcttggtgttcgcatttttgataaagctgaagacagtaagacgggggcatctttggctcttccccgccgtgaggcgcgcagtgcacggcgtcgcacgcgccgtcgtcgccatcggctttggcgcgtaaagcgtttgttggaacagcacgggattctttcgatggaacaaattgaagcgctttatgcgcaacgaacgtcatctcctgatgtgtatgctctgcgtgtggctgggctcgatagatgtttcaccgcagaggaaatcgcgagagtgcttattcatattgcgcatcgtcgcggttttcagtcaaataggaaatctgaaatcaaagattcagacgccggaaagttgctgaaggctgtgcaggaaaatgaaaatttaatgcaatcgaagggataccgaacggttgcggaaatgcttgtttctgaggcaacgaaaaccgatgccgagggaaaactcgttcatggtaagaaacacggttatgtatcgaacgtgagaaacaaggaaggcgagtatcgtcatacggtttcgcggcaagccattgtggacgaagttcggaagattttcgcagcccaacgagcgctgggtaatgatgtgatgagtgaagagttggaggattcatatctgaagattcttcgttctcaacgtaacttcgatgatgggccaggtggagacagtccttatgggcatggttctgtctcgcctgatggcgtaaggcaaagtatctatgaacgaatggtaggctcgtgtacgttcgagacaggtgaaaagcgggcgccgcgcagttcgtattcgttcgagcggttccagctgcttaccaaggtcgtgaatcttcgcatctatcgacaacaggaggatggaggaagatatccgtgtgagctcacacagaaagaacgagcacgcgtgattgattgtgcatatgagcaaacgaaaattacgtatgggaaactgcggaagctgctcgatttgaaagacacggaaagcttcgcgggacttacgtatggcttgaatcgtagccgtaataaaacggaggacacggtctttgtcgagatgaagttttatcacgaggtcagaaaggctctgcagcgtgctggggttttcattcaagatttgtccattgaaacgcttgatcaaatcggttggatcttgtctgtgtggaaaagcgatgacaaccgcagaaagaagctttcgactctcgggttgtccgacaatgtaattgaggaattactaccgttaaatggttcgaaatttggacacctttcgctgaaggccattcgaaaaatacttccgttcttagaggatggctacagctatgatgtagcctgcgagctggctgggtatcagtttcaagggaaaacagagtacgtaaaacagaggcttctgccacctttgggtgaaggagaagtgaccaatccggtggtgcggcgtgccctttcacaggccatcaaagttgtgaatgcggtcatccgcaagcatggttcgcccgaatctattcacatcgagcttgcccgggagctatccaagaatctggatgagcggcgtaaaattgagaaggctcagaaggaaaaccaaaaaaataacgagcagatcaaggacgagattcgtgagattcttggaagtgcgcatgttaccggacgagacattgtgaagtacaagctattcaagcagcagcaggaattctgcatgtattctggggaaaagttggacgtcacacgtctattcgagccaggttacgccgaagtggatcacatcatcccgtatgggatttcatttgacgatagctatgacaacaaggttcttgtcaagacggagcaaaatcgtcagaaggggaaccgaacgccattggagtatctgcgagataagccagagcagaaggcaaagtttatagcattggtagaaagtatcccattgtcgcaaaagaagaagaaccatttgttaatggacaagcgtgcgatcgatttggaacaagaaggatttcgcgagagaaatctttcggacacgcggtacatcaccagggctctgatgaatcacattcaggcatggttgttatttgacgaaacggcttccatgcggtcaaagcgtgtggtttgtgtcaatggcgccgttacggcatatatgcgagcgcggtggggattgacgaaggatcgggatgccggtgataagcaccatgcggccgatgcagttgttgttgcgtgcatcggggattcgcttattcaacgcgtcacgaagtatgacaaatttaagcgcaatgcgctcgccgatcgcaaccggtatgtgcagcaggtcagcaaaagcgaaggcatcacgcaatatgtggataaagagacgggtgaggtgttcacgtgggaatcatttgacgaacgcaagtttctcccaaacgaacctttggagccctggccattctttcgagacgagctgttggcaagactcagcgacgatcctagcaaaaatatacgagctattggcctcttaacctattcggaaaccgagcaaattgatcctatctttgtctcgagaatgccgacaaggaaggtcacgggcgcggctcacaaggagacaattcgtagcccgcgtatcgtgaaagtcgatgataataagggcacagagattcaggtcgtggtttcaaaggtggctcttaccgaactcaagctcacaaaggatggggagattaaggattatttccgaccggaagatgatcctagattgtacaacactctgcgcgaaaggcttgttcaatttggcggcgatgcgaaggctgcttttaaagaacctgtttacaagatttcgaaggacggtagtgtgcgaacacccgttagaaaggtcaagattcaagaaaagttgacgctgggtgttcccgttcatggcggacgaggcatcgcagagaatgggggaatggtgagaattgatgtgtttgaaaaaggcggaaaatattactttgtaccgatttatgtagcagatgtactgaagcgggaacttccgaatcgcctagccactgcgcacaagccgtactccgagtggagagttgtggatgatagctatcaatttaaatttagcttatatccaaacgacgcggtgatgattaaacctcgtaaggaagtggatataacttataaggacaggaaggaacctgttggatgccggataatgtactttgtgagtgcaaacattgcaagcgcaagcatttctctgcgtactcacgacaattccggggaattagagggtttgggtatacaaggtctagaggtgttcgaaaaatacgtggttgatccgttaggagacacgcatcctgtttataaggaacggcgcatgccatttcgtgtggaaaggaagatgaattgattgtcacatcgacatgtgatggtcactcgcagtgcaaagctgagttgtcgaaataaccagcttgtcgtgcgacaagaggacgaatcctctggagaaatgtgcgaatacaccattcctctggaggacattcgcactctcatgctggaggaccgacagagtattatcacgtcggccctcctggccagattggccgaatttcgaattgcagtgtttacttgcgatgaaaaacatttaccaaacggcgtacttctaccgtactgtcagcattcgcgaggaccaaaaatcatgcaatcccagcttgagatgaagcggccactcgtgaagcgattgtggcaggctgttgtgcgtcgcaaaatcgagaatcaagccgcgtgtttaactttatgtgggtgcagtggtgatgaagctctgttagcgcttgcgggccgcgtggcatctggggataagggatctattgaatcccaagccgcacgaatgtactttaagcatctgtttggtaaagcgttcaagcgtagctcggatgacttcattaactcagcgatgaactacggatatgcattgattcgtggacaagttgcaagaagtttgtgtgcgtttggatttcaaccatccattggattacaacatcacagcgagctcaataattttaaccttgctgacgacctcatggagccatatcggcctattgtggattatgttgtggcgtccgagctcgacgttgactctcccatactttcgaagctacataagcggagattgatgcagattctcacccagatggtttggctggaaaacgagcgatacgacctgaccgcaagcattgaagcgatggtctccagcttttcaaatgcgatttcaaccgaagatccaagtgctttacagttgccgaggcttacggaggttcagatgggggtctatgagtaggattatgcgcttgatggtgctctttgatctgccagtgactacaaaggcggaaagaaaggctgcaactcagtttcgtcagtttttattgaatgatgggtattatatgatgcagtattcttgttactgtcggatctgcggcagttatgagatggcggaaaagcatgaaaggaggcttcaagcgaacttaccagataaaggatcgattcgaacgttactggtcacagagaagcagttcatgaggatgaaaattcttgttggtaactatgcacctaatgaacggagaatgcaaagtgagcagttggtccttttttaaaaaacgtgacaccgccgctttgaaacggcttggcgatttgctttttcaaaaatacgtaatcgcccaacccctgat

SEQ ID NO: 1586 - DNA, 24575 bp, synthetic construct
  misc_feature 1..24575: note = Synthetic
  source 1..24575: mol_type = other DNA
tggttcctatgcccagtccgggtccaatgtataaattaatcatatttttttaatctttaattattcgtgtccagttaggtaaatgatgatatcctttatgctgtgatttaaatacatttttataaatgacatcatcatctttaatgacccaaagcaatccggagttttgctcttctacgaaatatgtgttcggatttataaattctaccagcccttctgtataagtatatattttgtttttcttaaaaacagagtcgcctataacggagaaactaccagttttaaagttataacttactatgttggaggtaaatttacctaaatttactaaacccttctctatatgttgttttttgctttctcttttaacgtcgacaaaagtgttgttgttgaacattaccagtgtgctgtcgttcagaatgtcaatgtcatgttggtttacaaaaggacctgttaatgtgttaatgattttatttgtagatggtctataatgtaatatcatatggatgtttcttaagcttataaatacatcatccttttgatagtatggattggtttttagtgccggctgtacatcgttgaggtggaaggggtcttcgggctttgatgattttaatgcataattggccaaatcattttcttttaaaagttctgtaattgatttgttgaaaagaacctcaccagttttaccgtcgatttttgtaattgagtgatcattataatagacaaagaaatttcctaattgatatttaccggaatacttccaggggtgttttcgggtacaggcccatatatttccatctttatcaagatttatggaatgatgaaatgttaagtttttctgtctccatatctggtttcctgctgaatcaattttgtaaagcccattaaaaggtttactaaaaagttgatatatcagtgatccatccgggtgaagcattgtatgcttaattctggtatgtggtttaaattgtttttttatcgtccattttttcagaatcgaatcatttttcagattcatgagtgctacttctctggatttttttgcattcgtataggttgtaagtacaagcaaatcactttttaatttatttacaggtttgaagtttttatcagtaggaataaacgttttgggcaaagttttaacttcttttaccgattctttgaaaaggttagggaatttatacatgaacttaacgggctcagtgaaaatgccgaattctttattcttgttggatatttggtataccatccatccaaaaagtgacaatagaaacaaagaaattatagttatagaaaaaatagtgagtatttttttcattttcaagaggttttaaagtgcctggtatgaaatattttgattcacttctcttcgaatttattgatgaaaagtaatttgaattttaagcagcaaaaataagctaaattatttaaatttctaaattcgatctatggtaacctttattaatacagttgtagagaagaatcattgtccttatttttctttactttgaaaatgtttgactaaaaaataatgtattcaaatggcacaaagcataatagctccagtttaggaacagaacaatagttctaatgaccagcccggtttcaaaataatagattagtcatagtgctttattattctggtccaattgggtaaatgatggtgccctttatgctgggatttgaatacgtttttataaatgactttatcatcatcaatgacccataaaagcccttggttttgctcttccacgaaatatgtggaagcgtcaataaattccattaacccttcattttttgtatatatatcattttcgataaaaagagagtcgccaatagcagaaaaagtttgatctttaagattgtatttaataatgttggaataaaattttcctgagaaggtaacacgttctttctttttatgtggagttgccccttttaaaggtatatcaacaggtgtgttattattaaaaaatactaatgtgctatcgtttagaaaatcaacgtcatgttgattaataaaaggaccttcaattaattgaatcagttcattggttgagggcctatagtgtaaaactattgacatgtttcttaagctgataaaaacatcatcttctttgaagtattttgttgttttaagtgctggttgaacatcattaagatggactggatcttttacaacagctgatttgagtaaataattgcctagattattttctgtcaaaatttctgatatcgatttgtggaaaaggatttcaccggttttatggtcaatttttgcaatagtataatcaatatagaagatttttttacctcctaagatgtacatgcctgtagctttccaacctggtatctttgtagatgcccatatatcgccatctttatttaaattcatgccatgatgaaataatagatttttttgtgtccagacaatgtttccggtgctgtcaattttttttaggccagatggctggtaataatagttgtaaatcagcgatccatctggatgaagaatggggtttactattctatgattttctttgcgtgcatttttaaaagtccattctttcagtatggaatcattttttagatttctgagggctacagctctggactttctgccattcgtatatgatgtcaaaaccaatagatcttcttctaagttatttatgggatcgaaatctttgggcgtggggataaatgtttttggtaagcttttcacctcctcaacagattgcttaaaaatgtcaggaaaagtatacataaatttcactggttctgtgaagacgccgaatttcttttccccttttgctatttgttttaccatccatccatataaggaaagcacaaataatgaaatgacaataattgagaatattgtgagaacttttttcatggtcaaaagtttaatctatgctaattttggtttaagttattgtaaatggcctgttaatctacaaagtccaaaggatataattttttagcttccatttctccaacataataatattgattaaaagcttgctttttaaaaccaaagatcttcccggttgaatcactctttaagaatggtttatatgaaatgtttttgtattcaagattttggtttttcaatgaatccatgggaggaacattttcattttttggtttgtaattaattttctggttaaattttatttttgtcattccgggtgcagatatttcaaaatggacaaaaggtgtgttgctgtaaaaagtgaattgaccatcttttctcgtaaaagtctgagtggctattttccagttttttgaccaacctctgactacagcaccttcaattggtttatcggtttccccatttattattttcccttttatcatcatattgtggtaacccaacatattgtaatagttggtccagcatgggcaatcttttgatggtttgtaatttttaagggttttaacaatctttgcggctggctttaacgaaccaataattttatgctgcttgtcctttgtccaggttatcccttttctcgttaacaggctcgtgtgatcatgtccaaaagctccccagtttacatcctggaaagcccaccatccgaagccgataccaccacagtcaatcgttcgttgataagtttctttcatgaattttgtctgctcctgaaaactaattgaatcattgtcagcagggagagaagtttcgcccagcatccatggttttccaatataattggcataccagtatatttcattgggaactcttaaaggatgatatgtgtgaaaagctacgaaatcaacaggtaagattgatgcatcccattccaatacctcatttggctcagaaaaaccaattgtgaaaagttgatttggtgcatattcatccatcatttctttccactcaactacaatgttataagcatcctctttttgtcttttccttttgcttcctttgagttcctcattgtcaaaatacaatggttcattaaaaaaatcataggcgaatatggtcggtctgttactgaattctttgagcaatgctttagtaaagtttttaacctcttcgtcaattggcgtggttaataaatacattattcgtaaatccagtttttttgcaatgtccgtaatttcatgtattctgtcaaaatatatgtcatagttgtttttcaaccgtcttttttccaggctaatatcctctttgaatgcgataatgttatatttttttgtatcatcaatttcccataacatgttgtctgctgcaagccggacggtattaaagcccatctctttaatcaacttcatatgcccttcaacctgaagcaatgcactgtctttagtactgccttcaaaatgtctggctttctcataatcgtgataaggagaaactacatattcatcgccaatttttctgatacaaattgggtaattcagcattaaagggaaaaatgtggaatctctatgcttaaattcattattatttaaataaataaaattagttctggataaatcaggtgctggcttttctgttttacatgagcttaaaatcagaagtgcgattagaggaaaaatgaaatacttcataaattaggtgttaggaaattaaatagcttaactcttgtttgtttagattgttttttaatttcagcaaaaatataaatatttaggtatttagcctttgttgctttactaaagatgcaataaaaatagtttttgaggagatattcttgggagagagagatgtcatttagttaccgctaagttttataaataattttctttctttgtatactcaaattcataaccatgagtaaaaaacttgtttcagttataatcccggcctacaacgaagaagcggtaattgttgatatggtgaatgaggtaacagacgccttaaaagatattgaagaagaaattgaggttgtttgtgtgaatgatggcagtactgataaaaccctcgatattcttcgtgagatggcagcaaaagacagtcgaattcgtgtaatagacctgtcaaggaacttcggccatcagattgctgttactgcgggagttgatcattgcaaaggcgactgtgccgtaattattgatgcagacttacaggatcccccaggtcttattcctgttatgattgagaaatggaaagaaaattaccatgtagtatacgcaaaacgtgcaaaacggaagggtgaatcatggtttaaactatggtcggccaacattttctatcgtttgcttaaaaaaataacaaaatttgagattccagttgataccggagatttccgtttaatagatcgtaaagttattgatgccttgaaggatatgccggaacgcttccggtatattcgcggtatggtggcctgggctggctttaatcaggttggtgttgaatatgaacgacaggaacggaaagcaggagaatcgaaatatccattcaaaaaatctttggctttggctcttgacggcatcattggcttttcttttttcccgctacgaatagccacctggtttggttttgctataagcggaatcgcttttttatatgcgctatatattctttataaagctttatttacggatgctgtggtgcagggttggccgtccatgatggttgttatgctgtttttaggtggcataattctggtaatgttgggtattattggtgaatatttgggccgcaccaatatagaagtgaaaaaccgtccatcttatttcgtaaaagagacgattgaaaaagatagagattaatggcagtggatgatacaaaactattgtttattgtggggcgggggcgttccggtacttctttgcttcagactatcctgaatacgcatccgcaaatttctgttgctcccgaagcgcaatttatcatgttcctgcggcgcaggtatcaaaatgctaactggaatgaatcaagaatagcggcatttgcccgcgatctttggctcgaggagcgcatggagaactggcacctggagcctgaagctctgaaacagcaattattaaagcataacgaaaatgcagactttgccacgctttgtaaggaggtttatttccagtatggtttgtcgaaacaaaaaaagcaattgaaaatagtaggtgataaaaacccgcactatgccttatatcttaagcatttgattgatctttatcccatcgcaaagtttgtgcacattgtaagggacccgcgcgatacggttttatcatacaaggctgtgaatttcgatgccgaccatactgcaacgctggccaacagatggaatatttacaacaaggcgattgtgaaattcagcaggaaaatgccgggaaaatttcactttttgcgctttgaagatttgctttcaaatcccgagacaactttgaccaacctatgtgagtttttaggtgtcaactatgatcctgaaatgctcaatttttacaaaaaagagcaagactgggaggctgaattccggaaaaacctgaaaagtccgcttgatcctcagaaagcatttcgatggaagcaggatatgcgctctgaaaacattcaatatacctccgccatcacacgaaaaatggccgccgaatttggttatgagatgcctgaggtcaaatatgcaggtttacgccgcttgcttacagttccacattgtttgtatgctcactgggtgacttttttggagaagcttatttataaatttccattagctataacagctccggccattgctttttatagaaaactgactgcaccaaagaaatcggattaagtgaaagtatatatgaaaaagttcaaaagtaccgttctttttattgtaaagttacttgtagcggcagctctcatatactttttgtttaataggatagattttcgtcaggtgctgaatacttttaaagcaggtaacgtttggtatttgctttgggcctttttggcttttacgctggcattcggcctctttttttcttaccggtttcatgttttggtacgcagtgttacccggtctttttataagtcatttcagtttactgctattggtttttttttcaataatttcttaccaacgaatgtgggcggcgatggtattaaactgtatctgattaagcaggagcagggtaaagaaggatggggtaagagcctgagttatatttttactgaacgatttatagggtttgccactatatttttggcctggattgtttattctccgttttttatagatgtgtatgcggaggcctggagcctcgtggcagagctggttcatgtcgacagccgaaagttttggttaattgtgggtggtgtattgttgcttatagcagcggtgctggtcttgatgcttctgcgcaataagcgtattggacagaagattttaaaggggttaaaggattttaaatacagattaaagcaaatttcgcaacgccagttggttttcgtatcaattcactctgtgttgtttcatgcgttccggggccttgctttttatatgttgcttctttattttggcgctatcgtggcgcccgtacacatgatatttttgctatttatgtctacgtttattgggtttttacccattagtgttggcgcgctgggtactttggaagcggcaattgttttaagtctggtaatttttggactacctgaagaaatagcgcttgggcttgcattattttacagggtttttcttgtgtttttttcgcttatcggaggagtcttttacctgacgtaccgaaaaaagaacaaagcgggcgcccaataattcgtatgctttcactatttatgcttacaaacattgcatctttatatgctgataatgtattttacccatataatttataatttcgcaactgcaaactatattcttcaatgcgcagaaaaggaactgtcggaaaccggatttatttatggatggtgaacaacctctcaaagcgacagcttatgggaatattggctgctttggtagggcttgcagccgggtttgccgctgtgttgctgaaaaacatggtccattttatttcacatcagttgcacgctttttcaatcgaggagtatcagaactacatttacataatttctcctgtgcttgggatattcctcaccattttgtttataaagtatgtattgagaaaacctattgggcatggtgtgcccggtattcttcattctatttcgcgtaacaatggttttttgcacagatataaaacgttttcgtcattaatcgcaagtaccttcacagtgggttttggcggttcagtcgggttggaggggcctattgtaggaactggagcagctatcggatccaatgttggccggacttttaaattaaaccgccggcaaatagttacacttattggttgcgcttcttcgggtgccgtagcagcaatttttaatgctcctattgcaggtattgtgtttagtcttgaaatactgatgctcgaccttactttttcatcgctcattccactgcttattgcatctgcgtctgcagtagtaacatcgtattttttccttggaaacgatatcctgtataaattcgaggttatcacaacatttgaactaagcgatttgcttttttatattctattgggaatatttagtggactggtttccgtattttttgctcgtatttatcggttcatggatcaccggtttgagcgtgtgcgcaatgcttaccatcgactacttgcaggtggtttgttgcttggattgctcatttttctttttccatcactttatggagagggctataacgaaataaatcagtgtctggcgggtgatatggattatttatttagtcgcagctttttctatgggtttcaggatcagatatgggtaattatactgttactttttgcagttactatgcttaaggtggtggctacagcagctaccttcggcgctggtggtattggtggaatatttgcgccggcactttttatcggtgccaatgcggggatgtttctaggcaaattgattaatatgactggtttgcatgagatatctgagcggaattttgccctggtaggaatgggtgggcttatagccggggtactgcacgcacccctgttcgccattttcctcattgcagatatttctggtggctacagcctgtttgtgccgcttatgattaccagtattttttcttatgttattgtgcggtattatcacccaaattctgtgtatacctatcagttggctcagcgtaaagaacttattacgcacgataaagacaagtcagtgctcaaccttatgaccatcgacaatcttattgaaaccaattttttacctgtatatgccgatgccaatttgggtgagtttcttgaaacagttacaaaatcgaaacgaaatgttttcccggtcattgatcatgaaaataacttgcagggaattgtatttatcaacgatatcaggcacattattctgaagcgtgatttgtacgataaaattcagatgcgcgatttaatgtatatgccatcgccacttgtgcatccggacgaatcgatggaaggcgtagccaagaaatttcaaaccacatcgcactacaacctgcccgtggtaaaagatggcaagtacattggttttatttcccgcgcgaatatgttctccacctaccgcaaaattttaagggacttttcggaggagtaggcttaaaaccttcaattcaaaaaatcatttttttaggtccattaactgctcgttttgcattggagtaaaaaattatgtactcttagtttataccgccttttcatgaaagaaagtgaaataacattgtttccggatttttattattaactttggtaaactgcccttgaaattaaccaaccgaaaaccgatgttctgatatttaatagtattgagtcatttttagcttggaccgacactagttgtcggtacaataaagtataatgcatttaaaaatgatcataaaaaaactcccaccgaagcgggagtataggttttaacaccttcggcatatagccttattgtgataagatgtaatacacaaatataaaaaaggaatacagaaaaaacaaaaaataattgcatatgacacgcattttaggattagacatgggcaccaacagcattggatgggctgtggtggataaagaacaagaacaaattgaagattccggagtaaggatttttccggaaggtgttgtaaataaaaatgaaggcgagggaagagaaaaatcaaaaaatgcattgcgaacagaaaacaggcagattagacggcaagttgcaagacgaaggttcaggaaaataaagttattagagttactaattgagcaagatatgtgtccgttgactaaagatcagttgatggtttggaaacattgggataaaagtaagaaaagtgaaggaagacattttcctcaaaacgagaggttttctgaatggttaactctcaatccttatgatcttcgaaatagaggtgttaatggagaattaaccaaaatggagcttggccgattgttgtatcatatgattcagcgaagaggttttttgagttcccgcaaggaaaaagataccggaaaaatttacaccggtaaagaaaatatggttggtattgatgatactaaagaagctttaaatagcaatacccttggtgaatacctttactctatttacccggaagacaacgaatcatttcaaaatatgcgcgacaagaagggtgatgacttaagaataagaggaagatatactttacgggatatgtatgttgaggagtttgaaaaaatatggaatcaacaagcgaaaagacttgggctggataaagttaatgttacaaaaaagaaaattgtttttttgaatggagggaaaacccggaacagaaatgcaaaaaagatagagtatttgaaaaaacaccgcgataaagttgatatagatgagattattattcggagggaaaatgctaataaaaaactaactcgtgtaacttcttataaaaacatatcattacacgatcatttaggaggaagaattgaacttcaggatgataaagttaaatttgataataaggatagtgttttgttttatcagcgacccttgcgatctcaaaagaaattattggggaaatgtcgttatgaaaagaataagacgccggtatcaatttcacatcctgactttgaaatttatagggcctggctatatgtaaatacaataaaatttggaaataatataccattacctctggagcaaaaacagaaaattataggctacctaaaaacaaagaaatcagcagtgaaatttgcagatattatcaaattgctgcaaatgtcgcatgagaattttaattataaagatgatgacaaagttgaagggtgtcctaccattgcacaattaagtaagctttttagtggaagtggctggacacagaactatcacaatatctggcatgacttctatttttatgatgattctgaattattatttaaaaagctgtcaaatgcaaaagcttacgaattaaaagataagattaccttagatgatattaaaaaaattagtattaaagatgatgcatatgcccgtatatcactgaaagctgttcgcaatatcttaccattcttgaagcgaggattgttatataatcaggcggttgttttaggaggagttaagaacgcttttaattataaagtacaaagcgatgaagttccacgatgggataggttcgaagatgatcacgatacaatagttaaagatattctttctataataaatcaaaaaaataaacagggagaaacaatagagcggataaaggaatatttaactaatccaataaatgaatatgggtttgaacagaattctccggcattaaaaaaactctatcatcatagtcaggaaattgaagaaaaggaaaagtcagataaaatatcggaaattgaaaatctgagaaatcccattgttcagcgggcagtgcaagaaatgagacgaatggttaatgaattattgaaaaaacatggaaaatttgacaggattgtagtagagatgggacgggaaatgaaattgggcaaaaaaggccgaaatgaattatctcgtgcgattagacagaacttcgaggctaatgaaaatgtgcgcgaaatattaaaagaatatcaattagcaccttccagacaaaacattcaaaaagtgcttctttttaatgaaattcaagataaaacaggcaaggttatttgtccatataccgggaaggctttaaatattagcgatttgctgggagtggggaataaggttcaaatagaacatattattccaagaagttactcccaagatgatagttttgctaataaaacattatgcgatgcaaagtttaatcaactaaaaggcaacttaactccatatcaattctatttaaaaaatagcgataaaaagttgtggggcgctgccagttgggatgaaattgaacaaagagcgtacaatattttacattttaataaggcaaagcgatttactacaaaaaaactagagtggaaaacagaagagtttatttcccgccaattgaatgacgatcgatatataagcaggaaaaccaaagaagtgctttctgaagtatgtaatgagattttagttatgccaggtgctgtaacggcagacctcagaagattgtggggtttaaataatatacttcaaccaacaattggattgcctaaagacaatttcgatattgatgagaataaaagtctttcatattgggctgtaactgacgaaaacaagaatattagaaaattatatcctaccaataacccgagacctgatgtcgcagaaggtgaaacggttgttgcaggaaatgtcactaaaaataaatttaaatcgcagagacttaatcttgagtttgatgctcctgaaatacccgatggcaaatattatgtaaaatttcctgtttcaaatcctgttgaaacaataaggcaatatattgaaaagcctgaatatgcggataatgaagttattttaaggggattgattaatcgaaataaatttaagcacgatagtttgaagcaacgcgttgatgtgaatgaaaatctcgaagatggtaaatattgggcgaaatttaagataattgataaaggttttgaaataccggagaaaaataaacgacctgagaataaaaatggaatttgcctttttggaaaggtaaaagataatcattttacatcatacatataccagtgcgaaacagatttgaaggatggccaatactgggtgttgcttgatttagattttgataatgttgaatttattccaactaaaaacaagaaacctgagattcgagaaaatcaaattctggttttaggagatgtgaatgaagaaaagaaatttaccgccattcatgatatgcagttgcagtttgattgggatgaaaaacccggaaggtattgggcagtacttaatatcttgtctgctgaacctgagtttactgctattgaaaacaagccgccggaaattgatgacaatgaaaaactaattgaaggtaaagtatgggtagatcacaaaaccggagaaattcgctttgatccgaaaaagaatagggatgatcacaggcatcatgctattgatgctataaccattgctcttacagattataatattatcaaccaattgaaccggtacaatgctgaaaaagatacactccaaaaagggaatgcagcagaaaaaccatcttttgatgaaccatgggacggttttttcaaacaagccaaacaaatagctggaaacattttagtttcatatcataaagacaatactgttacaaaaaaagttaaaatgtttattgagaagaatggaaagaaatttttaagtgaaggacaggcggttcgtggtgaattacataaaaaatatatttacggcaaaagaaagcctccaatgggagaacagtctttccataagcgcaaatttcttaaggatttaaaagataaccaattagataaaattgtagatgagaatgttaaaagaattgtaaaacatgcccgcgaaagagaaaagattttgaaagcacaaattacagctttacaaaaagatcggacaaaagctggcgatatagaagaaaaaaacattgatgagcaaattaaaagcttagaagaagaaatccgtctgttgtatacccttccgaacaaaaatggtgacagggttcctataaaaaaggttcgcattagagagaatttaggcaatacagaaatgttaaagccttctgaaaacgtgaatcagtatgtgaatccccgtaataaccatcacgttttaatttatcgagataatgaaggaaagttacgtgaaagtgttgtgactctatgggaagctgtggagcgaaaaagtcaaaaggaagatgtgtatcagctcccaccagatggtaaagagaaagttacaactttagaagtaaacgatatgtttttattgggactagatagcgaacaagcaaataatcttttaactattgataaaaagattttgagtaagtatttgtatagagtacaaaaagtttctggcggtgattattcatttagatttcatcttgcctcaacacttaataaaaaggaggaggaaattagaattgcaagttttactgcctgggagaaagttcatccaataaaaattaaaatcaatatcctcggccaaatcgaaaaaatataaaataaaaataaaagacccggcgtgttttgaaaacacaccgggtctaaaaaatgctatggaaatcgtggaattgcaacaaaaaaatggacaaaagattaagccgcgttcatatttaaaaaatttgaaaaagcttctggtgttttatatcccaggtaagcatgttttctttttcgattataccatacttctataaactcaaaaattgcgttttttgcttgttttacagagcggtaatcatagtgataaatcatctcggacttgatgattttaaagaagttttcggccactgcattgtcccaacagttgcccttgcggctcatgctttgaaccacatcattgccttttaattcttttctaaagctatctgcggcatattgcacgcccctgtcagagtgaaaaatcaacccgggtgctactggccggttggttttggccatttgccaggccgggatgatcgtagcctcagtggttaagtcttctgaaagcgaccatcccacgattttacggtcaaataagtccatgatgatggtcaaatacaaccacccttctgccgtggggacgtatgtgatgtctgatacccatgccttagaaacctcttcctggtaaaactcccttttcaggatgttttcagctatccggaacccatggtttgaatccgtcgtagctaccctgtactttttgcgggtaatgctccgaagccccattttcttcatcatcctgccaatacgcgggcgcgatgcctgaaacccctgctcattcagctcatcggttatctttgggctcccgtaacgccctttattatcatgatatatttctccgatttttttcatcaaccttatcgtttccatgaccctcgctgatggtttcctttctaaccatgcatagtaactacttcttgccacccccagcactttacacattttctcaacagcaaattcttgctggtacatgtttatgaattcgtatttctgctgtcgcccttggagaaaatgctcactgccttttttaagatatcgcgctctatttgcgtttcccgcagttcttttcgaagctgtgccagctctttctccttgtcggtcatcacaggcctgccttgtccagcaaagctgttatctccatatttatcatgctccctgacccaacggtttaacatgttgtctgtaatgcccaactcttgtgcaatttccttttttggcctgttttgctgtgtctgacaaagctctactgccatttttttaaattctttgtcaaacttctttcttcgtacactcataatgcaaatctagttctttaggcttaactatatgtccgggcaaatgtagcaactccatcgaaaaaggatacatataccacatttacaaccagggaaacaaccggggtaaagtgttttttgagagggagaattatcttttctttttgaaaaaagtgaggaaatatatgctgccattttgtgatattttagcctggtgcctgatgccgaatcattttcatttgatggtgttggtgaatgatgtaaaattacccgttaaggaagaaaatcgcagacgtaccgagggcttcgctccaagcgaaaccctcggtagcaggcatgaaacgttcggttccgggaattctcgaaccataaagcattctatcggcatcatgctgcggtcatacactaacgcgatcaacaaacagcaaaaccgttcgggttcacttttccgtaaaaccaccaaagccgaatgtatcaactgcccaaacggtatcacaccaacgttttatacaaccgaatttggtacgcaagttcatgtaagcaaccccaaaaaagagtatccacaagcttgctttaactatattcatcaaaatccggtgaaagccggtttggttgcgaagcctgaagaatgggaattttcgtcggcaaaagattatgcagggctaaggaatggaacattggttaataaaagcgtagcgcttaaatatattgatttttaaatggaagccacaatgtacaccataaaactaggtgtgttttgaaaacacgccgggtttgaaaaacaaacgaagttatgttgaaacgtacaatttatttctccagccccggatttttatcagttaaagatatgcaactggtttttgatccgaaaaatggtagtgatgttaaaaatgtacctgttgaagatattggattcatgatccttgaaaaccaacaaattactgtttcatcgccattaattgaagaactcatgaatcacaatgtagctgttgttttctgcgatagccggcatcatccgcaatctatgctgctcaatatggaagggcatcatcaacaaactgaaatttatcgtcaacaaattactgcttcggaaccattgaagaaaaacttatggaagcaaactgtagcagccaaaattgctaaccaggctaaattgctggagaaaattggagctgacccgaatcccctgccacatttggcaagccgggtaaaaagtggcgatgttgataatcgcgaaggtatggccgccagagtttactggcaacgtatttttggtcagtcatttttgagagacaggtatggaaaatggcccaatgcccttttaaattacggttatattgtgcttcgggcagcagtggccagggcactgaccggttctggccttttcccttcttttggcatatttcatcacaaccgatacaatgctttttgtctggctgatgatatcatggagccctaccggccttttgtagatatggccgtttggaatgtatgtgagaaataccctgatgtaaccgaaatgcataaagaaattaaggcggagatgttacaagtgctatctgttgatgtgggtatgaaaaaacaaacccgtccacttatggtggccattacacatactaccgcatcattggcagcatgctttaccagggataaaaaaaatatagaatacccaatattgatttaatgcgatggaacaaaaccggttaaatgcttatcatattatgtggctgtttgtatttttcgatttacccaccaacactaaaaaagaacggaaggctgcagccagattccgcaaagatttgatgcgtgatgggtttagtatgatgcagtattcggtttacaaccggcattgtgccagtaaagagagtgccgatgtgcacgaaaaacgcataaaaaacttcatcccggaaaaagggcaagtcagtattttgcgcataacggataaacagtatgggaatattgtaaattattggggcgtgaaagaagatcccttgcccgaagggccaaagcagttggaaatattctaatcagcgatttgatttaataatcattgaaataaaacaaaaagtggttattttcgtaagtcaacatgaactaaaaatgctctttgacatcatgatattaaaaaagtcattggaaaaatgatcgtagaatgataaatttacaactgaaaaccacttcctgtggagtaaacaggcataatttcagtcaaaaagacaactgaaaacaaagccaaataaggctttctgagccccaggttgtggtttgatgtaaattcaagactttaaaaaacatttgatgcacctttgacaagggcgcagatgttgtggtttgatgtaaattcaagactttaaaaaaccattgaagcggaatcaaaaaaaaataatcgttgtggtttgatgtaaattcaagactttaaaaaaccttgtaatgtcacattataatcatcatcacgttgtggtttgatgtaaattcaagactttaaaaaacatacaggcaaactgctgatgaagccaccaagttgtggtttgatgtaaattcaagactttaaaaaacaaagctgaagaggttgcagaaaaacaaggtgttgtggtttgatgtaaattcaagactttaaaaaactaacgcaatttatcgcttttttattcggccgttgtggtttgatgtaaattcaagactttaaaaaacttgtcctgctgtggtgctaattgttccagtgttgtggtttgatgtaaattcaagactttaaaaaacttacatacgtccggttcgtgttgaatagatgttgtggtttgatgtaaattcaagactttaaaaaacattcttgcatcattgccccatgatgggctcgttgtggtttgatgtaaattcaagactttaaaaaacgatttaaattcaaccgacacccacatcgctgttgtggtttgatgtaaattcaagactttaaaaaactgccgtcaatacgggtgcttaaatcaatatgttgtggtttgatgtaaattcaagactttaaaaaaccggttttcgtggcattatagttttttttatgttgtggtttgatgtaaattcaagactttaaaaaacgatttaaacaacatggaaaatcaattattagttgtggtttgatgtaaattcaagactttaaaaaacttattacctgtctttcaattaatttcccaagttgtggtttgatgtaaattcaagactttaaaaaaccaacatgttttaactcgctaaaatctccttgttgtggtttgatgtaaattcaagactttaaaaaacatatatctacctaatgtatcagtgatacctgttgtggtttgatgtaaattcaagactttaaaaaactaagaatagagaaatgacagaagttgcctagttgtggtttgatgtaaattcaagactttaaaaaaccacaagtgtcaaagcgttggtcaaaaaggtgttgtggtttgatgtaaattcaagactttaaaaaacgatgaaaacgggaccgagatttttgtaaagttgtggtttgatgtaaattcaagactttaaaaaactctttttttgccactcccataaaccttgcgttgtggtttgatgtaaattcaagactttaaaaaacaactgtccaggcgcgttccaaaggtaacatgttgtggtttgatgtaaattcaagactttaaaaaactattaactgggggggagcaaggcacaggagttgtggtttgatgtaaattcaagactttaaaaaacttttcgatagcatattcaacttgttcactagttgtggtttgatgtaaattcaagacctgttttccggattattttcacctaaaaaaataagctattagttatcagcacattatcataatgattcttttaaaagtgggtgtcccgtgctatatttgttgaatgtttgttcggaagaagaaaaataaaagtggtagtgtaagcattcaaatcattaagaaaattgataggagtaataaagttatcaagactataggctcctcatcagaaccagatgaaattgaacgactttattacaaagccttatatgaactgcctcgtttatatggccctacgttatttgatccactaaaagaatccagaatatgcgatctaacaaatgatgatattcatgtagttggacctgagcttattttcagcaaaattttcaattatataggatttaatcaaataaaggatgagttgtttaaagccttgtgtatttccaggataacacatccaggcagtaaacttaatttatctctatatctacaggaaaaccataaatcagatatttctgtagataggatttattatttcatggatcgtttaaactcgaggtataaaaagcaagttgaagagatcagttttcaatacacaaaaaaagtattggggggcaaaataggaattgtcttttatgatatgactacgatttattttgaaagtagtcaaccagacgaactaaaacaaacaggtttctcaaaggatgggaaacaccagcacccacaaatatttttagggctgctagtcggcaaggaagggtatccaattggatacgatatttttgaaggtagtatctatgaaggccatactttgatccctatattagaaaaatttgagcggcggtttagtttaaataaacccattgtagtagctgatgccgggttattatcagcaaaaaatattgagtcactgaaaatcaatcgatatacattcattttaggagcaagaatcaaaaatgaaaataatatcataaaaaaacagatcagggaactgaacctgcaagatggacaaattgcaaaaatagaaaagccagataacactgtcttatttataagtttttctgataaaagggcaaagaaagacctttcaaatagagaacgtggattaaaaagattagagaaaagcctaaatgcaggtcgattgacaaaaagcaatattaacaaccgtggttacaacaagtatctaaaaatgcaaggagaactcaagataaatattgattatgaaaagtttagaaatgattctacatgggatggtttaaagggatatctcacaaacacaaaactatcagggaaagaagtaattgaaaactataataacctatggaaaattgaaaaagcatttaggatatctaagactgaccttaaaatcagaccaatttatcatcgattaaaagaaagaattgaagctcatatttgtatttcatttgtttcatacttactgtacaaagaattagaaaaaacacttaaagagaatgacactggcatatctataaataaagcaattaaagctataaataagatgtatgaaattcaagtcggtaataaaagaattctacttaggaacaatgaaactcaacaaaacattattgacctaataaactcgaaattttaaaaatgggtgtcctatccggaaaacaggaagactttaaaaaacatgaaaataacttactctttacaaagcgcagttgtggtttgatgtaaattcaagacttaattctttcacccattcagtttcttaatcaaatcaggccgtttttgttgttttaaaaaatgtaaaatttgcttgcgttcgttgggtttgtgccagaaaaagaagctgcgctgtagttttttatctttcatgttgcgggctaccttaacgggtttcatggtgtaaggatcgaggccggtgtagaacattactgtggccagtgtcattggcgtaggggtaaaatcctgcacctgctccaaatgaaagtgttgttttttggattcaatggccagctctgccatatcctgccagtcgcagcccggatgactggagatgaaataaggaatgagttgctgtttgagtccggctttgcggttctcttctgcaaagtatttttgaaatttgcgaaattgcccgaaattgggtttgcgcatccattttaatacagatggctgcgaatgctcgggtgctactttaagccttccgcttacatggttttttattacctggctggcatatcttttaccgtccctggtcatttcaccttttttatcataaagcatgtcgtagcgtatgccgctgccaatggttattttttttacgcccggtatttgttgtgcctgtctgtagaggtctaccattggttggtgctccattttaagatttttacatacctgtgggtatatgcacgatggtcttttgcattttttacaaatagccaggtctttgccctgcattttgtacatgttggctgaggggcccccgatgtctgaaatgtgccccttgaaatcaggcatattggtaatttgttttacctccgttaatatgctgttaggactacggctaacgacttgtttaccctggtgcgcactgatggcacaaaaactacatcctccaaaacaacctctgtgtgagtttaccgaatgtctgatcatttcataagccggtattggcggttttttatgatactttggatggggtaaacgggtaaatggaagtgcccaaatagcgtccatttgtttttcgtctacaggtgcgtccggtggcgataccaccactgccttatcctcaatgggttgtattaatctttcagactcgattttattgctttcggtttcgatttgtgcaaaattggctgcaaaggctttttttgaatttacacatgtttcatggctgtgtagccatatgtattcagtttttttgtgtgccggaattgcattgatgttttgtaaagtcgcaacctgtggcagggtggctaagttttcggttggtacccctttatacataagcctgcaaatggcacgtatggtttgctcgcccataccgtaaaccaataaatcggcgccgctttcgtgcataatggagggttttagtttatctgaccagtaatcataatgggtaagtcgtcgcattgaggcctctattccgccaataattacaggtgtttccgggtaaagttttttcagtatttgggtgtatatggtaacggtgtagtcaggtctgaacccggcttttcctcccggcgtgtaggcatcgtcacttctgcgtctttttgcagcggtataatggttcaccatgctgtccatgctgccggcagtgacggcgaaaaacaggttgggacggccaaattttttaaaatcgcgtaggtcatcttgccagttgggttgtggtacaatggctattttaaacccttcgttttcaataattcggccaattacagcagctccgaaagccggatggtcgacatatgcatcgcctgaaaataacaccacatcagcttcttcccacccttgcaggcgtgtttctttaattgtggtcgggagccatttggtgtaatcaggttttggagttgattgcatggatttcattaagcaaaaataatgctagttcgtgaattttgccgtttgttgaccgtaattctttatgaatctacccattgattataaatggaagtaaaaaccatgtgtgacggaaatttgattcatcatagtgagttcatcacgcctttggcgggacaggttatgagcattgaaatcaaaattataaacatatgaacctaaatttccaggcccagtacgagtacatcatcaatttggagttggttgcttttccatttgtcataaaaagttatcagttgctttttttgctcaggcatttctaatgtagcagttttaagaattaattgctgaaattgcttgctcgatacttttttaatattttgtcctccgtactggtctataaaaccatcggtgaaaaggtaaagtttatcgcccttaattaaattgaaggtgtgtttccggaaaggttgcattttaggatagatggatatgggcatgttatcgggcgtaaacctgtaaagtgtatttgcctcaacggtttgtactttctctgcattttgtggttttttactattatttctgaccaataatagtgggctgcttgctcctgcatactggcattcaagggttcttttattaatggcaatcagggccatttcgagtccttccttgtgttcgccgggcttgcctttttgttttaacgatctaattatgtatttgcgaagtttattgagcacgatgtctacctggatatcctgcatagaatatataatttcgttcatgaacgacatgccgagcatgctcataaacccgccgggaaccccatgtcctgtgctgtctactgcagaaataatgatccattcgcggtgaatggcaatgtaataaaagtcaccactcacaatgctttgggggcggaaaaatatgaaatggtttttaagctcttctttaaagagcgtagtatttggtaagatggctttttgtatatgcctggcatatttaatactattggtttggtctctaaaaagatcttctatccggtttttttgttcctcaatttcatctctttgtgcagcaatttcttcgttacgttggtttagttcttcatttttttcttgaatttcgtttttttgctgggcaatttcttttgttctgtcttctactttttgctccaatatttgctgggcttttttatattggctaatgcggaaatgtatgtaaaaaattattaaaaacaccaatgtcagtgatgctacgatataaaaccaggttgtttgccaaaatggaggtgtgatttcaaagctgaatttagtggcctgtttgttccacaaaccgtcgttgttgcaggccttaaccataaaagtataatctcctgggggtatgttggcataaacagcttcttttatgtgtgttttgggcgaccatttgctgtctaatcctttaa

SEQ ID NO: 1587 - DNA, 10454 bp, synthetic construct
  source 1..10454: mol_type = other DNA
  misc_feature 1..10454: note = Synthetic
gtgcagagatagtgaacgatggaactttgatgttcgacaaaatcctgccacgattcaatgccgtctttcttgccctctaccgtcatgccgcgtaacgcctcacgcctcatctgaaattcgatgcgggtcatattctcccacatccgtccaccacatcgccgctgctgcaatgccagcaacatttcttcattgtgtttttctttctccagtttgtcataaccgcgacacatgatcttgtcgcgaccaatcgaaaatccggtgcaggtgtatcctttataatgaagcgacgcctgattaagttcgccaagatcacccgccagaatctggtcactctcccagctttcatcatcaaagatcaaatgaaaatcatgcgtgcgggttcggctaataaaacgccgtttaaacacagcatactgcaaagcatccacgtggaatggtaagtcgacacaagtgtccactcgaccaagccggttcttgacaatctcaagccccatctcctgcagacgctcttcgacctcttgcataatcgtttccaacgacccagccagaatcaatggcaacgctccaatctcgacacgaacattcgggcacgactttttatcccgatcaccttcttcagcaaaacgcttgccgacatagtcacgcggctgaatgccaatggtgatgccaccatccttcaggatatatttatagtagcaataccgtgacgaacctttgttcggattgaaaccgtacggcatgaccacatacaaccgctggccgcaagcaaagaccggttgcggatcatcctcgctttcagcaggctgctcggcaatttttctggcgaactcgatttcctccaagtggttcataaaacggggagagaacttgcagtaaaacgaacagtggattgtatccaccccgccagaagtgacagtgcaaccattttcaacattcgaatcagcttgtgcattcataacaatatcctttcatcagaaaagtgcgtttaaacgtcgttctcagaaatatacggcttgagtaacagaagaatcgcctgccggatatgctccggaaggtcgggccatgcagaagttagacgggataaatctactcccatttcgtgcacgctatatgcacactttttttgtaaatcaggtgtttttgtttgttgtggatttgttgacgatctgtgtttttcggcgctttttgccaacttgtaactgtttgcgaatatagcgtttatgtcgccttttgtagtgggtttgttgtccgtttgttgaggattgttgaatggctgggattccattcgattccccccgcctccaccaaactgccatcggacagaacaacgacaattccgatacagaaccacaacaaaccctcgcaatctcaacgggttgcgagggttttgcatgccctgatgatgcaccagaaccgacaacttccaaacactctaaaaacacctctgagcgtctccagaatgcgcatagcatgcacttttccaagctaatcgaagagcaaaaattactattgtcccactggcccgaccttccggagcatatccggcaggcgattcttctgttactcaaaccgtatatttctgatggtgatgttgaaacgcacttttctgatgaaaggattttatgatgaatactcaaactgatgttactgtcgaaaatggatgcactgttacgtgtggtggggtggatacaatccactgctcattttactgcaagttctcgccacgttttatgaagcacttggatgagatttcttttgcccgccatattgcggagcagcctgctgaaagtgatgacgagtctcagcctgtctttgcttgcggtcagcggttgtatgtggtcatgccttatggcttcaatcccaataaggggatctcgcggtattgttactataagtatgtcttgaaggatggcggaattacgattggcattcagccgcgcgattatgtcggtaagcgctttggtgaggaaggggacaaggacaagaagtcgtgcccaaatgtccgcgttgaagtcggttcgttgccgttgattctggccggttcgatggaaacgattatgcaagaggtcgaagagcgtctgcaagagatggggcttgagattatcaagaacaggctcggccgagttgatccatgcgctgacttgccgattcatgtagaccgcttgcagtttgctgtttatcaacgaaggtttatcagccgcacacgcaattttgatttacatgtgaattttgatgatgatggatgggagagtgacaagattcttccgtctgattttgatgatgaccacaaggcttcgcttcattataaaggatacaactgcactggcttctcgattggtcgcgataagatcatgtgccgcgggtatgacaagttagtgaaagaaaagcataatgaagaaatgtggctggctctggagcagcggcgttgtggcggaaagatgtgggagaacatgacccgcattgagtttcagatccgtcgtgaagctcttagaggcatgacggtggaaggcaaacagaacgggatcgagacgtggcaggacttcgtcgcgcatcaaagtgccatcgttcattatctctgcaccgaatggctcgtgttcacggccaaagggtttgcacggacgcactctgagcgtgtgaagcagcaagaaaacctgtggcatcctgactggataatggcggtaagtgcgtttaaacgcacgtttggtgaaccgaaccagaagatctcacggatctcgaaaagtctgaagcgcgaagccaaagctcacattgcgcaggcgcttggttgcggacagtctgctttgatcaagacggctgtagaactaacaccctatgatcctctttggaaagagaagatcgcggcatttcaatatgcctcaacgattcaatatttgtcagatccggcaaaggaaaaatcgttctggaaaagctggcatgaaaaagaaatgaatcaggagtgttcgattccgatagaggcactgtcagacttggttccattggcgaataaaggggctggtgttacccatagcagccccgtgctggaaacgatgggcgtgttattgatgacgcccggtgcctccggcccggccccggtcttcatcagctaacacgccatcctccacatcctgaaaaaccaaccttttcctgccactgaacaagacaggtgtgctctgccgtggtgtaatcacgcaagcgcacaagaaaccctgtggctaaagcagaaatcgtattggtgacagtgacgcttgggatagtggataggggtgggtatgcggtcaattcaagtgtatccggctggtcaagcggctcgaaaggttagcgatggaacagagcgacaccagccgtttgcccttggaccgctgcggacattgtatgtccttcgctttgtgccgcgttccgggcgtgccagaacccgcgcaaagagccgcgcggaacctgttcctgaacgcgcttttgctttccgcaaaagtcagcacacaatgaatgtaatggtcataaaaaaaacgcccctcagggaggcgttcaggagtcgccccttggggcgttgcctgcggaaccgatgttcctttactataacttgacagtgaacatcgactctgatacagtagctatcattataattaagaatgacctattgtcaatttctttgtgaaggatttttaatgaaaaaacaatcgtatattttagggctcgatatcgggacaaattcaattggctgggcaattatccacaattcaaacgagccagatgatgtgtctaataaattggtgattgggagccgagtttttgaatcggttcttgataaaaccgaaatagaaaaaggacagggacagacgaaaaatgttgatcggagaaatgcaagacaactcagaaagcaactagaccgtcgccgtagacgaaaagcccgtatcttttcaacattacaacaatcacagttgcttcctgatggaaatgcagaaaaggttcttcctgaactggatgctgagtttcgatcgaagtattttataaataaaaaaatccctgcaattgaacatacgttatcctattacttgcgggcacgtgcattggatgaaagacttgaattgtttgagcttggtcgggctctgtatcatctagctcaacgtcgcggattcttgagtaatcgtaaaaatgcctcgaatgcggaagaagacagcgggattaagggtgaaattcataatttgaatgaaaacttaaaagctgaaaatgctagaactcttggggaatattttagtcgcattgaccctgaaattgagcgcattcggcagcgacatacatcccgacaaatgtatattaatgaatttgaactaatctgggaaaaacaatcggaatattaccccgaagttctaacagatgatcttaaaaaaaggttatcaaacgatattttttatcagcgcccattaagaagcgtaaagcacctaattggtcaatgcagtcttgaaccaaaggaaaaacgtgcaccatattcttgctatgaagctcaattatttagaacgctttctcaagtcaataattcgtctgtattatatgggcagacaggtgaaattcttgaattgacagcagaacatcgtaaaattttattaaatgaattggcaaaaggtgatttgtcattttcaaaggccaagcaagtcctcaaactgaaaagaacagataagtttaattatgaattaggtggtgaaaagcgctttattggcaacaggattcaagaaaccatcatgtccgtttttggagaagaatggtttgggatgtctgaaaaacaacagttagccattattgaagatataaaaagttttgaagacaaagctgccctccgaaagcgtggcatgaaaacgtggggattgggcaaggaacaggctgaagaattttctgatctcgttttagaagaaggttactgttcactatcacgcaaagcaatacagaaaatgttaccagacatggttggcggcatgacctatgctgaggctagaaaaaagcattatcccgaatcattcgatgcgaagcagggctattctgttttaccatctgttacctccgcattatctaaccttagaaatccggttgttgaacgaacgttgaatgaattacgtaagattgttaattcagttattgcagaacatggcaaacccgaagccatcagaattgaacttgcccgtgatttgagaaatagccagaagaaacgtcaggaaatgagcaaaacgatggattcacgtcgcaaaaagcgagaagccgtagcaaagagaattattgaagaggctgggattgcccgcccgaagcgttctgatattgaacgcgctttgttagcagaagagtgtggttggacttgtccatatactggcaaaaaaatcagcatgacagcactcttccgcgactctgcatttgatgttgaacatatcatcccgttcagtcgttgccttgatgattctttcgcaaacaaaacgctttgttatcatgaagaaaatcgaaatatcaaacgcaaccgaacaccatatgaagcctaccacagcagcccagataaatgggaagatattttgaaacgggtgaatgatttcgaaaaggaaggcggaagaaatcccaagttacagcgttttaaaatggaaagcatagatgatcttgaagacttcagccaaaagcaactggtcgatacgcggtatgcgtcacgattggcaatggaatatcttggtttgctttatggtgggcaatctgaccaacttaacaagcgccggatttatgccggaaatggccgggtaacagcatttctgagaggtctttggggactcaatcggattttgggcgacaaagagcaaaagcaacgcgatgaccaccggcaccatgccattgatgcggttgtaacggctcttttatccccccgtttaatccagcagatgagtcattcggcagaatatgcagaaggtgatcctcaagcagtatggaaacggttgttttctaaactggagatgccttgggatggcttttatgatgatgtaaaagagaaagtcgatgatcttacctgttctcatcgattacgccgaaaagccagtggtgcgcttcatgaagagaccctttacagtaatgaaaaacaatcacctgacggttcactacatacgcatgtgaggaaacgtattgacagtctttctgtcaaggacgttggtttaatcgctgatgctcggatcagaaaggtagttcaagataaattgaccgaactcggacaaaccgaaccggcaaaagcctttgcagatccggcaaaccatccggtattacatacgcctgggcgcaggattaaagaaacgccaatccacaaagtccgcttgcggctcaatcagaaacctattcagattggcaaggacaagagtacaagaaatattcttcccggaaacaaccaccatatagagttatatgaggtactggataaagagggacaagtgacgaagtgggaggggaaagttgtttcgttgttggaaacccgtcagcggatttcaaataaccttccgattgtggaacgtgatcatggaaaaaatacacgttttctgttttcgctttgcggcggcgattgcattttgctgaaaaaggcaaatggttcggagcaaccttacatcattcggggcattacgcagcgaagttccggttcggttgagttatcctttgtcggaatcaatgatgcccgtttaaaaaaggaaatcgaaaatgatgacaaggcaagaaagcttaagggtgaaaataaaggattccgtacggcatctcccaatgcattaaaggacataggctgccggaaaattttagtgactcccttagggcagatccggtgggcaaatgactgatcggatcgttgagatttctcagcaaccgggtcgcctgtatgttcgcaaagaacggttattgattgagtggccggactatacagaaacagaaattccgctggttgatctcggcgttctgatcgtgtcacatccgagggttcaaatcagtccttctgtgctgtctgggattgtccggcacggcggtgcgtttttatgttgcgatgaaaaacatcttccttcaggaatgttattaccgcttcaatcgcattacaagcaagcagggcggcttgctatgcaaaccggatgtaaagtacccaaacgcaaacaactttggcaacagattgttcgggcaaaaatcaatgcacaggcgcaacttttgattgaacttcatgacgacgatgctgggctgaaaaagttcgctgcagaggtaaaatcgggtgacacgactaatcgtgaagcggtggccgccaagtgttattggcacaagttatttggtactgattttcggcgcaatcctgacggtggcgggttaaatctttttttgaattacggatatgcggttttacgggcactgactgcgcgcgcgatttgtggcgctggtcttcatccatcgatcggcttgcaccatagtaatcaattggatgcgttttgtttggccgatgatttaatggagccactccgcccaattgtggatcattctgtttttgtctggcaatccaagtttaaggaagatgaaaccatcgaccgggacagtaaggcgcatttgatcggagcggttacaggacggattcagtttgagggggaagaccgcagccttgaggatgcaatgcggttatatgtcggttcacttgtgtcatcattggaggggacgcaggcgggtttgcggataccgcaacgatgagtgggatcgaatctttatcggagtacaggagcgtgtggctgtttgtccttttcgacttgccggtggataataaagaagcgcgtcgacgctatcggcagtttcgtgatttcttgttgaaagaggggttcagtcagttacaattttcagtatatgctcgttttcacggctcatttggtaaagctgaagcgaccagcaaaaggattcgccaaatgattccaccagacggcagggttcgtttgctgattgtgacagaccgccaatttggcaaaatggaggtgttttatggtaaaaaatacgttccgaccgaggaacctccgccgcaactcatgcttttttgaatgccatttgtgcgataaccagtttacctgcaaacggttatggcgcacctactgtaccagagtcgatattcacgtcaagctatagccccaatcaagggatcaagctggcgtgtagactgtaccagagtcgatattcacgtcaagctatagcgcgatatcaggtaagcaagtcggccaagtaactgtaccagagtcgatattcacgtcaagctatagctgtgcataaaaccgatggcgaacggttaagactgtaccagagtcgatattcacgtcaagctatagctaaatcaggtcaacataatcaagcaattctactgtaccagagtcgatattcacgtcaagctatagcctggttgattgtgatccgcatagatccgggactgtaccagagtcgatattcacgtcaagctatagccaaagctaacgcagcaacaaggtcatcagtactgtaccagagtcgatattcacgtcaagctatagcccttttccggcgcagctgaagggctggcagactgtaccagagtcgatattcacgtcaagctatagctgccaacttctcaagctttccattcgtgttactgtaccagagtcgatattcacgtcaagctatagctacattccgtgcatatattggtcataatccactgtaccagagtcgatattcacgtcaagctatagctaaattctccggacgctcaaacgagcggaaactgtaccagagtcgatattcacgtcaagctatagcacgataagcggcttcggcctcgcggttgaagactgtaccagagtcgatattcacgtcaagctatagcatcgccagtgcggcagcagcatcgctttcgactgtaccagagtcgatattcacgtcaagctatagcgcttctttaagccgttcaattcgcgcatccactgtaccagagtcgatattcacgtcaagctatagcggcaagctgtcgcttcaggtcggcgacttcactgtaccagagtcgatattcacattccaatgtaattttatgactgattatcctgaaacgagttcgaataagttagatccgatcttttcaatgcaagccacttagaaaaattgcggttaaatgcacaccgcggcaaaatattttagaaaaatcgacttttttatcaccgaattcattgacgaacacactgggtgtgtataagctatgcgtaatggaggttccatatgagcccaaacaaacaacgcatcaatatgatgattgatgaagacctactaaaacggctggatgaactcagcgattcgattggcaaatcccgctctgctgtcatgtgtgatctcctcgaccgtggattgcagcaagcgtacactgcaacccgttttgccggtaatcgtcatttgcttcgcgtaatcaactggctattcggcttctccggcgttgatacggataatagtgaagcagattttgacgaagaagacaagcgagtaaatgtcgcccgtgaattaattttgaaagaaatgaaaaaactgagtgtgatctccgcagaaaaggaatttgaagatcagatccgctcaaccaataaagataagtaataaccatttgtaaaattcaatccttgctgaccggcacggtgccggtgattagcgaaaacgctcgatgccaaaaggccaatagaatcaagagagaaacaacaaggagaaacgtttatgttcgaggagtatcgttatgcaacagaattctatcgacgaaaacattatcagtaaacttggtgaactcccctctggcaccattatctatgaagatggtcttgccgaaatctttggccgctgttcgactacaattaaacgtgccgtagaccgaggcgaaattcctcctgcaatcagactattcggaaaagccgcatggcttgcgggcaacatcatcgaccatatccgcatgcgtttagaaagtgcagctcaagaacttgaacgcgaccgtaaacgcctttctaaaatggagggctgacaaatggctggtgtacgaaaaactccctgtaagagtgggaaataccgtggttggtacattaaccgccatggcaagcaatctcaattcacaggcctcagaaacaaaaccgagacgtaccgcattgcctgcaagaaagaagatgacgaacgacagattcgtctgggttatcgtgaggctccgtccattgcgaagaaaaatgaacggcgtactttctcaagccttgttgaggaatacatcgcttggggaaccacgcagggagggcacaaaaaaggcgcttgggcagaaaatcattcgcgtcacgttctctcacgtttagctgtatggcaaaatgaactggatcttcgctatgtgtttgatttaaacggttgcctgcagaaagttgaaagtacgttgcgtaattttcagaaacaaggcccttcaggaaaagctt

SEQ ID NO: 1588 - DNA, 23204 bp, synthetic construct
  misc_feature 1..23204: note = Synthetic
  source 1..23204: mol_type = other DNA
tcgggctggcaaaaaccttccgggaaaacgcgggccgcgccggggcatcggaaccgcttgccctccgggaacggttccagcggaggatggacgcatgcggcgccatgatccggcctgccggtaccgtcaggaaggccatcggggaatgccgccgcgacctcgaatccctggcttccgagaccggggcaggcgacgcccgccagatggctgcggccttcatcaaccgcgacatcctgctgacccagctcgcctatctctccgccatcgacgagtacatccgcaaggggggcaaaagccggggatcgtacctcatctgcggtgaagaggggctcgccgccgacgcggacgtctgcgccgccggaggtgtccccgtcgaactggacgaaggcgccttctccgaccgggtctgcgaaaccgcgctggacgccggtacgatgcagtgcagctttgaatggaagcccgtccggcccattccttcgaactacgacgactggttcgaaaacgtgtacaacgcctatgtccggggagagatcgtgaagtagggaaaaatcaataagcgccaaagcataacgacaacacgggccttcccgtttccgggggcccgtgtttttttcggcctgtattccggggagcgccggaacggatttctaacggccaggccttgttcctgaccgcacatttccttctttccgctggagacagtccggccggagatcccctcacctcatcccgtcatgaagccggatgttccttgtttgcccgggggttcaccacgtaccgcacttcttcaccccgggcgagacggaggatattgtccgcgatcatgggaatcatcgcgtccgccaggtcggaagtagccccgccgatatggggggtgatgatgatattgggctgccggagcatggggtgatcagggctcaggggctcccgctccgggcagtccaggccggcgcccgcaatccgtttctccaggactgccgcaagaagggcatcgtcgtcgatcagcccgccccgggccgtgttgatgacgaaggctccgggcttgagcatggccagtttttccgcgtccagcagatggcgcgtctcttccgtcaggggaacgtggaggctcaccacgtcgcttgtcctcagaagttcctcaagggggacgtaggccatcccgcactccctttcgagctgctccggaaggcggaacgtgtcgtaataccgcaccgaggctccgaaggcctgcactttcgccgcaacctgccgtccgatattgcccccgccgatgaggccgacgatttttttgttgagggtgaaggtctggtccagaaacatggtcctgctccagacgcccgaagctatgctccttgtgtgggcctggaggttcctgcccagggcgagcatgagaagcagtgcaagttcggagacggcgtaggcgtttgctccgggagtattggccacgagcacgccgtgttccgtggcggcctccacgtcgactgaatcgacccctgccccccaccggtgaatcagcctgagcttcccgttgttttcgatggtgttcctgtaggccttgaagatgcgcagcacgatgacttcggcatcggagagctcttcgtattctttctggccggtgaccggcaccagttcaaattccttccccggcagtatttccctgaacttttccagggttcccgcggggtactcccctgcaaacacgattttcacggcctgcccgtctcctttcggacgccccgtctacagggcatcagccgcggcccggatctcatcctccgacggcgatttctggtttttgccggtgaccacggctatcagccggagcaggtcgacgtttttctcccgggctatatcgcggaaaagcttcaggaaccccgaatgacagcccgaataccccaggatgaggtcgagggggggtatggccgtgtgatagccgtgccgctccatggccgggatcagccggtcctcgaggaaacgaagaaggccgaagaggttcacttcgggcagtttgccgtcccgctgcagcaccgccgcaataacctctgtgggggtgtttccggcactgcgggccattcccagcagcccgcagtctataagctccgctccgctcccgacggcggccagcacattcgccacggagagccccaggttgttgtgcccgtgaaaacctacgggaattcccaccgcattcaccagggcttctgtatagcgggatgtctggtcaggggtcatgaaacccgcagagtccataatggtaatttcatgaactcccgcgtcttcgagttttctggattcctcggccagagcggcaggggaaacaatgtaggccttcatgagggagtagtacaccttcataccgtggcgtgccacaatcctgaccgcatccatggcaatggccgagtccccggcatccgcccccacccgcaggaaggccagccccttttcggcagcgagcaccacattctgctccctgtagcgcttcgcgttgaggaacattcctatttctgccttaccgagatagggctggaccaggtcaaggtactccaggtccgtgaggggggcaatggagttggacacttcataggcccctatgccacccgcatttccgtattcaatagcggtaatcccgttttcgatcaggccctgcagcatcatctccgtcaggtccgcgggaaaccctttcccgagaacatttgcaccgtcacgcagcgtacagtcgaaaagcttcactaaatttcactcccttttcagtatcagtgccaagagccttcactcgccccattccccgggtcaccccggaaaactcaggccatacgccgctcccagttcctgcagttccttcaccacgtcctcctcgaggggaatgccgttttccgtccggtccttttccgtcatcgcctcgatttcgcccgggaggaagaccttctcgttgcctccggacggcggcagggcttttatctccgcgaccatggcctccattctcttcccgaaatcgagccccggtgcaagaacgccgggagcggcggcaataaagaaatggccgagattctgctccctgtcgaagtcgttgtacatgctcccgagggagggaccgaaggcagctcccgtcaaaacccccgccatggcttctatgaatagggcaatggcggaacccttcgggcctccgaagggaaggacatacccctcgagcgcttgttcgggatcctccgtcggattgccgtctttgtctatcgcccagtccggcgggatcttttccccctttttccatgccctgcggatctttccccgggctacgatgctcgtggccatatccagcaccaggggctcgtatttcccggcaggaatggcgtacgagagggggtttgtccccgtgtagggcttgccggcgccccagagagccatggtggtgggggcgttggacatggcgagggcaatgcagcctttctgtgccagcggcagggtataaaagctggccgcgccgaaatggttggacccccggacgcccacacagccgatcccgttctcttccgccagttcagccgccagcttcgatgcttcggaagcggcaaactgccctatggtattccccgcgtccattacggcccctgaccgtccgccccgttcaattttcagggcagcgttcggccggaccatgcctgacgttattcttttcaggtaaattcccgttctgctgaccccgtgggattcaactcccctgaggctcccatggaccatggaggcggccaggacatccgctctctccttcagaactcccgccgcctgatagacggcagaacaaaacgactccagcgtctcctttttgaacagctccattgatttttcctcctcgccggaccttgccggaattcttccttcacgccttcgttccgcgggcggcaagacgcgctttgaatacagggtagaacaggctgagcagcgtcagaaggaacaggaaaaacgaaagggggcgcgtgaaaatttcgatgggagagtccgcaatcatcagcgctctcctcaattcggtctccgcaaggggtcccaggattatcccaagaaccgccggagcgatgggcagcttcattttccgcatgacaagcccgaccacgccgaagcacagcattgaatacacgtcgaacatggagttgttcaggctgtaggttccgacggtgctcaaaacgccgatggcggcggcaagaatcaccgtgggcatcttcaggcattttgcaaaaaaacgggaaccgaaatatcccagggcgagcatgatgaaattcgtgagaagcattccccacatgagcccgtacactatcctcggttccttgatgaaaagattggggcccgggtgaagcccgtggatgagcaggcctccgaccatgatggccgtcaccacgtttccgggaattccgaaggtcagcatggggatcatggcgctggcagtgaccgcattgtttgccgtttccgacgcccggatgccctcgacctcacctttgccgaagttatcgggattcttcgatttccgcttcgcctccttgtagctgatgaaggcggcaatgctcgaccccgcgccgggaatcatccctatcacgattccgatgatggaagaacgggtccaggtggggagtgaagacttgaaatcctgacggaaggtccaccgcttctcctctttgtaccgtgtctgatcgagcatggcattatttgccgcagcggtttttcccgcggcaacatcctccagcatggtaaagacttccgggatggaatacaggccgatgagcaccactatttcaggaaaaccttccataagatacatattgtcgaaggtaaagcggaaaacgccgctgatctggtcgatgcccacggtgcttataaacagccccgcaaaggcgcagaaaagccccttgaccgtcgaaccggagagaaagctcgctatggtcgacagcccgaggacggagatccagaaatactccgccggtccgaacttcagagccagcgcggccaggtagggggcgatgaacatgagggccagggcactcgcggcccccccgacggtggaacagatcaccgccgtttccagggcgtaccggccttcacccttctttgccatggcgtttccgtcgaaggtcgtgaccacggctccgggagttccgggaatgttgatgagaatcgcagcgatcgagccgccgtaaatggccccgttgtacatgcctgccatgcacagaagccccgtcagcggatccatgctgaacgtgaagggaatgaggagggcgacgcccatggaagccgaaagtccgggaagagccccgaccatgattcctgccgcggtgctgacgaccatggccaccagatttgcaaaaaccagggttccggatagagaggacaccaaatgttcgaacatcattaccctcctagctcaaagtaaaaaacctttcgggagaggaaccgtgaaaattttgacgaaggtaatataaagaaaaacggtaaacagggcggcaaagagcagggaaaaacgaagggaaaccccttttccgaatccgccccacagcatggaaaccgccatcacgaaaaagaaggacgatgaaaagaaccccgctttttcgatggaaagaacgtacagaagaagcaccactccgaacaatgcggctgaacgcaggttgatcccctcgaccttgccggtcgcctctttgtttcgtatgcccatcgccaggatagccaggctgcagacgaaaattcccgatgcggaaagaagagggaaaagcgctgaatccgacggatattgtaccgacagccacaggactaccagagagattgccgttccggtcgccccgaaaataatgtcctgctttctttgtgtcattcacagtccctcccggaaaaggaaatggggagatgccctcaaggctctccccatattcggctaaggagcagaaataatcagtctttaatccagggatcttccgcccacagttttgccagcctgtcgctcaggtcctggagatgcttcttatattcagcgggattcatgtacaccaggggaagataggcatcttcgcacttcttccggaattcgggattctcgacgacttttctcatgccctccgcaaacttgtcgacgatttcagacggcactcccgcaggcatggcaatacccctcgagcttcccataaccacgtcgtatcccatttccctcagcgtctcaacctcggggaacaggggatccctttcctcgcccatctgggccagcaccctgatctggccggtttcggtgtattccttcgcctcgctcacattgaaaagggcgatgtcgatatgcccgcccagaagagccgttctgttcgggccggcgccggtgaagggaacgaccttcgccttgaagcccgcggccctctcgaggaacagcatggccatgtggtcgtccgagccgatgccgctcacgccgtaggtcagcttctccgggttgtccttcgcatactggatgacgtcagccatggtcttgaaaggactgtcgggccggaccagcaccgtgcccgggtcatccatcaggcaggccaccggaacaaatgaatcaagggtgaattttgtcttcttccgtatgggaagggcgacaatgctcggcgtgttcaggaaacccaccgtgtacccgtcgggcttcgcttcgctgacgagggtatagcctatttccgcccctgccccaggcttgttcaggacgacgaccttctgcccgatatagggctcgatatagtttgccacgagccgtgccataatatccgtcgacccgcccggtgcataggcgacgatcatggttatctgctggtccgccggccactcggcgtttgccggcaccgaagagaagatcagaaaagaagcgcacaggagcatcatcaaaccggtcatttttttcatcatgccttacctcccccaaaaagtgtgattcctcaaaggttctgcattgctttcgagaaaaacggccttccggatttctgtttcatccccttcaactgcctccgctttcttttctgccgatcactcctttcacgacggtttatcccaaaacgcgcatttggaccgataaaagagggcagtctcatggttcggggagatacccctgcactccaagagagagctttgacgaccagtctttcatggcattgctgtgtttttcgaggcgttgtaccccaccctgccccaggtgctgaagcactccggaaagaagggcattaatgattgcctgcgctgcaatattggagttgaagaagctcgccgattcataccggcagaaaaaagcgatgtcggaagcgatcgccaggggggacaattcactgtccgtgattgaaacaacccggcagccggttctccggatcttctccgtcacttcaaggacaaacttcgtgtatctcggaagggaaacaacaaacaccacatcatcctgcccgatgtcaaaaacgctttccgtcagctgcccgtcatcgatggaaatatggtgcacattcggccggatctggaacagcagcaggttgaagaaaaaagtgaggggataggaactgcggagagccagggaatacacattgggggcagacgcaaacaattcaacggccttctggaatttttccccggaattcagggacagcagggtgttcagcgattcctggtccctcaaaatggaactcgtccagatcggcgtgctttcgtcggccggagtttctttgagccgttcaacaggggttatgcctattttcaactgtgaccgtatctgctcctgaagatccggatacccgctgaagcccatctctacggaagtcctgcttatcgtcgcagggctgacgccgatgcgttccgcaagctcgcccagattcaggaaagcggcctcctccggagaacatgcaaaaaagctggctaccgtccttttcgccttggaaatagcgttccttctgaagtaggcacgaattttttccctgaagtcatgcacaatcccttacctccggaatgattgaaaggatattatcatgactagcttttttctgcaatttctttttcaaatgaatcacattttcagatttctacactgacaatcgggcagacagaaagaagattaaggaagggccggagatgatgagctgttttcaccccgacagcagggtacccgaaatccgccggggcctcccctcttcagtaaaagggaagaacccccgcagattcttctattccttttcgtatggcctatgaaaaaacatctttactgggatgatgcagaatgattaccggcatacccccggggaagaaattcttccaggaataggcgccagaacgaggaggatggatcatgaacattatggatatactgggcggcctcatgcaggccaagacggctccgtcggcgagctcccctgctcgcggccatggccatgaacgccctgcagaacagcggcaagagcaccgggaaggttcccctgggccttctggcccctgagaccgaggaacagcagcgcgaccttgaaagcggagcggaagtggtggtcgccgccatgaacaactccgccacccccatgaccatcgaggtggacacccaggctgaaaagacttaccttcgggaactgtcctccggcatgggcctctcccgggacgtggtgaacaacatcgagcacatggtgggcatgcagggggtgtaacagcgccgccccccgcaaaaccaaaaccgcattgtgataaggcccgaatcggacagccgattcgggcgacatgttcaaaatgacaccggttccttgatcttcagttcctttttcagggcctcctgcaggatgagggaaacgttgacatcctcccgctttcgaagttcttcttccatccaagcggggatggtcagcgtctttttgacggccttccggctccatgcgcgacggaccggaggcatcaccgcaacgacaacctgaacaaagcttccttcttccagggcaacgttctccataggcgtcggctcagggatctcatctttctgctcctcccggaagtacatgcagtcctggagaacagcctgggcttcaacgatggcttcttccacggtatcggctgaagtgaagcagttatccaggtccgggaaccggacggtccacccgtcaccgtccggagaaaaaaccgccggatatttgtagtagttagggcgattcattgtgttcacctgcctttatgtgattggggaagacagtttctctttcacctaatcatcgatctggagcatttttttgagagaagcgagaaggccgggctttatttttctcgggatcgggaagggccgttctcctgctttcattgccagaacgtgacttccctttcctctcgtttcatcaatctcccaacctctttctttcgctattttgatgagctctttctggctatattgccttcccaaaccctcacctcccgtggaaccatattatagcgaataaatcaacacgtgtcgatacgtttttccattaaaaaacttgatcctgccaaacggaaaaatgattgtcattgaaaatcctttcccttggaacgacagccgaaaattgaccacttgggggtgcgattgattcacccccgcaagtgtcactcccctatatctttcccatctttggggaggtgagagtccagaatggtctcaaaagtttcgggagttttgcttctttgaggttgatctgtcccgcagttcagcatataacgcatgctgatttttcataacaataagacaaaaagcaatgcttcgcttcacctccgataaacaaacaaaagaaaattggacttgacaatcgtaaaatttggagatatctttcttttgcgggtgcttttaggcgacttgtagcatttcggagtgcggcacgttgctataataagagctttgctcgcaaggttagccctggttgtttacaaccagggtatccttttgtaaaaatcgccgtcgataaagccttctcttcgctcttcatttcatcgataaagcgcaaggttttcccaaaatcaggggggaggatagacgatgaagcatactatcggacttgatataggaattgcgtctgtcggatggagcgttattaacctcgacaaaaaccggattgaagaccttggagtcaggattttccccgcccctgaacatccaaaggacggatcctccctcgcaaaacagcgccgagaagccagcggaacacggaaacgcaatcaaagaaagacggcacgcctccagaagattcaagcccttttccgggaagaaaaaattctcacttccctcgaaatagaaaacctcctgaatgcacattcagaaaaatccccttacgaactcaggaccgatgccctctcccgcgaattatcagcaccggaatggttccgtgccctctaccacatagccaaacacaggggattccagtcaaacaagaaaataaaggccggatcaaaggaaaaggaaaaggaagaaggagctctccttgaaggagtgaagaccaacgcccttcttatggctgagaagggctaccggacagtaggggagatgtttttcctcgacccgaaatttactgaccacaaacggaataaaggcggcgattatgctcatacagtctctcaggaactcctgcgggaagaggttgaactcctgtttgccgaacagaaaaggttaggaaatccccacacctccgaaatatttcgaaaatcattcatcgaggctttcacaagccgcctccctttcgccgctcccggccagatagaatcaaaaatcggcttctgtaccttcgaaaaaaacgaaaagcgtgctccacggatgagctggagtgctgaacgcttcatccttctgggcaaggtaaacaatcttcgaatccttgacacattcaagggggaacgccctctcactccggaagagcgggaaaacttgatcaatctggcctataaaaaggcagaagttaaatataaggacatacgaaaagccttctcgctggaagaatcctcctacttttccggcatccggtacagcaaagaagacgcaagggaaggcagcgagaacggtaagtttatcgcactgaagggaacccatgaactacggaaggaaataaccgaaaggcttggcaaagaagcctgggaaacgtacgaatcaacaccggccattcttgatgaaattgcgcttacccttacactcctaaaaacagaggaggacatccggagcgatcttgaaagcaaaaaaataccttccgtcctcatcgatgccgttatcgatctcgacttcaagtccacaatcaacctttccttcagggcgctgcgtaaaatactcccgttcatggaatccgggtttcgatacgatgaggcatgtgaaaaggccgggtacccgtacgaaaatgcagaaagaacgaaattgctccccccggatgattttgacgacatcaccaatcccgtagtcaaacgatctcttcatcagacccggaaagtgctgaacgccattatcagaaaatatggttcgccgtggtccatccacattgaactggcccgggaaatgggaaagagcttcgatgaccgaaagaaaatccagaaaatgcaggatgaaaacagaaacgaaagagaacggctcaaagcagattttatttccaacttccatcgcgagccctcaggtaccgaccttctcaaatacaggctctggaaagaacaaaattgctgtgatccttatgttcagcttccggtgggacctggaatattcgaacccaaatatatcgaccctatccgcctcttccagcagggagacggcacctatgcggaaatcgaccacataatcccttacagcagaagcctcgacaattcatacacgaacaaaatccttgtgcttgctgaagaaaacaggaacaaaggaaacaaaacccccggtgaatatttattttcaagcacaaatcccgaatgttgggatgcctttgttgcatgggttcagtcgaacatacgcaacggcaagaaaagaaggaacctcctccgggaatccttcactcttgaagattccagggaaatgaccgagcggaatctcacggatacccgctacatcaccaggtatctcgcgaactatctggaaagccgccttcaattttccgatccctccccttcaagcaaaaaggtgcaccgcgtcaacgggggagtcaccgcggctctcagaggactgtggggcctgccgaaagacagggaagagagtcatcttcaccacgccctcgacgccgttgtcgtggccgttacggcaccgcatctcatagaaagaatgacggaatacgacagaatgcgtaaagcagcaaacttcggcaccggacaagaccgctcatccaggaatgccccccagccatgggcagggttccgaaaggaactcctcgcccgcatttcggaaaacccggccgaagagataggcaagatagcgctgccttcctacaaacaggaagaaattgactcacttcgcccgatattcgtttcccacatgccggtgagaaaagctaccggagctgcccacaaagaaacagtgcgaagcctgaaactggcagacactttaggcgggacatttgtccggacgcctctaaccaaactcaaacttgcggacctggaaaatatggtcggcaaagaacgtgaccgaaaactttacgatgccctgaaagagcggctttcagctaacgacggcaaaggagaaaaggccttcgggacttcggcacctcttttcagaaaacctaccagagaaggaaatcccggccccatcgtccgttcagtcaaaattttcagcccaggcacttccggggtaagagtccggggaggcattgcggacaacgacaatctggttcgtgtggatatttactcctataaaaacaaattttcgctcgtcccccattacgtggacgatattgctcgaggagttctgagaagaaagggtatcctcgcacacaaggacgaaaacaactgggagcctattacacctgagcataagtttcttttctctcttttcccgaacgacttggttgaagtcctccaaaggaacgatgacagtgttttaggctattatagaactgtagatagagataatggacggctcactcttgcctcacatgacggaaaagaagaagatatacgggtttccatgagaacgtgcaaatcaattcggaaattccaggttggcctcctaggcgactttcacgaagtgaagaaagaaaaactgccttcgggaaaacccgttcatgagctggcgtagcattctgatcgcttcaccggcaaaactcagcctggcccagcagcaccttcacatcgctatcggtgatgaagaaattgatgtgcccttggaggacatcgctgttatcatcatcgaaaacctgcagacgctcctgaccggacagataatcagcgaactggctcaaagagggatcggtctaatcatctgtgacgaaagacatctgccctgcggagaattactgccgtttcatcagcacagccgaatgagaaaagcgctttcatttcagttggaaatgactgaaccgtttcgaaaaaactgctggcgactgataatccgccgaaagatactgaaccaggctatttgccttgatctgctctggaagccggacggagacagcctgcgaagcctcgcctccggcgtcaggagcggagatccggacaacagggaagctcaggcagcccagatttttttctcgcggatcattcccggcattacacgacgaacccctgatccctttaatgacactttgaattatggatattccgtcatgagggccgcagttgcacgggctttttctgctcacggatttctccctgccctggggctccaccacaggaacgaactcaaccaattcaacctggccgacgatttcgttgaggttctgcgtcctcttgtcgatctttgggtaagcagcaacctgggaagggaggaaatttttaattctctccacaggcaaagcctggcatcgctcctctcgagcgatatttcaatcgatggggaaagaaacacggtactgcgctcaacggagatcatggctgccagtttttttactgcttgcagggaaaaagctcctgccctgatacgcttgccggagctccttcctctgacagaacaccggtatgagtgaatgccgcttcatgaggctgctcgtattctttgatctaccggtagtcagcaaggaagacaggcggatttaccagagattccgtaaattcttgcttgctgacggttacgacatgctccagttttcagtgtacagcagaattgtcaacggggaagacggcgttgacaaacacttgaaaagactggggaagaatattccaggcaagggatccgtccggtttctccagattactgaacgccagtatgctgcaatgaaacttctcgtcggccagagaacaatcaaagaaaaaaaggtcggaacaagccagctcctgatcttttgaggcaattttttcgacgatgaaggggcttgaacttcagtgttcaagccccttcatcgttaggatattgtagcatttcggagtgcggcagggagctataacggcgaaaaaggagccgcctcccgttggcagattgtagcatttcggagtgcggcagggagctataacaagacaaacgacatatacgccggagcaataattgtagcatttcggagtgcggcagggagctataacggtcggggtgttctccgagaactgcaagatattgtagcatttcggagtgcggcagggagctataactggcgtactgccggacaaataccctgttgtattgtagcatttcggagtgcggcagggagctataaccgtaaatgacgccgacctgttcgcgtcgtgattgtagcatttcggagtgcggcagggagctataaccgaaaggagtgatccccatgaaacgcctcgattgtagcatttcggagtgcggcagggagctataaccagaaatgctccaccatgtagcgctggaatattgtagcatttcggagtgcggcagggagctataacctgcaccaggacggtaaaacacaatgtttgattgtagcatttcggagtgcggcagggagctataacggtgcaggaaaaacggagttggtgggcacgattgtagcatttcggagtgcggcagggagctataacttgattatccttggtcttcgacatttaacgattgtagcatttcggagtgcggcagggagctataacgtaaatgtgcggctggacaacgtatcggggattgtagcatttcggagtgcggcagggagctataacatcgctccggatcttcgccgcgtaatccgcattgtagcatttcggagtgcggcagggagctataaccatggaattgccctccacatatatggagagattgtagcatttcggagtgcggcagggagctataactagattcttgacacgccccctacccccggcattgtagcatttcggagtgcggcagggagctataacctgaactttcccgcctccgccaaggtttgcattgtagcatttcggagtgcggcagggagctataacaccctaacgtgcttcgcctgaccgatccttattgtagcatttcggagtgcggcagggagctataacggtgaacccggtgcggagatatacagcgcaattgtagcatttcggagtgcggcagggagctataacggacaggaaggcggcacggagccgggcactattgtagcatttcggagtgcggcagggagctataacagatagaggctctcagggaagcggcgagagattgtagcatttcggagtgcggcagggagctataacaagctcagcttcgacgagtcgaaccgcacgattgtagcatttcggagtgcggcagggatctataaccgatagtaccatcgccccttcaatgaacccggcggcctttccgcaataagctcagataggccgccgggcagtttttgcattcattctcagtttccaaatcgcggcacggtcaaagaaagacgcttttcacgccgacctcaaaaaaacgggattgtcgctccctttctactgtagcttggagacgatgaccctgttggtgatgcccttttccttttcctccttggtggccctgatgatgccgtagagtacgccggtttcgcttctgtcccatgcgatgccctggccacggatgtttttcggcagtatttccaccagctcgatgacggaacccattttgggaagcctgcatttgtagacttccgcagggtcgtggcccgacaggtagaggaatccgtcggctccccaggagcctcccgaattgctcatatcctccagccgttcgagtattgccttggggagggtccacgcttcgagccactgccagttgtcggcgaacttgactatggtggtgcatatcttgtgcccgtagggcgttttgttggggccgtagggcctgtcgtagttggcgaaggccacccaccagtatccgtcgtgccggtccacccaggtggcggatccccagtgtatgccgaagctgtggttggccacgtgctccagggttgcggcgtcccacacctcgatggagctggtcatgggccattcgctccagttggaatgggcgcagtagatttttccgtcgatgacggcggcgctgtcgaggtgaatgatgggcccgtccttgggtccttcccatttcttgacgagctttccggtggccttgtcgtacttggcgacgacccggttgtctatggcatagaagtggtgttcatccactccgatcccctggttcgcttccgggacgttgaactccgcggtctgcttgaattcggccgctcccgccagcgaagcgaacagcaatacaagccccaaagaaagcaatactgtctttttcattttttcttcctccccgaaccgctcatggttttttcggacatggtttcccctgaccgtgccgtcagtcaatagggtgaagctccggacaggcgccggggttaccccgcgtggaccttgccttcctccaccacggtctttccgtcaaggagcagcctgggcctggtgatgatgccgtccacgtggacgcctgccgccacggtgccgccgaaggtgtcgttgctgccgagggcgatgtggacggtgccgtagattttttcgtcctccaggatgactccggtgacccgggctttgtcgttggttcctatgccgagctccgccaggttccgggccccggggttgtttcccagcattgtttccagccgttcggcgtccggcccttccgccctgacgaggaggcccttccggaagacaaggtgcaggggtgcgctgaggacgccgatgccggcgaaggacccgtccaccaggacttccccttccgccgttccctccacgggggcgatgtaggattcccccgtgggaaggttccccgactctcccctgttccggtagatgccggtgctcggcacgccgcttcggccttcgagggacatgcggaggacgtaacctccggagtggagttcggcggctctggcctccgagagcagggccgtgaccctgccggtgagttcggccaccttgccgtaatccgcggtgatggggccgtgaaagaacatgtcctcggtgattttgggcatggtggccaccctggcaccggcggcgcaggcccttttcttcgcctgggtgtgggtcagggacgttccggtggcggcgatgaccacatcggcatgctccatggcggcggctgccggggcgaagggttcttcgccgtttttggacaaaaggggcatcctgagggcgagggctttggcgcccagggttccggctgcctcgaacaggctctcgccgatgcgaagagtggtgtggtcgtacaggaccaggaaggtttcaccgggcttcagccccatgttgtcctcaagaatgcggcgggcgacttccacaaaatccattattccgcctcctctccccttcaaacaggggtgtctttagcctatgagctcttttaccatgctcgcggcgacgcccctggcgaggagggcgggcctgtccgttatctcccggaccagggagcggatggccagggtgtaccctatgcagtccaggacggtgatttccgccttccattccttgagttcctccgccgctgcccgggcggcctccatggcgttgacgtagggcgatgacggcaccgcccgtacgaaggggctcaggctgccccaccggtgttccgactgctccacctgctcgggggaaggggtgaggatgccgatccgcattcccttggccacggccgccacggcgttgaagagcactttctgggggcggatgaggaggccgccggtttcaaaatcggggaattccccggtgcacaggagcaggacgacgggaatgccgccggtgaagtgctccgcaattttttcgtggatcctcggcgtgatgtgccgctcggccacctggacggatgagccgtcagcgagtctcgtcacgaggacgtagtctccttcccggggagcgaaggaggcgattatttcaggggaaagaccgtccagggcgcccgcttcccgtatttcgatgtccgggcccaggatggaggccacgtcgggaatgacgtcagttctcggagactgtcctatggtcaccgttccaatcacttttttcatcggaatccctcccgaattgagtgttccgcccgtagacgcacccgaggtgccacggacggcccgggccgcaccggaggcattcttccatggatgacggtattccgctggttacggccccctttatgttccgcagcagcccgaggagggcccggatggtttcctccgagccgtcctcgactaaaaaggtggaagcaccctcggccccggaaattccccctctccccacgagccaccttctgggccagccgagcagggcgagggcgtccagttccgtcaccaccctgccggggacgggcacgaggccgactgccatgcccatggcccatacggaggctttccgccccgcgttcccgcaggcttccctcagggggacgggagagagcttttcaagccctgcggccacataacaccgcacgccctcggattcgagggcaggtatgacgctgccgggttctccgcagaggtccttcccggccatcatggcggcgcctccccagggatcgatgaggttggcgccgcagacgcacacatcgtcagggcccatttcccgggcgatctccgccagccttccgtccgccttttcggccataccccttctgagcagaagggaatgggcgccctccggctccgccgccccggaggaaaccgttcccctgggagtcaccctgccggaaatcctcaggggctgcccgcagagttcttcggacagggcggagaccgtggtaccccccttcaggaggatcatcccgtccgacagggccttccggacctcgggcagggacgctatggctttggctatgagccgcttcccctcggatacggtgagggtgaactggcacttcatgacggtcagccggtggttctgcccatggtctggagatggaccatggacccgtacaggtccaccatgcgcctgaactcctcctcgctgcagaagctcagctttccttcgccgaactccttggcggcctcgatgacgaaccgcaccgccgcctcgatatccaccacctgggacgatcccgtggcgcaccccggtacggccgtttccgccgtcagggcgatccccaccaccggcgccttcgtggcggtgcagggctgcagtatgctgttcaggtggtagaggccgttgccgtagggcgttatgtcctgggtggtgatggggaacaccacgggggcccggccggtgacgcttgccatcagggagagaaggtcttcgctcaccctgaggatatacccctccctcaccgtgggggagagggcgaaccccctgcagttgatcacccggtttcccctggtggtgtcgatggaaagcacggcgtcgagttcatcgctcatttcctcgccgttggcgatggccatgttgatgggcgagtccatgaaggggaccgggtcgtggggccgggtgggggcgttggggcagatgtgggtggagatgaacacgtctccggccaggacgtcccccaggctcgccatccggccgagcttcatggccgccgccaccgccgcgacggcgccgtccccgtcagagacgaggcctatccgctccggccgggcgccgattcctcccaggcgacccacgatgccgagggtgggagcttttccccctccccgttttccgctctttccggagaaccagaccttgatgaagtccgtgtggcctttcggtccctccacttttttcacggtgatgctgccggcgctgacgcctgcggcaatcagggcctcccgcaccgactcccccgacgccgacgggctgtcgaggagttcgtaggcttcaatggcatatttcagggacatgggatcttcccctcctatctgatgtattccactattttcttacccaccacgggctcgatttcctccatgagttccatgcaccgcatgccctcacccaggatgagccggtcggcggggacgacgaaaagaatgacggtctgcccttcctttacttccgccgtggtgacgggaagcccggacccggcgtcgagggtcatgatgaggtcgggaaaggtggcaagccgttcgcccctgctctccagcgtcatgtattcgttccagaaggtggtttcgaagtcccccacgatgacggagccgctgtcgaacccgcccctggtgacgatctccttccgggccaccgccccggtgaccatgtgctcaccgccgaggaaattcaggatggaggcgaggacgacatccccgccccggggcatggcctttctcatccgctcccccaggtccatggcctgccggagggcgccgcaggcgccgtgcgccctcgcgtaggacgccgccaccgggttccgggccacggcgacgaggccgccggatttgtccgccgccgcccggatcatggaggacgcgctgccgagcttccccgccacgtgcagttccaggtagagccccttctcccggtctccgccggcggcggactggcgggagacgtacccggggtccctgtggagccccatggaacccatgactcccgtgggatgggccctgccgttgcagagggcgtccaccaccggcaggcccatgagggcagcgggaacccatccgttggtgatggagcttccgccgcactcgttgggtatgaaccctcccggcgccgggcagccgttttctttcagtatttccacgacccggacatagtccttcggctccacccgcgcttccgccgcagcgggggccccgacggccgatccggtgatgagcaccgtgtccggagggatgtcgtcgatatcggccaggaccacctctccggcctccagggcgcccctgaggttgaggcgccccttctccatgctgccccctccgccgcctcccaggactgctccgcccagtatggcggcttctcccgtttctttcgttatgggtcttttcgccaccggctctctcctcctcttcagcccaggacggtccacgccgcagcggcctgggccctcacgggatcgatgacgggcatgccggttttttccctgaggatcccggccgccccgatggtggacatgccggtgcaggcaagaacgagcatcctcgctccccttccggcaagtaaccggcctgcggcgaccaaagcctgcatgccttcgggcttcataaggtccagcgtggactccaccccttcgggcaccgcatccgccgcgaggttttttcccagaatgcggctcatggcctccggcacaatcttcgtaatgccaagaacgcccaccggcaggccggtgatcagggcggccgatgcggccgcccttcctgcgccgatgacgggaatccggagggaccgggaggcctcctccaccgccgggtcgcctgcacagctcacgatgaccgcatccatcccttcccgctccatttccttcgcgagggcgagcaccttggggacggcgatccgctccgtctccccgtcgtgaattccttcgggctggtcggggatgcagcgggaaaccacgtcgaagcaggggaaatactgcataacgagctcgccgtgaaggttcaggagcttttcatccggcgtggtcagcacgcggatgaggccgatccgttgttttgtcattacaggaagctccttatgagggcgttcacgaacccgtaaatgccgtcgcccgccacgaggccgccgccgtagatctcaagctccggcttgaagttcttttcaaggggaagcctgatgagaagggccaccaggagaccgacgccgtaaatggggttgcggatgagcagccccgtggcgaagaggatccccagggcttttttcgccccacccgcgaactgcagtgccgcgccgaagacgctggcgatgacgagctgcctgagaatttccgggttcagccccgccttgaccgtggcggcgaagaccttgctgaccgggggtaccatgtcgagcttgaagtgcatgttcatcaggagggccgtcacgcccacggcgatgaaggcgccgatcagctcggagatgacctgctgccgccgtccgtccatttcgtatgcggggtcgcttcccctgccccggacgatccagccggtcttgaggtcatagcccatatcggcgaaacaggggcccgtgctggccacatacccggtgagaaggatcagggcgtggggagggaaccccatgaacacgccgaggctcaggaagatgatcgtcacggcgaatccggggaaccatccggagtgcatggcggaaaggcccacgaggatgggcgcgacgatggccgagaaggtgcaccacagtacccagatcacgagcttctccatgggcatttcggtccagattccgctcatgaccgccagcaccaccgcgccgagggcgaagaggacgatgtgggcggacagggtctttttcaccgtttcgggcgaaacggtgtactgttcggcggcctcttcccccgcaggagcggacggcttcctgtgccggaaaataatcaccatggcctggaccagggagatggctccggcgccgatcatgacgccgtggggaatgtaggtcttgccgaggtcggtgacgttttcaaagccgatgcccgcaagaatgggtccggcccagggagcgatatggtgaaaatatccccggaccaggaggccgatggccagggccagcatggcgtagacgttggctatgaaggctatgccgac

SEQ ID NO: 1589 - DNA, 5825 bp, synthetic construct
  source 1..5825: mol_type = other DNA
  misc_feature 1..5825: note = Synthetic
cgcaacagaagccctctcttcttgtaccgtgccttttcgttcactgcgctcatcgtattcctcctctttttatggtcgggttcatgccgctccagccggacacgaaaagaacaaagcgtccccgtcctccctccggccgttccgcgagctatcataaacctttacaccgtggtaaagtcaagaaggaatttttaagattcgccgttttttgaaagaagcatttctgctcattccaaagtgcgcggcggtatcttgtaccatgggaaacgtggagtttttcatctaaacgcagtgtaatacaagggttgtatcttgctctgctccgagtgaaagagatctgttatgtttcccatatggctgagaagaatcatcttggagcgccttattagaagttttcgatgtgggcttgactatttttattcaataacttattatcgatttgcgggaacttttgagcgacttgtagcatttcggagtgcggcacgttgctgcaataagagttttactcgcaaggtagccctggttgtttacaaccagggtatccttttgtaaattttctaggttttcgagaaaaacaccacctcaattcgttggattagcttgcgccgtacgagaatgatcggggggctcgcgatgaagcatgttttcggtcttgatatcggaatcgcgtctgtcggctggagcgtcataaacctcgaacgtaatagaatcgaggatttgggagtgcgcgtttttcccgctccagaacatcccaaagacggatcctctcttgcaaagaagcgccgggaagccgggggctcgcgaaaacgaatccagcggaagcgatctcgccttctcgggatacggcagctcttccaagagcatggggttctctcttttcaggagattgatgctctctttcgaagtcccctcgataaaaatccttacgaaatcagagtggacgctctttcaagacgtctttccacaacggagtggtttcaagcgctctaccacatcgctaaacatcgcggtttccaatcgaccaagaaaacaactgcaaactccaaagagaaagaaaaggaagagggagcgcttctcgaagggatcaaaaacaacgcttcgcttctgcatgaagggaagtaccgaactgtcggagaaatgctccttatggaccctaaattccaggatcacaagcgaaacaagcacggagactactcgcacaccataccgcagtcgttgctgcgcgaagaaatcgaaacactgttctttgagcagcaacggttgggcaatccctacacaacggatgaattcaagcggaaaattctcgatacctttgccagtcgtctccattttgccgctcccggacagattgaaagccgaataggcccgtgcactttcgaagcgggagaaaaaagggcgccgtgcatgagctggagcgcggagcggtttattctgttcgggaagataaacaacttgagaatacgagattacttcaggggtgagcgttcgctctccattggggaggcgcacgatctagccaatctggcgtatcaaaaaccggaggtaaagtacaaggatatcagaaagctgttcgatcttgacgacaccgcgtttttttccggaatccgctactccggcaaggatacggagcgcgaaaagagcgagggaacggtgttcgtccgcctgaaaggaacccatgaacttcgtcgagctatcgcaagcaaactgggaaaagaggcctgggaaacgtacgcctcgactccggagattctcgatgaaatcgctcggacgctcacgtggctgaaaaacgaagaggatataagaaagagcctttcagacaagaatatccccccttaccttatcgaggccgtgctggacctcgacttcaagggtacgataaatctttccttcaaagctcttcataaaatacttcctcacatggagaccggtcttcgatacgacgaggcgtggcccaaagcggggtatcaagggcctgtttcggaaatcgaaagcgttcgctccgtattgctccccccggaagacttcgacgacataacgaaccctgtagtcaagcgttcccttcatcagaccagaaaagtggtcaacgccttggtgcggaaatacggctctccgtggtccattcatatcgagcttgccagagagatgggaaagagcttcgacgacaggaaaaagattaaaacgatgcaggaagagaacaacgccgaaaaagagcgcaccaaaaaagactttattgaaaactacacaagggaaccctccggaaccgatcttctcaagttcaggctgtggaaggagcagggcgggttcgacccttatcatcaagtccacatcgactccggcaggctttttcaccaagatgacgccacatacgcggagattgaccatatcattccctacagccgaagcttcgacaattcgtacacaaataaggtgctcgttcttgccgaggcgaacaggaacaaggggaatcgtacgccgagggagtatattttctccgagagccgccctgaaaaatgggaagcattcgtcgcttgggtcgaagcgcagatccgcaacggaaagaagaagagcaaccttttgagagaatcttttacactcgaagattcaaatagaatgacggagcggaatctcacggatacaaggtttattaccagccacctggcaaactatctggaacgctgtctcgtattctccgacccttctccgacgagccgcaaagtgcttcgagtcaacggtgctgttaccgcaacactgagaggaaagtgggggctgcataaagacagggaggccgggcatctccaccacgcgctcgacgctgcggttgtcgctgtgacttctcatggactcatacagagaataacggagtacgaccaaatacggaactcgcctggtgcgaaacgcaacaacggcggcgcacaggatcggacgcctcaaccgcgggaagggttcagccgcgagttgcttgcgcgcatttccccgaatccaacggaagaaatcggcaaggtatctctcccgtcatacggagccgaagagagcgcgtcgcttcggccgttttttgtctcccacatgccggttagaaaggcgagaggcgcggcgcataaagaatccgtccgcagcgtcaagttgggggagaacggtggaacttccatccgtacacccctcgcgaaactggactttaaaagtcttgaaaaaatggtgggcaaagagcgggacagacgattgtacgaaagcttgaaggagcgcctcgcagcgtacgggggagacggcggaaaagccttcggaggctctgcacctccattctacaaaccgacgaaggatggaagccgaggccctctcgtcaggagcatcaaagtgttcagtccgggaacggcaggagtactggtacgcggcggcatcgcggagaacgacaaccttgtgagggttgacgtgtacaagtataagaccaaattttcgctggtaccgcactatgtgccggatatcgcgaaaggcatcgtcaagaaacgaggcgtactcgcccataaagaggagaaggattgggaagtcataggtgatgaacataaattctgtttttctctcttcccgaacgacctcatcgagatcatccagaagggtacggcgaaaacgctgggctattatagaggcatggacagaagcgatggtaaaattgctttgaatcttcacgatgggagcaataaaaaagaaattcgagtgtctacgagaacctgcgattccattcggaagttccaagtcgggcttctcggcgattaccatgaagtaaaaaaagaaaaacctccccaaggcaagatcgacgatgggctggcgtaatatttacatctcgtcgcccgtaaaactgaatcttgtacagaaccaacttcgaatcaccaaagaaggagaggaactggatgttcctcttgaagatattgcggttatcgtcgtcgaatgcctgcaaactttttttacggggcagttgatcagcgaactcgctcagcgggggatagcgtttcttatctgcgacagaacccacctgccgtgcggcgaactgttgtcctatcatcagcacagcaggatgagcaaatcgtttttactgcaaatcaatgcatcggaaccgttccgaaagaactgctggcgcttgatcgtccgtcggaagatactgaatcaggctcgatgtcttgatctgctttggctgcaagaaggcgatacgcttcgtaggctcgccgcgacggtaaaaagcggagaccccgaaaacagagaatctcaagccgcgcagatctatttttcgcaaatccttccgaacagcactcggagaatacagagtccggtgaatgacgcactgaactacggctattcgatttttcgcggcgccgtagcgcgggctcttgcagcccacggctttcttcccgcgctcgggattcatcatcgcaacgaactcaaccacttcaatctggccgacgattttatcgagacgcttcggcctctggtggacctttgggtgagtacgaacgtcggtcccggcaaatcctttgtcccggctcatcgccagagccttgtttccctgttgacgagcaatcttttgataaacggagaacaccagacggtcttacggtgtacggagatcatgatagccgcatttctcaaggcgtgcaaagagaagaacccgtctcttcttgaactcccggagcttcttcccttatcggaacatgcgtatgagtgagcctcggtttatgaggattttggtgctcttcgacctcccggttgtctccaaagaggataagcgtcattatcagcagtttcggaaatttctcatccaggatggatacgacatgctccagttttccgtgtacagcaggatagtgaacggtgaagacgccgtagataagcatctgaaaaggcttgagaagcacgttccggcgaaaggttccatccgttttttgcagattacggagcgtcagtatgcctctatgaaacttcttgcggggaacagaaccctgagagaaaagaagctgagcacacaacagcttctgatattttaagctttttttccgacgctgaaggcgcatgaaatacagttttcatgcgccttcagcgtcgaggtattatagcatttcggagtgcggcagggagctacaaccacgcaaacaagaatatgcgcatgtgggtgattatagcatttcggagtgcggcagggagctacaactaccgtcgccggggagtccatgcaggagcgattatagcatttcggagtgcggcagggagctacaactgcgaaaaaaccaccttcccgatgatactgattatagcatttcggagtgcggcagggagctacaacagattgcaaagcgctacgggtgcggtacggattatagcatttcggagtgcggcagggagctacaaccgccaacgcctcctttcctggccgcgaaggattatagcatttcggagtgcggcagggagctacaactaaaatcttcatgccttatccctccctcgcattatagcatttcggagtgcggcagggagctacaactgccgttgtaatctatggtgggcgatactgattatagcatttcggagtgcggcagagagctacatcacgagcttgttttccaactcgaataaacgtacaataatttgtacaaagcttagtaagaaaccccaaggaagggggaaaagacatactgacagtaaactactcgacgtatcggaacaaatttaaagagtacttcgaccgggtgacggacgacaatgaaaccgtgatcgtcactcgaaagattgaaaagaacgtcgtcgtcatgagcctcgaggagtacaacaacatgatggagagcttg

SEQ ID NO: 1590 - DNA, 3987 bp, synthetic construct
  misc_feature 1..3987: note = Synthetic
  source 1..3987: mol_type = other DNA
cttgcctggccgtctttttccgccgcatcgccgcatccgccacgtttcaatcggcgcggaccgggtgaaaaaggcggcttcaaaccacttcagcttctatgcattactcaaaaaaaactcccacttgaacgctaggtccagcgtgggagcaaggacgccgcaaacggcgttgcctgcggacagaaagcccttgttgaaacaagaaagcaatcgccgcccggatacaatacttgtataataaggaaacgacaatattaagtcaatatttttttcggagggaaataggatggcgaatgccgaccgtgccgctcgcgaacgctatgtgcttggtcttgatttgggcagcaattccataggatgggccgctgttcgtgtcgctgatgatgacaggaaagataatgaacccgttccggtcggagtgctggacatgggatcgcgcgtgttcgaagcaggcgtggaaggcaacatcgaacaaggcagggaggagtccagaaccgtcgcccggcgcaatgcgcggttgctgcgccggcaacacgaccgcgcggcgcggcgcatcgacatcatcggattgcgtttgcagcagaaggggttgctgccttctttgaacgaggagcatcctctcgggcatgacgacgaacaaaagcgttttcccatcgatcgaaacgaccaagcccgctcagaacgcaccagccagcggcatgagactctaaaccgtctggatgcggaactgtgggaggaggcgaagcgaatcaatgcggaaaacccgtcgccgctccccgaggcggatttgcggcagcggctcccgtatttcttacgggcgatggcgctggacccggaccggtgtctttcgtcctacgccatcggcagggcgctgttccatctggcccaacggcggggattcctcagcaaccgacggacagaccggaaagccggcaaggaagaggaactcggcgaagtgaagaaaaccatcgaggttctgaaagtgaaaatgaaggaactgggctgccgaacgttggccgaatatttcctccgtcttcccggggaagaacgcattcgtggtcctaaacactggactgcccgcgccatgtacgaagaagagttcgacctcatttggaaggcccaggcccggcgcgacccggcgcggttcactgacgatttccgcaagcggctccatcgtgccatattccgccagcgtccgctcaagtcggcggccggcctggtgggagaatgtccgtgggagaaaggacggcggcgtgcgccgtgggcttgtctggacgcccaacggttccgtatgctgcaacaggtcaacaatatccgcgttctgggacgggagcagccagaattgtctccggcagagcgcaaggtgcttgttgttcgcctggaggaagggggagacctgcctttcaaggaagcggccaaactgctgggactgaagaagggggagaagctcaattttaacgaggaaaaagggggtgagacaaagttcgtcggcaaccgcacggcgaagaagctcatcgacgtattcggactcgaacgttggcagagcatgtcagcggtcgaacacgacgccgtcgtggaggattggcgcaagactgtgaaggacgaaacgctggaacggcgcggaacgaaggcttggggactggacagggaacaggcacagaaattcgccgggctttccctggaggacggttacacaggactttcgctccgggctattgcgaaattgttgccggaaatgggaaagggaattccctatatggaggcggccaaaaaggtatatggcgaccgccttcctgccgatgtgatggatttgctgccacgggtggataaggcgatacccggactccgcaatcccgcggttgcccgcaccctgacggaattacggaaggtggtcaacgccttggtgcggcgatatggaaaaccggagtccattcgcatcgaactggcgcgcgaactccgcaaaggccgcaaatcacgggaaacggcctggaaacgtaatcgggaacaggaaaaaaggcggcaagcggccgggaaaagcgttcttgacgaaatgggaaaccagaatcccacccgggccgatatcgaaaaaattctgctgtgggaggaatgcggcaagcaatgcccgtacacggggcgaccgatcagcatgggggcgctttttgacggctcattcgagatcgaacatatcgtgccgctcagcatttcgctggacaattcatacttgaataaaacgttatgcgaacgccaggccaaccgcgacaagggtaaacagacgccttatgaagcttttgggaataacgagcagcgatggcacgaaattaccttgcggctgaagaagttccccggcggtttggctaaccataaagtgcggcttttcctgtccaaggacaagccggaatttgatgaattttgccgtcggcaattgactgacaccgcctacgcggccaaggaagctcaagcctaccttggcctgttgtatggcgcggacgcaaatcgccgcattcaggcggctcgcggaggcgtaaccgccttcctgcgcgatgaatggggtcttcgcgggttggtgaacaactggccgctgaaccggaaaccggccgaagtaattgaagaaaacctcaaaagccccgggaaaggtcgggcggaccatcgtcatcatgccgtggacgcgctggtggtggcgctgaccacccggcgcgctatgcacatcctctctgaggcggcggtgcgggcgcaacgcgaaggccgccgttggttcggcgggtatgtggagcttccctgggcgggattctcggaggacgtcagggaggcgacggacaagatcgtggtttcacgccgtgtctcccgaaaggtcagcggaccattacacgaacagacctattggggaccaggcccgaaaagcgaaacaccgggaaaaaaacgcaaacgatcaaagacgacaccgaacaccgaaacgcccggcgatgcgaaaaaagtcgataatgaccggccctaccatttacggatgccggttcacaagctttccgccaaggacatcaaaaacgacgaggtgatcgtcgacaaggctgttcgtcaggcaattcgtgacgccttcgggcgattgccaaaggccgatctcaaactgtttgagaatccggactgcgctccgtatctgacgacgaaggatggccgcaggactccgattcgcaaggttcggattcgtaaggttcggattcataaaacccaaaaactcctggctatcgctgaaggcgagcggcggcgatatgcggtcggcggcaacaaccatcatgttgaggtgctggcgaagctgaacaaaaacggtggggaaaccggccggacctggagatgcgtcagcatgtttgaagcttatcgccgcctgaaggagaatatttccgtcgtatgccgcagccacggtcccgggttcaagttcctgttttccctggcgccgggtgaaagcgtcatgttgaccgacgacaacggcgtggatcggcctttcgtcatccgcggcaccagcgagaaaaaacttgatttcaccgggaatctcgacgcacgccccaaaaagtacatcgaaaaggtgaacaagggaaaaaacgacgcaaaagacattgtcgtcatccagtcggacggcgccttaaaaaaaagaaacgtccgcaaagtcgtcatcacgccgctgggcgaaataagggaagcccatgactgatcaccgtttcatcgacatcgctgaggaaggcctcaggctgcgcgccgaatcgggccggttgcgtttggaacgctgtgaaggttcgggtacggaatccgttgtccacacggttccaatgcacgatttggatgcggttgtcctggcccatgagcggatcagcgtttccggaccggccttggcgggcctggccaaggccggatgcggcgtggtggtctgtgatgaaaagaaaaatcccgtgggtatgttcctgccgctcacgggccattccacccaggcggaacgtttccggg

SEQ ID NO: 1591 - DNA, 23468 bp, synthetic construct
  source 1..23468: mol_type = other DNA
  misc_feature 1..23468: note = Synthetic
tgcgcgcagtgcggaatacagaatcctgaagacccccgacgccaaaaaatcatgagcagatactggagcgagttcgttcaccatcttgagccgtatgtgcccggcgaacagccgaaaatggcccggctggtgaagctgaacaccaatgaaaatccctatccgccgtcagacaaggtgctcaaggcgattgccggggccaccgatgaggcgctgcgcctttatcctgacccggacgcttccgcactgaagcaggcgattgcggactttcatggcgtgcaggccagccaggtgtttgtcggcaatggctccgacgaagtgctggcccatctgttcatggggtttttccggcagccgcaaccgctgctgtttccggatatcacctacagtttctacaaagtctattgcggcctgtacgacatcgattaccgcaccgtgccgctgcgtgaggatttcagcctggcgctggcggattttgacagccacaacggcggcatcattttccccaacccgaacgcacccaccggccgcctgttgccgctggcggacattgaggcgttgctgcaacgcaataccgaatcattggtggtggtggatgaagcctatgtggatttcggcggtgaaagtgcgattgcgctggtgaaccggtacccgaacctgctggtggtgcagacgctgtccaagtcgcggtcactggccgggttgcggatcggttttgcggtcggccaggcgccgttgatcgatggcctggaacgcatcaagaacagcttcaattcctacccgctggaccggctggcgattgccgccggtgtggcgtcgttcgaagatcacgccgcattcgaggaaagccggcagcgcattatcgccagccgtgacgcgctgacggcggcattgacggagcgcggtttccgggtgctgccgtctgcggccaacttcatttttgccagccatccccggcatgcgggggacgcgctggcggcggcactgcgcgagcatggtgtgattgtgcggcactttggcaaaccggcgcgcattgcgccgtacctgcgtattaccatcgggacagaagagcagaatgctgccttgctggcggcgctggatcagacactctgacggcaacggggcggcctgcgcggccccggtctctcaggtttcactggccggtggccgcgtgccgatttccaccgtcacgaccgtttcctcgcgattgcggatcaccgtcagctcaagccgggtgccggggcgtgcggctgaaatgatgttcatcgcttcatagccatcgcgcagcaactggccctcgatacccaccagtacatcgcccggacgaatcccgccctggtgtgccgggccctgcagggccacttcctgaatcagtccgccacgcacttcgcgcaggccgaggtcggtggccatcgagggcgtgacatccttcaccgtgacacccagccagccacgaatcacacggccatgctcgatcagatcgttcatcacattgcgcgcggtggtggcgggcgtggcgaagccgataccttcccagctcccgtcggtggagagaatggcggtattgatgccgatcagattgccgcgcgtatcaatcagcgcgcccccggagttaccccggttgatggcagcgtcggtctggatgaaattctcgaacgtggcgatgcccagattgctgcggccggtggcgctggcgatacccatggagacggtctggccgacaccgagcgggttgccgatcgccagcaccacgtcgcccacccgtaccgggccatcattgctgaggctgaccaccggcaggttctccagcgaaatgtgcagcagcgccagatcggtttccggatcggtgccgaccacccgcgcgggtgactcgcggccatccagcaacgccaccaggatttcatcggcgtcgcggatcacgtgatagctggtcagcaggtagccatcgggggaaacgatgacgcccgacccgaggctggaaagaatgcgctcgcgccgtggttcctgcatgtactgttccagcagcggcgcgggcagttcgttattggagcgggtcacaatctgcgtggtatagatattcaccaccgccggtgccgccttggccaccacatcggcataggacgtcactaccgggggagaggccagatggccgccgggctggccgttggggccgttctggttcagccagaggacggcaagccccaccacgatgccggtcagcaccggcccggccagaaatttcagcaccttcatgtcaggtatcctgcgacggacattgtgcggcggcgcgtgcccccgcgtacacttggcggcaagtgtagcagagccgtgaagaaggcggcgaccggcgcgccgacggcaggcaacaggagtgataccgatggtaagacgtgacgacatgctcaaggcactggacaccctgctcaaaccgcagcagttccgtgattattgcccgaacgggctgcaagtggaggggcgcgagcagattcgccgcgtggtgaccggtgtgaccgcctgccaggcgctgctggatgccgcactggtagaagacgccgacgcggtgctggtgcatcacggctacttctggaaaaacgaggacgcccgcatccgtggcatgaagcgccagcggctgcacacgctgctgaaaaacgacctgaacctgtttgtctaccacctgccgctggacgcgcacccggatctgggcaacaacatccagctcgcgcgccggctggggctggccgtgaccggctggctgggcgagggcgacagcgcactgggcctggtcggccgcctgccggaaccgatgccggcggcggatttcgccgccctggtggaggacgcgctgggacgcgacaccctgcatatcggcgagtccgaagacgagatcgactccatcgcctggtgcaccggggcggcacaggggtttatcgagcaggcccaggccgtcggcgtggacgcgtatctcagtggcgaaatttccgagcccaccgtgcactttgcccgggaaaccggcatccactatttcgccgccggccaccatgccaccgagcgttacggtgtgcaggcgctgggcgaatggctggcccggcagttcgatatcgaacacattttcatcgacatcgataacccggtctgacacctcccggccacgtgctgccggtcatgccgccggctactggcaccatgctatgatccgcgcctttgtgcgcagtgcccggtcgggcggaacagaacatgaaagtgcttgtagtctacaacccggcggccgggggcggccgggaagctctcctgaaacaactggtgcgtgcgctcaccgcacgccacgctgacgtcgaggtgtaccgcacccgagcgccgggcgacgctacccgccacctgcaagagcgcgcccaccagggcgatgtggtcgtggcggtgggtggcgacggcaccaccaacgaagtgctcaatggcctggccgggaatgtcccgctggggatttttgccaccggtacggccaacgtgctggcgcgcgaactggcattgccgaaacacccggaacaggctgccgatgtaatcgtccagggtgtcagcatgccggtctggccgggtgacctgaacgggcgccgcttcctgatgtgggtcggggtggggtatgacgcctgggtggtgcaggccaccgacctgacggtcaagcgccgtttcggcaaactcgcctatgtgctggccatgttcagccagattcgccgttatggcagccagcgctaccgcttcctgctggatggccgcgaatacctggcgtactcggcggtgatcgccaatgcccgtcactatggcggcagcttcatcctgacccgtcaggcagacctgacccggccggcactccaggtgctgctgttcacccggccggaccgggggcaattgctgaaatgcctgctggcgctgccgtttggcgccatggagcgggtgcccggtgtggtgtcagtgagcgcccgcgatattcaggtggctgtgccgccagggggtctggacgagccattgcaggcggatggcgaccccgccggcgtgctgccggcggcggtgacggtggcggaaaggcccgtgctggtcagagtgccggcggcgacggccgcacgcttcgacgcgaggcggcagcccggctgagtcagcgggctgcgcgccgtggcggctcgccgtccacggaacagccctggtcttcgcagccctcggcatagtcgcgagggggctcgacgcgggcgtctgtctcttccggggtggtgatggagaggtcgtccacgggcgagaaggggccttcgggtacgtggttgcgcaacccgaagtcttccgccagggtgccctgggccgagggggcatagtccagcggctgggtgacactggccggcacatccttgttgtcgcctggatagccgggcaggctgtcgagggatttcgccatcgccagccggcggccctgctcgctgcacagcgtgcgcgcgcctgccgacagatgctcatgcacggcgcggtaggaggctgtcatctggttgaccagctcagcggtacgcaggaaatggttgtccacctcgtcccggtgccgggccagattggccagggcctcgtcccgttcctgacgcaactggcgctgctggcggcgggccggcatcagcaggaacgcgagcgctgcgccgacaacgccacccatcacgaacggcagcaggacagcggcaagattttccatgattcactccttggcctggcggtggcacccgatagccggggaccacagcgtgcacgctattgcagcacagcttcctcaccagcgccaagcacactgccgctgtaattgttagaattcttggcattcggcgaacctcgccgcacacccctgagacaggagctgcagcatgtcgcgcgccagcattgagaaagtgtccctgaacgggccggccggaaccctggaggcggtgctggaggccagcggtgaggcgccctcgttcatggccatcgtctgccacccgcatccgctgttcggcggcaccatgaacaacaaggtggtgaccaccctgtgccgggcctgccgtgatgctggcggcgcggtattacggttcaatttccggggcgtgggggccagccagggagcctacagtgacggcatcggtgaatgcgaggacctgctcgcggccgaatcctggctgagccagcgctatcccggactgccgctgtggctggcggggttctccttcggcagttttgtcgccgcgcgcggcgcacgcattctggccgacaacaaccgtcccgtgcagcatctgttcctggtggcgccgccggtgcatcactacgatttcgtatcgatagatcgcgtcgactgcccggtcaccgtggtccagagcgaagacgacgaggtggtgcccgccgagcaggtgttcgcctggcagcagcagacaccgctggcccctgacctgatccgcttcagtgatgcagggcatttcttccatggccgcctgatacaactggcggaggtggcgcgcagccgtctgccggaatagggcgcgcccgctacgtcgcggccaacggcgtcgggggcttttcgagtacggatcacaggccatcatccagggcgcgcgctgcccggcaaattgccaagccccgatgtcagcgctacattgagcgcccctttgccctctgggcggacccatgacacctcttgaacattacaaacgggacctggaacgccccgacttttttcacgacgtggcccaggagcgtgcggtgcggcgcctggatgcgttgtatgaaaagctgatcgagccgccgcgccggggcgggctgttcggccgccggcgggagcgtgccccggtcaagggcctgtacatgtggggcggcgtgggccgtggcaagacctatctgatggatgtgttttttgatgcactgccgttcaaagagaaacggcgcatgcacttccaccgcttcatgcagcacgtgcaccaacagatgcgcgcccgtcaaggacagaaaaatccactgctggccatcgcccgtgatttcgccggcgacacccgggtgttatgtttcgacgaattcttcgtcaccgacatcaccgacgccatgatcctggcgacattgctggaggccctgctggctgacggcgtgacgctggtggccacctcgaacatcgaaccggacggcctgtaccgtgatggtctgcagcgagcccgcttcctgcccgccatcgcgttgctcaaagagcacaccgaagtgctcaatgtggacggaggcaccgactaccgcctgcggctgctggaacaggcggagctgtaccactgcccgctgggcgacgctgccgaccggttcctggcagaacgtttcgccacgctggaaacggagcattgccggcaacgcgaacaggtggacctggacgtggaaggccggccgatccgtgccgaacgtgtcagcgaagacgtcgcctggttcgagttccggtcactgtgtgatggcccgcgttcccagaacgattacatcgaactggcgcgtgagtttcacaccgtattgctggccaatgtggaacgtatgggggtggcgacggatgacctggcccggcgtttcatcaatatggtggacgagttctacgatcgcggcgtgaagctgatcatcacggcggaaaccccgatcgaggacctctacgccggcgggcgactggaatttgagtttgaccgcacccgaagccggttgctggaaatgcagtcacgcgaatacctggcgcgcgaacaccgcgcctgacgcatttccccgccgtgacaggcggcagcatccggccgggctgactgaacctgactggagactgcaatgatcccgcgtacgctgttcacttccgaccacgagactttccgcgataccgtgcgccgcttcctggaaaacgaggcggtgccgcatcacgaacaatgggaaaaaacaggccaggtgccagcggagctgtggcgcaaggccggcgaacagggtttcctctgcccgatggtggcagaagagtacggcggcatcggcgccgattttctctacagcgtggtggtcagcgaagaagtctcccgcctgggcctgaccggcatcggctggggcctgcacactgacatcgtggcgccctatatcgagcactacggttctgaagaacaaaagaaaaaatacctgccgaaaatggtgaccggtgaactgatcactgccatcgccatgtccgaaccggccgccggttccgacctccagggcatcaagaccactgcccagaaagacggcgatcattacgttatcaatggctccaagactttcatcaccaacggccagaacgccgacctggtgatcgtggtggccaagaccgacccgaccaaaggcgccaagggcatcagcctgttcctgatcgaagccggcaccccgggcttcgaaaaaggcaagaacctgaacaaagtcggcatgaaagcccaggacacctccgagctgttcttccaggacgtacgcgtcccggcggacgccctgctgggccaggaaggcatgggctttatctacctcatgcaagagctgccgcaagagcgcctgaacatcgccgtgaacgccatctccatggccgaaagcgccgtacaactcaccatcgactatgtgaaagaccgcaaggcgttcggccgcagcgtcgccgaattccagaacactcaattcaagctggccgaactgcacaccgaagtcgaagccgcgcgcgtctacctggaccgctgcatcgaactgcacctgcagaaaaaactcgacgtgccgaccgctgccgccgtgaaatacttcaccactgacctgcaatgcaaagtgatcgacgagtgcctgcaactgcacggtggttatggctatatgtgggagtacccgattgcgcgcatgtttgcagattcgcgtgtgcagcggatttatggtgggacgaacgagattatgaagagcattatcagcaaggcgattctggcctgatgacgtcggggccggggctgttcctctctgccagaggggctgccccgccccctagttcagctctgttcccttgcttttcccggcacggcacctcgtcttgcgggtgcaatagaagtgactcggcctgtccagtgtcgccagcagttgacccagcaccagccctggtagggcaagctctctttgcggcgcaggtctgcaacgatgggcactgaaaatcaatcgctaaaccggcccgattgtgctgacggcttgatcaagtggtcagtacaggccgttgtttaagcgtctgccttatgggcaaaggcaatcagcaggccggtgtcagcgaccaggcacgccattcatatcctccagctccttctggagttcgtcagcaccgtaacgcaccaccgccacgccgtgcgtgccgcacaacgtgataaaggcctcctgggaaaggcgcgcgatcctggcggctttcccgaggctgacgacatccgtggcaaagagtttcagggcgagcgccgccagcacgccttcccgcacgagggtttcatcgaacggcaacgcaaggaatacggggcggccgtgcttagccaccagagcgagctctccggcttctgcgccacggaccagatcgccagtgcggtcgcgcaggtcacgtatgctgaaggtttccatggcatcacctgagaatgatttgtgcccacaaatgctggcacaaattgactggggggtgcaatgtgatgcatgtccgttgccccgccagcccaatgtcctggttcattccctggtactggctgctcagtctccacgcttcctcgttacacgtcttcgccttgccggggtgtgacacccgtcacgatatctgcttgaatctttccagcgccgtacacgggtgggggcggctacaacataagaaacagggatgcaccgtgaaccggctggagcgcctatatcacattcatgagaccttgcgtgacgcccgtcatccggtgccgctgcggcgactggttgaggcaatggaggtcactgagggggctgccaggaaggatatccgctatctgcgtgatcatttccgggcgccgatcaaatacgacagccatctgaacggctattactacgacccggaggctgacgcttttgagctgccgggcctgtggttcactgctgcggagctgcacgctctgctggtgtgccagcaaatgctggaaggcctgcagttcgacgccattgaagacctgatgaagccgctcaaggaccgtatccgagaactgctgaaagcaggagggcaaggggacgtcgatatcagcacccgcgtgaaggtccagccagtccattaccgcagtgtccacagcgccacgttccaggtggtggcggatgccctgatggcggggcggcagctgagttttgagtatcaggcgcgtagcaaggccgaacgcagaatgcgccaggtgagcccccagcggctgctgtattaccgggataactggtacttgctgggctggtgccaccgggccgatgccctgcggctgttctccctggacaagatcgagcacccggtggctcaggacaggcaggcgctgcagcgcaccgatgaggagctggagctggataccgagggcagcttcggtatttttctgggcacggcccgtgagcgtgctcacttgcgtttcaatgccagcgcggccaagtgggtcgcggatgagcgctggcatccggaccagcatggggagtggcacggagagcattaccacttgacggtcccttacgccaatcccacggaactgatcaaggaaatcctgcggcatggggcggatgtggaggtgctggggccactggaattgcgagaagcggtggctgaaaggttgcgcgaagcggtgaagcggtacggttagcaggtgctgggggggtactgtacaaaagggtagtgccgttctggtacaacgtggcttgttaggcttgggatagtgggacaggagaatgatgatgaacaaaaaagaagaaagcccccgaaggggctatccagtatcggtgatgtcgagccgaagctctcatcttgttaccgaaggtccccaccatcggaaagttcgataccgttgggactctaggcgaacatgctaccactgtcaatcgccttatttccgggatcaaacaatttgtaattgagttgaaggaaccaatcatgcgttatcgtgtggggcttgatttgggaaccgcgtccgtgggcgctgcggtattttccatggatgagcaaggcaatccgatggagctgatctggcattacgagcgccttttctcagagcctcttgtgccggacatggggcaacttaagcccaagaaagctgcacgacgtttggctaggcagcagcgccgccagattgatcgtcgtgcgtcgcgcttgcgccgtatagcaatcgtatcgcgacgccttggtattgcccccggtagaaatgattctggtgtgcatgggaatgatgtacccacactgcgtgctatggcggttaatgagcgcattgagcttggccagttgcgcgctgtgttactgagaatgggtaagaagcgtggttatggcggcactttcaaggccgttcgtaaggtgggggaggcaggtgaggtcgctagcggcgcatcgcgactggaagaagagatggttgctttagcctctgtgcagaacaaagactcggtgacggttggtgaatatcttgccgcgcgtgttgagcacgggttgccaagcaagctgaaagtggccgcaaacaatgaatattacgctccggagtatgcactatttaggcaatatctggggctgcctgcgatcaaagggagacctgactgcctgccaaacatgtatgcattgcgtcatcagattgaacatgagtttgagcgtatatgggcaacacaatcccagttccatgacgtaatgaaagatcatggagtaaaggaagaaatcaggaacgcgattttctttcagcgccctctcaaatcaccggcagacaaggtcggtcgctgttctctgcaaaccaacctgccgcgtgcgccacgggcacaaatagcggctcagaatttccgtattgaaaagcagatggcggatcttcgttggggtatggggcgccgagcggagatgttgaatgaccaccagaaggctgtcattcgtgaactgttgaaccagcagaaagaactctccttcagaaagatctacaaggagcttgagagggccggctgccccggcccggaaggcaagggcctgaatatggatcgtgccgccttaggcggccgcgacgatctttccggtaatactacgctcgcggcttggcgcaagctgggtctggaggatcgctggcaagaattggacgaagtaacgcaaattcaggtgatcaattttcttgcggacctcggctcaccggaacaactggatacggatgactggtcatgccgattcatgggaaaaaacggtaggccacgcaatttttctgatgaatttgttgctttcatgaatgagctgagaatgacagatggattcgaccggctttcgaaaatggggtttgagggtggcaggtcgagttactcaatcaaagcactgaaagcactcaccgagtggatgattgcgccccattggcgagaaacaccagagacgcatcgggttgatgaagaggcagcgatacgggaatgttatccggagtcgctggctacgcccgcacaaggtggccgacaaagcaagctggagccgcctccgttaacgggtaatgaagtcgtcgatgttgccctgcgccaggtgcgtcacactatcaatatgatgattgacgacctggggtctgtgcctgcgcagatcgtggttgaaatggcacgggagatgaagggcggcgtcacccggcgtaatgatatcgagaagcagaacaagcgttttgccagcgagcgtaagaaggctgcgcaaagcattgaggagaatggtaaaactccgacacctgcccgaattctgcgttatcagctgtggatagagcaagggcaccagtgtccctactgtgaatccaatatcagtcttgagcaggcgttgagcggcgcatatacaaactttgagcatattctaccccgcaccctgacacagatagggcgcaagcgctcggagctcgtgctggcccatagggagtgtaacgacgagaagggcaacaggacgccgtatcaggcatttggccatgacgacaggcggtggcgaattgttgaacagcgtgccaatgcattgccgaagaaaagctcgcgcaagacgcggctgctattgctcaaggattttgaaggcgaagcactgaccgatgagtccattgacgagtttgcagatcgtcaactacatgaaagctcgtggcttgccaaggttacaactcagtggctttcatcacttggtagtgatgtatacgtatcgcgtggatcgctaactgcggagttgcgcaggcgctgggggctagacacggttattccacaggtgcgctttgaatcaggcatgccggttgtcgacgaggagggggcggagatcaccccagaggagttcgagaaattccgacttcaatgggaggggcatcgcgttacccgtgaaatgcgtacagaccgtcgtccggataaacgtatagatcatcgccaccacctagttgacgccattgttacagctcttacctcaaggtctctctatcagcagtatgccaaagcgtggaaggttgctgatgagaagcagcgtcatggccgtgttgatgtaaaagttgagcttccgatgcccattctgacgatacgggatatagcgctggaggcggttcgttctgtgagaattagccataagcctgaccggtatccggacggtagattctttgaggctaccgcttatggtattgcgcagagattagacgagagatcaggtgaaaaggtggattggcttgtttcacgaaaatctctgacggacctggctccagaaaagaagtctatagatgtagataaagtgagagcgaatatttcccgaattgttggagaggcgattcgattgcatatttcaaatatttttgagaagcgagtttcgaaaggcatgacgccacagcaggcactacgtgagccgattgagttccagggaaatattctcaggaaagtgcggtgtttctacagcaaggcagatgactgcgttcggattgaacatagtagtcgccgagggcatcactacaaaatgcttctcaatgatggtttcgcatatatggaagttccctgcaaagaagggattctgtatggcgtaccaaatctcgtgaggccaagcgaagcggttggaattaagagggcgcctgaatccggagattttattcgattttataagggagacaccgtcaagaatatcaagacgggtagagtgtacacgattaaacagattctcggcgacggaggaggtaagttgatccttacgccagtgactgagactaagccggctgatttacttagtgcaaaatggggacgtttgaaggttggtgggcgcaacatacatttgttaaggctctgcgcagagtaacatgcatgtcggagcagcacattctccttgttgaaagcccgtgcgcactgaatattcaccttgagtgccttaaggtttcacgcaaaggtatggagcctttaaggctcctgccttctgatattgcagtgctatgtctgcaccatcatacggtgcaattatcggttcatgtgttgcgaaagctgacagaggcgggtgccgctattctggtgacggatgatcgtcaccagcccgcaggattaatgttgcaggattacggccgtcctaatgcggtggttaggctgcgtcaacagatcgcattggaacagagcggccaggacaggctggtctggcagcagctggtttcatggaagctgcgtacgcaaagtaggcttctcggcaagttggagcgaagatctaccgcccggcttgcgcgcttggccgaggctgtagagccgggcgatgctggccacctcgaaggccaaggtgccaggctctattggcgtgatctttttgatgtgccttttaagcgccagaaacgtggtgcagaagacccgattaacacccgcctcaattttggttatgcgctacttcgatcgttggtggcgcgtgagctggcattcgcggcattgcggccggaaattggcgttgggcatcgaagcacggagaatcctttcaatctggcggatgacttccttgagccataccgtttcctagtagatgagattgtggtgtcttatcctcctgatgaaaattcagagtttgatgcgcagagcaggaagcgcctgatttccgatctttttgagcaaacggtctgcttgaatgggcaggatttccgattaccagcggcgattcgcaagacggtagcgagctatcttcgaattctggaagcaggagggggtgggcgcagacgcaagctggagctgccggagtgcccgtaatgcaacatggcaatcaatgggtggagagtcatgtggttaatcgccgtatacgactgccccatgaccacgccggaagcccggcatgattacacggtatttcgcaagcgcttgctgaatcatgcgttcatacaggttcagtattccctgtatgtgcgtcattttccgaccatggcagctgccgaggccatgattcagcgtcttaagcaccagattccccctggggccaaggtggccttcatgctcatgacggacaagcagtacggtatgacgcgagaatttcttgggccaaggccttaccagcaccggccggatgctccagagcagattatgctgatctagcagatcacttcgaatcattgctttaggtaaagaaaaccccaactccatcaaggagttggagtgattcagatgctatcgaactttccgatggtggggaatcggaacatgcgggtccgcgtgctggccggacagttcgatgctatcgaactttccgatggtggggaatcggaaccatcagcatggagcgcaggccgtactgctcgatgctatcgaactttccgatggtggggaatcggaacatgcggagtacgacatctatccgccaggtggatgctatcgaactttccgatggtggggaatcggaactatgtggcaggagcagatggaccgtctccagatgctatcgaactttccgatggtggggaatcggaacggtgaatggggtcacatcgcctccctgaacgatgctatcgaactttccgatggtggggaatcggaacaccatgaccacgctggtggcagctctgcgagatgctatcgaactttccgatggtggggaatcggaacctggtgaagcacatccttgccactcatgaggatgctatcgaactttccgatggtggggaatcggaacggtgacgcttgacggtatcgaggtttcctggatgctatcgaactttccgatggtggggaatcggaacgatgtaatcctgatcgattagcgccggaatgatgctatcgaactttccgatggtggggaatcggaacgtacgggcatttgattggagagccaactgggatgctatcgaactttccgatggtggggaatcggaacacacacagccgcacagctgcgccagcgagtgatgctatcgaactttccgatggtggggaatcggaacgtgcaggatctgatacagcggatgctcaacgatgctatcgaactttccgatggtggggaatcggaacaagggggcattgaatgccggcaactcacccgatgctatcgaactttccgatggtggggaatcggaacccctcaatgatgttgttgaacacccgctcagatgctatcgaactttccgatggtggggaatcggaaccggagccgtaatcgttcctatacaccgaccgatgctatcgaactttccgatggtggggaatcggaacgtgctggctgcgcgggttgattcgattattgatgctatcgaactttccgatggtggggaatcggaacggtcaacgagtgctgcattctaattgcatcgatgctatcgaactttccgatggtggggaatcggaactgggcgaagccacggccgcctgcctggaaagatgctatcgaactttccgatggtggggaatcggaacggccctgagcgtcgggtcgcgccggttcgggatgctatcgaactttccgatggtggggaatcggaacctgcggcgtgaggctgccctgcgggctgatgatgctatcgaactttccgatggtggggaatcggaaccgcgacaggagcaggttgtggccctggtccgatgctatcgaactttccgatggtggggaatcggaacatgcaggagggcgtcacgcaggagcgcgacgatgctatcgaactttccgatggtggggaatcggaaccaaggagcgcgtcgatgaatccggcgtcacgatgctatcgaactttccgatggtggggaatcggaacggaacagcgagcagaccgaggcgcgcgtgcgatgctatcgaactttccgatggtggggaatcggaaccgcgacaggagcaggttgtggccctggtccgatgctatcgaactttccgatggtggggaatcggaacggtatcctccatctcccgctcctcctcctcggatgctatcgaactttccgatggtggggaatcggaacaggcgtgcgaacgtggtcgcggtcatgctggatgctatcgaactttccgatggtggggaatcggaactcatcttcttctacctcgttgacgaaggatgatgctatcgaactttccgatggtggggaatcggaacggaacagcgagcagaccgaggcgcgcgtgcgatgctatcgaactttccgatggtggggaatcggaacggaacagcgagcagaccgaggcgcgcgtgcgatgctatcgaactttccgatggtggggaatcggaaccccagaacataagcgcctggctgatatctggatgctatcgaactttccgatggtggggaatcggaaccgcgacaggagcaggttgtggccctggtccgatgctatcgaactttccgatggtggggaatcggaacggtatcctccatctcccgctcctcctcctcggatgctatcgaactttccgatggtggggaatcggaacagcagtttctgcaacattcggcaagccgaaggatgctatcgaactttccgatggtggggaatcggaaccaggtattcgatgtatccgtacaggccatgcgatgctatcgaactttccgatggtggggaatcggaaccgagcagatcaagttcacgagcaacgacaggatgctatcgaactttccgatggtggggaatcggaacctcaatcgtgttctggctctcggatcgcctgatgctatcgaactttccgatggtggggaatcggaacgcggcaccgtgcacggcggacgagaaaatagatgctatcgaactttccgatggtggggaatcggaacttcagatcgaggatggtgcgctcggcccgcgatgctatcgaactttccgatggtggggaatcggaacttcaagcagcaacattcgctctggtagctcagttaaacaaatactccctaatccgactttcctcttccatcaccagattcttctgcacattcttctccaccatcttgcccagttgactgttcatgctgtgccgcatggcgccaagaaacgcgggtggggccacgagcatcagtgcggcgaacttttgctgattgcggcctgcgtccagtttctcgcagatttcccgcgcgaaggcatgctgctgctgatcccgtacgtctggcggctccatcgcgctgcggctttcatctgcgctttcgaaaacgcggcctgggcggtcgctgtagatgtcctgagtgcgcaggcgggcttccggaaaactcagctcggtgacgggggtaagtggctggacgcgattacaggcgtaaaagatacgagcgtgggtactgtcggcgacgacgatccaggttttctccatggcggcctccgtggtggggtggcagggatgacaggtcgccggtggcggcctgccgccttcctcactggtcagactggcgcaacgggaaaagtttctcaatcagttgtccggccagcgatgcgcccatgagctgatagccggtggcggatgggtgatagccgtcccgtgcgagcaggtcaggatgggccaggtcgccgtagggcaggtaggggcagccagtgtcgcggcacacgtcctgaagcgcctggtccagttgccgggcgcgcaggccgatgacgtagcgcaatggctggggcaaggcggtaaagcgcgacatcggtggcacgggggtgaagcagacgctcgcgtgaggcgtcagcgtgcggatcagggcatgcaggtcggcgcgccagcgccgcagcggtgtcagggcggtggtgtcgttcacgcccatcatcaccaggataaggtctggcgcggtgtcgtctgcgggcaacggctgcgcgagcaggccgtgcaggcgcaggccgttggtgccgtggcaatgccagtgcacggcgcggccggtgtggtgtgacaggggcgtggcgatggccgggccgaggccgtcgtgctggtgtgtgacgcccacgccggccacgggggattcgccgatgatcagcagccgcagtgccggctcgccggtgccgcgggtcgcctgttgtggcccgtcggcctcaggcaggcgtggtgtgtcacggcgtgtgcggcgcgcctggtacagcagccagggcgccagtaacgcaaacagcagccagaagcgcacggttcagccgacgaacatgcgcttggccaggggcaggccgcgccagccgctgatggccagggtggtgagcaggccgctgatcaggccgccggcgacgccgcaggtcatgatgtcctggccggtgaggtacaggccggggatgtcggtcttcgggcgcagccagtcctgtttgaagcgcgacgggtcgtggttgaggccgtagatttcgccgtgggtgtagcggcagaaatagtcggtggaaagcggggtggagagttcgtagtaatccaccttgccgcgcaggtgcggcattttctcgaacagtttttccagcagccgctgggcataggcttcttttttggcttcgtaatcctcgccacgtttcccccaggtcttgtcggcccaggcggcgtaccactcgtgtggcccgaggcccacaatctcgatggtggcgcggccgggatagcggcggctgaaatccgggtccttggcggacgggaaggaaatataggtgagcggcaggtcggtgttgtccgggtctttcaggaaggcgtccaggtgctgctcgtactgctcgccgggataaatccagaagttggttttcggcagtctgagattttctgctgtgtcgcgcaggccgatgtacaggcacacgctggccatggagcgctgcacaccgtgcaggcgttggcggtagggcacgctttctgcgccgtcgggcagcaggctgccgaaggtgttgaacacgccagcgttgctgatcaccagtggtgcgtggatgtcctcgccgtcggccatgcgcacgccggcggcacggtcggattcgatcaatatctgctgcacgtcggcgtaggtgaagacatcgccgccgccttcctggatcaccggaatgatggtggcggccatgcgtgaggcgccgccgatggggtagtagccgccgtacagataatgccgcgcgatcagggcatggatcaggaagctggactgtgccggtggcaggccgttgtcaccccactggccggtcagggcggcgatcagtgtctggtttcgggtgagctggctgagcacgtcacgggtcggttggttgaaaaacgcgggctggcggcgttgcagcggtttcgccagcatcttcggcagcagtttgccgatcgtgtagccgcgcatcgcatcggcgacctgggaaagatagtccaggtaggtatcgatggcctgttcttcgccggggaattcgcgcttgagggcagcggcgaaattggccgggccggcgaccaggtcgatttgccggtcgccgatgaacaggcggtcgtagctggcgtccatcggcgcccatgtgagttggccacgggtgacgtagtcgaacagcctgcgtgtcagggtgtgcggtgcgcccacgtcgccgatgtaatgcacgccgacatcccattcgtacccgttgcgttcatagctgtgggtgaagccgccggcggtgtagtgctgttcgaagacggccaccttgcggcccatgcggctgagcagggcggctgtggtcaggccgccgatgccggagccgatcacgatggcgtcgtaggggccgttcaggcggctggcgcggtagcgtttgccgatgcgcagggtgctgggttgcatggatatctctcccggattgttgttatcgcgccgtgccgtcgagcagcagggcgccgagttgggcggccagcagatcaggcatggcctgctggccgagatgcccgtcgatacacagtaatgacaggccgtggaccagtgcccaggcggcggcggtcagttgtggaacgggttggtcgtcgcgcaggtagccggcatcacgggcacggcagatggtgtgctccagcacggcaaaggcggcccggcctgcgtcgtcgaggcgggaatgcacgccccggggcagcacaccgccgccgaacatcagccggtagcggttcggatgccggtgcgcgaagtggacataggcgacgccgatgccgatcagcgcgtcacggggcggctcagtggggacctcgtgcagtgcggccgccagttgccggaaaccgtcggcggccagttcggccagcagggtttcgcggtcgctgaaatggcggtacagcgcgggcggggtcacgccgagctggcgtgccagggcccgcaggctgatggcggcatcgccgtgctcgtccagcacggtgcgcgcggtatcgcgggcctgctgggcaaggtcgccatggtggtactggtcgcggggcatgcgccctccgtgcgataagttaacggcgttaacattgcacttcattgccaggagggtcaagagggctggcgcccggaagcaggcgccatggggttcagggggcggggtaggtgtgttcggcgtggatggcgtcgatggcctgttcgagtgccttgtcgagcggcacgttgaggctgcccaggttttcctcgagttgtgccaggctcgtggcgccgatgatgttgctggtcacaaacggccggctggtgacgtattgcagcgccatttgggtcagtgacaggccgtgttcccgggccagggcctggtagcgctcggtggccttcaggctggaggcgttggtgtagcgcgagaactgtttgaacagggtcaggcgggcgccttccggctgctggccattcaggtacttgccgctgagcaggccgaaggcgagcggtgaataggccagcaggccgagctgttcgcggtgcgccacttcggccaggcccacctcgaagctgcggttgagcagcgagtaggggttctggatggatgccggccgtggggcgcccagccggtcggcttcatgcaggtaggtcatggcgccccaggcgctctcgttggacaggccgtagtggcggatcttgccctgtttgatcaggtcgttgagcacctcgatggtttctgcgatcgggatcgcctgttcgtcgtcgcggtggcggtagcccaggcggccgaagaaattggtgctgcgttctggccagtgcatctggtacaggtcgatgacatcggtctgcaggcgccgcaggctgccttccaccgcctgggtgatgtgctcgcggttcagccgcgggccgccgcggatgtgggtcatccagtcgccggggccggtggccttggtggccagcacgatgtcgtcgcgcctgccggtgcgggcgagccagttgccgatgatggtttcggtcttgccggcggtctcggccgacgagggcacggcgtacatttctgccgtatcgaagaagttgatgccgtgtgacaccgccaggtccatctgggcgaaagcgtcgtcctgtgtgttctggttgccccaggtcatggtgcccaggcacagcgcgctgaccttgaggtcggtgcggccgagttggcggtattccatgctgcactcccattactgcgataagcgtgatgcgatgagcggtcgatgatagcggcggctccctcgggctgccatgcaggcgcgaacaggcaatgattttatgtatagcgcccttgcgggcgtgggctcaggtggcctatatcggggtgaatgcaatggttgcgggaggcggatatggcgcgttcagtcgtcacggaagcggtcgcgctggaaggccgcgccccacagggctggtccgagccaaggctggctcatgtaggtgggttcacggcgctggaagaggagctggattatcgcatcggcacggccgagatacgtggccgcgtaccggcgtcggtgcgtggcactttttttcgcatcgggccgggtcgtaacagcctgggcgggcagaaatttggccattggttcgacggcgacggcatgctgcacgcgctcaccttcaccgacgaaggggcctggtatcgcaaccgctatgtgcgtacgcccaagtatgtgcgcgagacagcggcgcaacaggtgcgctgccgcagcttcgggcacaacgcaccgggcggctggctgaagaacattggccggccgccggccaattgcgccaataccagcatggtctggcacggtgaccgtctgctggcgctctgggaaggtggccgtccctgggaagtggacccggtgtcgctggcgacggtgggggagtgtgattacggcggccgtctgcgcccgtgggagccgttcagcgcccatggcagcgtgcatccgaatggctgctactacaatcacggcgtctcgatggggctgaccgggccgcgcattaatctgtacgaggtcagcccggcgggccggttgcagcgcaagtcgcatttccgcatagaccggctggcattcgtccacgacgccggtatgtcggcgcgctacaaggtgttcctggtgcatccgctcgggctgggcaacccgctgcccttcatgctgggcctgaaggcctttgacgagtgcgttgagttccgcccggagtggggcatgaaggcctacgtggtgtcgctggaaaccctggcggtggagcgggtcttcgagctgcccccgtttgccgtgtttcacctgggtaactgccgcgagcgcggcgatgaactggtgctggaactggtgcggttcgaggattatgccgtggccgaggcgctgcgcaacgtattcacctgcgacgcctcacagggcgggcagccctggcagctgcgcctgaacctgcgcacgggccaggtggccgggcaacccctgccgatggcggcgagctgtgaattcccgcaatgggacctgcgttacagtgcgggcgaaagccgctatctgtactcggccgccatcgccgacaacggcacgccgggcttcttcaacgccattcagcggctggataccgaaaccggcgcggtgacgctgcatgacctg

SEQ ID NO: 1592 - DNA, 23333 bp, synthetic construct
  misc_feature 1..23333: note = Synthetic
  source 1..23333: mol_type = other DNA
catggcgcggcgggcatcttcgagccgctggatctggaaattgcccgctgcaagctgatggtggcggcgctgcgtgatgcgcccccggtaagcgggcggctgcgcgtggccaccaagttcgtcaatgtcgcccggcagtatttcgccagccagggtcgccaggctgatgtgatcaagctgtacggcgccatggagctggcgcccattgtcgggctggcggaccgcatcgtggatatcgtggataccggcaataccctgcgtgccaatggcctggagccgacggaagtgattgccgacgtgtccagccgcctgatcgtcaaccaggccagcatgaagacccggcatgccgatatccaggccatcattgatcaactggccacggctgtggcggccaaccgcgggtaacccgacatgaagaccaaccggctgaatactgcagacgctgatttcgacacccggctggcggcgctgacggcgtggagcgaagagcgtgatgccgaagtggcccagcgtgtgcgcgatatcattgcccaggtgcgccagcgcggtgatgcggcggtggtggagtacaccaaccgcttcgaccagcgcgatgtggcggatatcagcgaactggaactgacccgcgagcagctcgatgccgccctggcgcgtattcctgccgcacagcgcgaggcgctggaagcggcggccgagcgcgtgcgtgactaccacacgcgccagcgccaggagtcctgggactatcaggatgccgacggcaccttgctgggccagcagatcacggcactggaccgggcaggcatctacgtgcccggcggcaaggccgcttacccgagctcggtgctgatgaacgcgattccggcgcgggtcgcgggggtcggtgaaatcatcatgatgtcgcccagcccgggtggtgtgctcaacgatacggtgctggccgccgccgccattgcgggtgtggacaggctgttcaccatcggtggcgcgcaggcggtggcggcactggcctggggcacggccggtattcccgccgtggacaaggtcgttggcccgggcaacatctatgtggcggaagccaagcgccaggtgttcggcaaggtcggtatcgacatgattgccggtccgtctgaaatcctggtgatctgtgacggcaagaccgaccccgactggatcgccatggacctgttttcccaggccgagcatgacgaggaagcccaggccattctggtgtcaccggacgcggcgtttctcgaccgggtggcggacagcatggaagcgctggcggtcaccctggagcgcgagaccattatccgcaccgccatggcggatcggggcgcgctgatccagtgccgtgatctggacgaggccgtggacctggccaaccggattgcttccgagcacctggagttgtcggtgcaggagccgcttgccatggctcggcgtattcgccatgccggagcgatcttcctgggccgtcacacgccggaagcgctgggcgactactgtgccgggcccaatcacgtgctgccgacgtcggccacggcacgcttttcctcgccgctgggggtctatgacttccagaagcgcagttcactgatcggttgttccccgcagggtgccgaccgcttgtcgtacatcgccgggccgctcgcacgcagcgaggggcttaccgcccacgcgcgcagcgcggaaatgcgtcgcgcggacaaggactgacccatgagccgctactggagccgcttcgttcacgacctggagccctacgtgcccggcgagcagccgaagatggcgcggctggtcaagctcaacaccaacgagaatccctttggcccctcgccgaaggcgctggcggccattgcggcggccagcggcgatgatttgcgtctgtatccggaccccgacgcctcggccctgaaagcggccattgcgcgccgttatgcggtgcaggccgatcaggtgtttgtcggcaacggctctgatgaagtgctggcgcatctgttcatgggctttttccgccaggacaagccgatcctgtttccggacatcacctacagcttctacaaggtgtattgcggcctgtacggcatcgactaccgtaccccaccgctggatgacgacttcggtatccggctggccgattatccgccggacaacggcggcatcatttttcccaacccgaatgcgcccaccggacgcctgttacccctggcggacatcgaggcgctgctgcaacgcaacacggcatcactggtggtggtggacgaggcctacgtggacttcggtggcgaatccgccgtcgctctggtgagccgttatccgaacctgctggtcacccagacgttttccaaatcccgctcgctggccggtctgcggatcggctttgccgtgggccaggcgcccttgatcgacggcctggagcggatcaagaacagcttcaattcctacccgctggatcggctcgccatcgttgccggtgtcgcagccatggacgatgaagcatggttttcggagtgcgtggacgccattgtggcggagcgggaggccctgacagcggccctggcggctcgtgggttcgaggtactgccgtcggccgccaatttcgtctttgcccgccacccgggccatgctggtgaggcgctggcggccggtctgcgcgagcacggcgtgatcgtgcggcattttcagcggccagagcggatctcgccgttcctgcgtatcacgattggcaccccggagcagaatcaggcgctgctcagcgcgctggacagcctgctgtaaggtgccgcgccgccctcagtggcggcgctcgcgatcattctgggcgggcggccgggtgccgataaccacttgcagtgtcagtggttcacgattgcgaatcacgttcagttcgatttcagtgtccggcgcagtgccggcaatgatgttcatggcctcgaagccgtcgcgcacgccacggccgttgatgccggccagcacatcgccgggacgcagcccgccctggtgcgcggggccgttgcgcaccacttccgataccagcccgccacgggcttcgtcgagtccgaacgaggccgccaggttcggcgtaatgtcctgcaccgttacccccagccagccccggatcacgcgaccgtgttcgatcaagtcggtcatcaccttgcgcgccgtggaagccggtgaggcaaagccgatgccttcccaactgccaccggcggacaggatggccgtgttgatgccgatcaggttgccctgggtgtcgatcagcgcaccgccggagttgccgcggttgatggccgcatcggtctggatgaaattctcgaacgtggcgataccgagattgcgcccggtggcgctgacaatacccatggagaccgtctggccgacgccgagcgggttgccgatggccagcaccacatcgccgacactgggggccttgtcgcccaggcgcaccaccggcaggttatccagcgggatctgcagcagcgccagatcggtttccggatcgataccgacgatgcgcgccgctgcctcgcggccgtcatgcagcgccaccagcacctcgtccgcgtcgcggatgacgtgataactggtcagcatgtagccttcctgcgagacgatcaccgccgaacccaggctggccagaatgcgctcgcggcgaggctcttccatgaaacgctggaacaggggatcgtccggggtttcgccgcgggtgaccacctgcgtggtgtagatattggcgaccgccggggcggcatggttcaccgcatcggcgtaggaggtggccagctggccggtgctgaccacctgccggttgccattggcgccggggccgctctggtgccaccagagcacggcaaggccgacaatcacgcccgtcagcgccgggccggccagaaatctcagcagcttcattacaatgtcgtcccgcgactcgagtacactggcccggagtgtaccagagagtgctgtaccagaggacgccacccggagaggaactgatgctcaaacgtgacgacatgcttcgtattctggacgagctgctgacgccccaggcgtttcgtgactactgtccgaatggcctgcaggtagaggggcgcgaacagatccgccgcctggtgaccggcgtaacggcctgccaggcgctgctggatgccgctctgatcgaagaagccgatgccgtactggtacaccatggctacttctggaaaaacgaagaaccggccgtgcggggcatgaaaaagcagcgcctgcagacgctgctgcgacatgatctgaacctgtttgcctatcacctgccgctggatgcccacccggagttgggcaacaacgccgagctgggccgccgcctgggggtagaggtgacgggcgccctgcgtgatgacgggatcggcctgatcgggcggttgcccgaacccatgagcgcgctggagtttgcccggctggtggaagacgccgtcggccgcgaggcgctgcatatcggcgaggcagaagacgagatcgaaaccctggcctggtgcacgggcgccgcccagggttttatcgagcaggcccaggcgctgggggtggatgcctacctcagcggcgagatctcagaaccgacggtgcattttgcccgggaaaccggcatccactacttcgccgccggccaccacgccaccgagcgctacggcgtgcaggccgtgggggaatggctggcggctgaatacggtatcgagcacgtctttatcgatatcgacaatcctgtctagcgcttgtcgtcggcggtagagcagccctgatcctcacagccctcggcatagtcgcggggcggcgccaccacatcgtcgagctctggctcgcgcggccgggcaaagtcatccaggggagagaaggggccgtctgccttgatccgcaggccgaaatcctcggacagcgtgccctgcgccgctggcgcataatccagcggctgggacagcggtaccttgtcgccgccctgatcgcccggataacccggcaggctgtccagcgacttggccatggccaggcgccgaccctgttcgctgcacagggtgcgcgcgccctcggacaggtgctcatgcaccgagcggtaggcgccggtgagctggttcaccagatcggccgtgcgcaggaaatggttgtcgacctcttcacggtgccgggtgagggtggccagcgcctcgtcacgctcctgctccagttgcttgcgctgacggcgggcgggcaacagcagaaaggccccggcggccccgaccagcaggccggcggcgaatgtcagcagcactgcagacaggttttccatgattcactcctcgcaggataacggcatctattgcagcatagctgttccggcctcgccaagcagtgagggcagcgaattgttagaattcgtggcataccattacggtcataccatcacggaggcccctcatggccacaggaacgaccgaacgattcatgctggaagggcccgctggccagctggaagccgtctacgagcagggcgacgagacaccgcgcttctgcgccctggtgtgtcatccacacccgctgttcggcggcaccatgcagaacaaggtggtgaccaccctgacccgcacctgccgggatgccggcggcgccgcgctgcgcttcaattttcgcggtgtgggccagagccagggggcctacagcgacggcctgggtgaggccgaagacctgctggcggccgaggcctggctgcggcatcgctggccggatctgccgctgtggctggccggcttctcgttcggcagctatgtggcggcgcgcggtgcccggatcctggcggataacaaccgtaacgccagccatctgttcctggtggcgccgccggtgcacaactatgacttcgccagtatcgagcacagcggctgcccggtgactgtggtgatgagcgaggatgacgaggtggtgccagcggaacaggtgttccgctggaccgaagagaccccgctggcgccggacctgatccgctttcccgatgccgggcatttctatcacgggcgcctggtgcagctggccgaggtggcgcgcagccggctgcctaagggcgcggctgccggtgacggctgattgccacggcgggccaccggcgctacattggccgccctgatcggtatagtgatgcgcgggcacttccgcgccgggggcgaacggggccatgacaccacttgagcactaccagcgcgacctgacgcgtccggagtttttccgcgacgccgcgcaggcgcgtgcggtggagcggctggatgctctgtatcatcagctggtgtcacggtcgccttcccgatcgcgcctgttccgccgccgcccggcccccgtgaaggggctgtacatgtggggcggcgtcgggcgcggcaagacctacctgatggatgtcttcttcgaatccctgcccttcaccgagaagcggcgcatgcacttccaccgcttcatgcagcacgtgcaccacgagatgcgcgcccgtcaaggacagaaaaatccactggtggccatcgcccgtgattttgcccacagcacccgggtgttatgtttcgacgagttcttcgtcaccgacatcaccgacgccatgattctggcgacgttgctggatacgctgatcgccgagggcgtgacgctggtggcgacatcgaacatcgaacctgacggtctctatcgcgacggtttgcaacgtgcccggttcctgcccgctattgccctgctcaacaaccacaccgatgtgttgaacgtggacggcggcacggattaccgcctgcgtttgctggagcaggccgagttgtatcattgcccgctgggcgacgaggccgaggcgtttctggccgagcggtttgcaaccctggaaacggaacacgccaaccatcgtgaaaatgtggatctggacgtggaagggcgaccgattcgcgcgcgcaaggtcagcgatgatgtagtctggttcgactttcgtgccttgtgcgatggcccgcgcagccagaacgattacatcgagctggcgcgggaatttcacacggtattgctgggcaatgtggaacgtatgggggcggcttcggatgaccgggcccgccgctttatcaatctggtggatgagttctatgaccggggcgtgaagctgatcatcacggccgaaaccccgatcagcgagctttacatcggcggtcgcctggacttcgagttcgatcgcacccgcagccgactgctggaaatgcagtcacatgactatctggcacgcgagcacaaggcctgagcgtctggtgcaaacgcctcacaggagagcaaacatgataccccgtaccctgttttcgtctgatcacgacaccttccgcgacaccgtgcgcaagtttctggagaacgaagctgcgccgcaccacgaagaatgggagcacaccggccaggtgccgaaagagctgtggcgcaaggcgggcgagcagggcttcctgtgcccgatggtgtctgaagaatacggcggcctgggcgctgattttctttacagcgtggtggtcagtgaagaaatttcccgcgccggcctgaccggcatcggctggggcctgcacacggagatcgtggcgccctacatcgagcattacggcagcgaagagcagaagcagaagtacctgccgaagatggtgtccggcgacatcattggcgccatcgccatgtccgaaccggctgccgggtccgacctgcagggcatcaagaccaccgccgtcaaggacggcgacggctatatcctcaacggctccaagacgtttatcaccaacggccagaatgccgatctggtgatcgtggtggccaagaccgatccgaccaagggcgccaagggcatcagcctgtttctgctggacgccggcacccccggcttcgaaaaaggcaagaacctgaagaaagtgggcatgaaagcccaggacacctccgagctgttcttccaggacgtgcgcctgccgaaagaggccctgctgggccaggaaggcatgggctttatctacctgatgcaagagctgccgcaggaacgtctgggcatcgccatcaacggcctggccatggccgagagtgccttcgagcagaccgtgcgctacgtgaaagaccgcaaggccttcggcaagagcatcgctgaattccagaacacccagttcaagctggcagagctgcacaccaaactggaagtgggccgcgcttatgtggaccgctgtctggaactgcacctcaagaaggaactggatatccccaccgcggcggcatccaagtactacatcaccgacctgcagtgcgaagtgatcgacgagtgcctgcagctgcacggcggctacggctacatgtgggaatacccgatcgcccgcatgttcgccgactcccgcgtacagcgtatctacggcggtaccaacgaaatcatgaagaccatcatcgccaagcagattctggcggactgatgtaacgcttgttccagaacgacaaaggcggccacatggccgcctttttcatacctccagccaatccaacgcccgcgccagactctccttcccagatacaccctaacttcatgaagccaactgcgtacttgctccatatccacgacatcgtcgatatcacaggcctgaacatgctttttacgcaaatttatataaatttattgtggcgtcatatgcaaatatttaggtggtgagggtgtgacacgcatcacgatatctgcttgaatccatatgggggttagaccgagtaacacgaccgacaacaagaagggatgccacgtgaaccggctggagcgcctttaccttatccacgaaaccctgcgtgacgcccgccatccagtgccgcttcggcgcatggtggaggccatggaagtcaccgagggagcagccaggaaggacatccgctacctgcgtgaccacttccgggcgcctatcaagtacaaccagcaactgaacggctattactacgaccccgaggctgacgcctttgagctccccggcctgtggttcaccgctgccgagctccatgctctgctggtttgccagcaaatgctcgaaggcctgcagttcgacgccattgaagacctgatgaagcccctgaaagaccgcatccgcgaactgctgaaagcgggcgggcggggggacaccgacatcagcacccgcgtgaaagtccagccagtcctctaccgcagcgtccacagcgctacattccaggtggtggcggatgccttgatggcggggtggcaactgggcttcgagtatcaggcgcgcagcaaggccgaacgcaaaacgcgccaggttagcccccagcggctgctgcattaccgtgataactggtacctgctgggctggtgccaccgggccgatgccctgcggctgttctccctggacaagatcgagcaaccggtggcgcaggagaggcccgcccggcagctttcaaatggggaactggagctggataccgagggcagcttcgggatctttctgggtccggcccgcgattacgctcacttgcgcttcaatgccagtgcggcccagtgggtggcggatgagcactggcatccggaccagcagggggagtggcgtggggagcactaccacctgacggtgccctacgcgaatccgacagagctgatcaaggagatcttgcgacacggggctgatgtggaggtgttggagccggaggagctgagagaggcggtggctgcaaggttgcgcgaggcggtgaagcggtatggttaattgcaggggcactgtacaaaagggtagtgccattctggcgcagcgtagcttgctaggcttgagaatgtggaacagtgggattaagggagaggatggtgggcaagaaaaaagaaagcccccgaaggggctatccagtatcggtgatgtcgagccgaagctctcatcttgttaccgaaggtccccaccatcggaaagttcgatacattgcaaaggctagcgcgctgagggcgctcgtgtcaacaaggtgagatcagattacgggttacggataatggggaacgaatatgcgttatagactaggacttgatcttggaactgcgtccattggttgtgctgccttctctatggatgagcaaggcgagccagagaagctgatctggtttcacgagcggcttttctccgaaccgctgataaacgataaggggcagttaaagcccaagaaagcagatcgaagattggcacgtcagcagcgtcgccagattgatcggcgagcttctcgcttacgccgggtcgctcacactgcaaggcttatcggtatcgatcctgttcaaacagacacgtcctctttttccaatgatgttcctttccttcgggcaaaagccgcccgagaacgtattgagttgaacgaactgttcgctgtgttgatgcgcatggcaaagaagcggggctatgcagggactctgaaggtggccagtaaaactggggatgctggtgtggtcgcgagtggttcgtctgtgctgactgaagaaatggatgcgttggcgagaaagaaagatgttcagagtgtcacggttggtgaatatctgtatgcacgtgttcagtatggtttgcctgctcgtctgaaagttgcagctaataatgattatattgctcctaagtatcctgcgtttcgggaataccttggccttccagtacgcgaggacgggcggcatcagttgcccaatatgtacgctttgcgtgagtcccttgaggcagagttccatcagatatggaatgtacagaaggaatttcatccagctctaaaaaaagagggggttcgggatagcctttttgcggcaatattctatcagcgtcctctaaaatctttcgaagataaagtgggtaaatgttccctggaggttcatttgccaagagcgccaagggctcaaatggccgctcaggatttcaggatagagaagcaactcgccgatttgcgttgggggatggggaaaaattctgaaaccctttctgaggaacagaaagaggttgttcgtgctattctgggaaagcagagagaggcatctttcaaggcgatttataaagcactggagaagtccggttgctcagggccttcagggaaagggttgaatatggatcgcgcagtgcttggagggcgtgatagcttaacaggtaatacgacgttacatgcatggcgtaaacttgggctggagggggattggctgggcctcgatgaagttacccagattcaggtgattaatttcctttcaggtctgggttcaccagagcagttggatgttgatgattggccttcgcgtttcagaggtaaatcgggcaagccaagaaatttctcccggggatttgtatcctttattgataagctcagggcgaatgacaagttcgatcgcatgagcaagatgggctttgatgcaggccgagcaagttattcggtgaaagccttggttaggattacaaaatggcttaaatatccaagttgggaggaaatgccgaatattcctcgtgttgatgaggatgctgctatcagggagtgctatccagatcatctgagcgaagatgccgaggaggctgtaggccggttaggcttgccctcgtcaaccggcaatgaagttgttgacgtggccttgcggcaactgagggtaatcatcaacaacgctattgacgccaatggaggcactccagctcagatagtggttgagcttgcccgggaaatgaaaggcggagtaactcgtcgtaatgatatggaaaggaaaagcaagcgattttccaatgagaggaaggaggcagctaaaagaattgctcaggcgggaaagtcgcccactcctacgcttattaagcgctatcaattgtgggaagagcaaaaccatcaatgcccctattgcgaaagtagcctgggaataagtgatgcgttaagcggtgcgcatacaaactttgagcatattctccctagatcattgacgcaggtcggttacaaacgctctgagattgttctggcgcaccgcgactgcaatgacgagaaaggtaatcgcaccccttggcaggcattcggtgaaagggatgacaagcgttggcagattatcgaggctcgtgcagaagcgttgcgcaagaagaagtcatatcgcaaggcaaatcttcttgtgatgaaagacttcgaaggcgaggttcttactgataagtcaattgctgagttctcggaccggcagcttcatgaaagctcctggctggctaaagttgccacccagtggttgtccacgctgggtagcgatgtttatgtttcgcgcggctctcttacggccaatctgcgtcgtcgatgggggttggacactgttattccccaagttcgcttagaaaccgggctgccgctggttgatgaaagcggtgagctcatttcccatgaggaatttaataggtttcgccctcaatgggaggggcaccctgttaccagagaaacacgcacggatcgtcgcccggacaagagaattgatcatcgacaccacttgatagatgccattgtgattgcattgacgtcccgaagcctgtatcagcgctatgccaatgcctggagaattgcggaggaagagcgcaagaatgggagtataaacgtgagggttgagctgcctgtccctgtgcctaatattcgtgatgtggcgcttgcagcggtgcgagagtgccgcattagccacaagccggatcgatatccggatggtcgcttctttcaagacactgcgtatggcttggagaaacgcatgaatccggcgaccggagagccagaagagtggctggtcaagcgagaacctttgacttcgctggcaccagataagtggagtgccgataaggttaggaaaaatatagatgacatcgtaggcgagggtgtccgccttcatgtccggagtgtatttgaaaggcgtgttaactccggaatgacaccgcagcaggcgctgcgggagccgattgagttccagggcaatattctcaggaaagtccgctgttacgcttccaaagcgtcagatcatgttcgaattgagcataatagtagacagggactacattataagtatcttttgaatgatggttacgcttatatggagttgcatgttgaggcagggggcttggttggaaaccctaacctcgttaggccccgtgaaggctgcaagataaaacttcatgacactaaggaaggagttgttcgtttctataagagtgacacagttgagaataaaaatagcggtatgcgctatgtcattcatcagattaaagcgcaaggtggtggtatgttggttatggcaccggtgaccgaaacgcgaccagtgcgtgatcttgacagcaagtgggggctaaaaaaagtttcaggaaaggggcttctgaatttcaggccggtgtaggtgcgcagtatgtccgagcatcatgtccttctgatcgagaatccatgtgcgctcaatattcaccttgagtgcttgaagattagtcgggccggcgaagagcccattcggatacgtccttccgatattgctgtactttgtctccaccatcatacggtgcagttgtctgtgcatgtgttacgaaggttgacggaatctggtgcggctattttagttgtggatgaccagcatcaaccatctggcatgatgctaccgacctttggccgtcctcacgcgactgttcgcttgcgacagcagattgagctggataggagtaagctgcacgcactggtttggcagcaactggtttctgccagattgcgtagtcagtcttgggtgcttgaggcttatggaagggcgccggctgccaggctggctcgcttggctggtttggttgaaccgggggatgcggggcaccttgagggacagggcgccaggctgtactgggatagtctcttcgatcaaccgttcaagcgtaaaaaacgcgatgctaaggacatgattaatatccaccttaatttcgggtactccctgttgcgctcattgatcacgcgagagttagcccaggcggcgttgcgccctgagttgggtgtggggcacagaagtaccgagaaccctttcaatctggctgatgattttttagagccgtatcggtttctagtggagcgcttggtggtatcgcgcccgcctcataagggggagaagttttcctcggaacaccgcaggcagattatctccggtttatttgagcagaatgtgcgccttggcgatcaggattttcgcctaccagctgcgatacgaaaaaccatcgcgagctacctccggattctggaggcgggaggggtggggcgccgccgaaagttgctgctgcctgagcgcccgcaataggccatggcaatcaacggatggagagtcatgtggttaattgctgtttatgactgccccatgaccacgccggaagctcggcatgagtacactgtattccgtaagcgtctgttaaagaacgcgtttatacaggtgcaatactctctttatgttcgtcactttcccacgatggccgccgctgaggccatgatccagcgtctgaaacaccagattccgagcgatgccaaggttgcttttatgctcatgacagacaagcaatacgccatgacccgcgagtttcttggcccgcgccctaaacagcaaagacctgatgcgccagaccagatcatgctgatatagaagaaaaacctaaccctgacaaagggttaggttgattcagagcttatcgaactttccgatggtggggaatcggaacccacacgacggccgcgacgcgcatcaggtggagcttatcgaactttccgatggtggggaatcggaacaggccgcagcagcatgccgtccttgagcaggagcttatcgaactttccgatggtggggaatcggaacctgcgggtcgatgtaacggccatcataggtgagcttatcgaactttccgatggtggggaatcggaaccatgcccttactggcgcgtcaactcgcccggagcttatcgaactttccgatggtggggaatcggaaccggcgtctcaccgcatgagcttgcgccgtggagcttatcgaactttccgatggtggggaatcggaactttgccgtttgacggcttgccagatgaagcgagcttatcgaactttccgatggtggggaatcggaacgctgtccaacatcaaggtgcaagggccgaagagcttatcgaactttccgatggtggggaatcggaaccaaccaaggaaccaaaatggtcgcatcaacgagcttatcgaactttccgatggtggggaatcggaaccgagaaaaacatcacatggaccacttgtttgagcttatcgaactttccgatggtggggaatcggaacggtatgatgacgcgcattttcaccggcagggagcttatcgaactttccgatggtggggaatcggaactatgaaatgatccacgttgcacatatgcaggagcttatcgaactttccgatggtggggaatcggaacggcatatcgacgggggaccactgttcgtaggagcttatcgaactttccgatggtggggaatcggaacacctcggcccagaccctgccaccgttggcggagcttatcgaactttccgatggtggggaatcggaaccggagcgcatcttgtgggtgtgccgcaaaggagcttatcgaactttccgatggtggggaatcggaacggcgaagccggtcacgctcgtgaagaatgggagcttatcgaactttccgatggtggggaatcggaacgacgtacacgcagccctcgaagtgttccaggagcttatcgaactttccgatggtggggaatcggaacaggccgacctgctggatggactgctgcgccgagcttatcgaactttccgatggtggggaatcggaaccagatcgtcgatggcgtccagcgccgcctcgagcttatcgaactttccgatggtggggaatcggaactaagggcagttatgggattgttttattctcgagcttatcgaactttccgatggtggggaatcggaactcctggattgcgtattcacctggtgcggtggagcttatcgaactttccgatggtggggaatcggaacgttcttgcctccctgctcaccatgaattccgagcttatcgaactttccgatggtggggaatcggaacgatcgcctcaagggggttcgacacctcgcggagcttatcgaactttccgatggtggggaatcggaactaccagcgcgccatggccgatatgaaaaaggagcttatcgaactttccgatggtggggaatcggaacctccaacgggttgtagtcgcgcgcagagcggagcttatcgaactttccgatggtggggaatcggaacccagaaaattacctgggagaccgccccgacgagcttatcgaactttccgatggtggggaatcggaacccgtggttcccgccgtagctttgcccggcagagcttatcgaactttccgatggtggggaatcggaacgaagtttatcctcatgaccgtgtaattatggagcttatcgaactttccgatggtggggaatcggaacaagaactcaggcagcgttggcacaaactcggagcttatcgaactttccgatggtggggaatcggaacttccaagggattgtagtcgcgcgcggagcggagcttatcgaactttccgatggtggggaatcggaacaaggtctggtgcaggggatgaaggtcaaacgagcttatcgaactttccgatggtggggaatcggaacgacatatatccgctttgcgttgatccggtcgagcttatcgaactttccgatggtggggaatcggaaccactgaggcggccattaccctggagacactgagcttatcgaactttccgatggtggggaatcggaaccggccacccttgcgggccgagggggagggcgagcttatcgaactttccgatggtggggaatcggaacactcctctcggtcgcggtgcgcgagctgccgagcttatcgaactttccgatggtggggaatcggaacgaggcggcagggcaggcggcagacgccggggagcttatcgaactttccgatggtggggaatcggaacaggcccacccgatgtattgcgttccccacggagcttatcgaactttccgatggtggggaatcggaaccataggcaacaaagccgacgaagaacaagagagcttatcgaactttccgatggtggggaatcggaactgctttggcgagggctgcgcgggctttcttgagcttatcgaactttccgatggtggggaatcggaacctccaggggattgtagtcgcgcgcagaacggagcttatcgaactttccgatggtggggaatcggaaccgccgtggtgtcggcgccgcagcccgtcacgagcttatcgaactttccgatggtggggaatcggaactgctttggcgagggctgcgcgggctttcttgagcttatcgaactttccgatggtggggaatcggaacctccaggggattgtagtcgcgcgcagaacggagcttatcgaactttccgatggtggggaatcggaacgatcgggccgctgcacctgcttaccgccgggagcttatcgaactttccgatggtggggaatcggaactatgcaactaactgatataaaaagaaaagcgagcttatcgaactttccgatggtggggaatcggaactagcgcttgcgcttcacctaaccggggattgagcttatcgaactttccgatggtggggaatcggaactccagccataatgaggtggtactaaaacctgagcttatcgaactttccgatggtggggaatcggaactgttactgaccgaggtgttccaccgtaaaggagcttatcgaactttccgatggtggggaatggggaatcggaacgtgtcaataactgtacggcgcccctgctaggagcttatcgaaattttggctggcgggaaaccggaataggcgcgcggatggatcagtatgcagtcagtcaagtgatagtgcttccctgtgcgtgccagtatgtagagtatcctcaatgttggccgaatatcccattactattttcaggtactaatcaagtttattacatcttgaatagaggtgcctcagtgcgagttccttgcaatgagttcctcacatcaatcagctgctcccgaatgttggtcagcaaaaatgtagaaaacttatcctgacccagggtccgctcatatacgtctttaggaacaaatcgcttcatttcatccaggaaggcacgcccgctgatgatgtctggaagccactctatcattcggacgaccttgtcatcataatctgaaacaaggtaatcatcgattttcctccgtaccatatccacatccatccgggtgccttgcctgtgaagccaggccagatcccatatgtcgcgatgccgcacccgtttctccgggtctgagccaacgggcagggagaccagcttgtcggccatgatctcggcttttgtctctaccatgatcaacacatcgttatagccgtctggaagaaaggcatagttccgtgacagtgggcgggcttctcgtgtgtgtgccgggatgctcgctacttccagctttatccgctgtttgggcaggtccggctgctccggggacgtcacgattctgatctgccatttgtcgacattaatgccgttacgggcggtctctgctctgagtgatgcgggctccttgacggtgacctcaagcccatagcgctggcccaggtggtcttcgatacacgctttcatatccttgagctggcgcgatgaaaaatccgcgcctccggcaaagtcgagatcttcgctgaagcggttgccgttgtagcacagtctgagggacgtgccgccctggaagacgatgtcatcaagaagctggtggcgatcgagcgcaaacaggatgtcgtaatgcagaagctctttctctaccaccggccgcatgttggccaggcccgggttctccatggcttgagcaaccaggtattggaaatcctgattatcacgcttgctcatagaccacctcctcatccaccagatgcatattcctgcccacgcgcctcaaatctcttaacgccgcttgcactgttgcaatcttcaagggccggtctcggtcaagcgtggagcgcaagatatccgaaacagagcgctgcgtatgagtgaattcaaggaccccgtagggcgttgagtattcacccttgcggccggtggtgatgacggtgaggcggcccaccgggatctgggaaatcacgccgtactccgacagggctgattccaggctgatgtaattgtaggcgccgcgtcgcagggttctggcaatcagttcaagcgtatccgggcccttgtggcgcgagagggcgtagaggtacacgcctttggagggccgttcgagaaggccctcgcgaaccaggcgggtcagggtggcttcccggcctctgggcgagtcctcagcaaacaccttcgccatatccgctgcggcaaagacgtatctcccgcgacggtcccagtctgtgagtcttttgatggcctcgctctgccgcatgtggtggtcctggacactagcccgccctattaatgtggttaacgtccagatgttatttcaaggtgcggttcatgtccacttgatccaggctttgcgcctcaatcaaacacataccgcctgatcgtctcctcatcctccccggccagattcttctggatggtcttgtccaccatcttgctcagattgtcgttcagcatatggcgcagggcgccgaggaaggcgggcggtgagatgatcaccagcttgtcgaacttgcctttgacgcggcctttttccagggcctcgctgatggtgcgggcaaaggtgtggtgttgctggtcgcgcacatccggtggctccatggcgctgcggctgtcgttggcgctttcaaaggtgcgtccgggtcggtcgctgtagatgtcctggtctctgaggcggctttcggggaaggcgaagctttcgatttcctgcgggggctgtacacgattgggggcgaaaaaaatacgagcgcgggagctttcagcgacaacgatccaggtcttgtccatggggcgcctcctgtgggggatgacgaaacggcggtgccggggctggtcttgcccacttactctggcatgcctccttccccctcagactgacgcagatcaggaagtttctcaatcgcctgtcgggccaggcgctctcccatggcggcaaagcctgctgcggaggggtgatagccgtcttccgccagcagggcgggatcgctcgggtcgccataatccagcaccgggcagtgtcggcgggcgctcacctggcgcaagacccggtccagctgccgggcgcgcaggccgatgacggcgcgcaacggctggggcagggcggtaaagcggtgcatgggcggtaccggggcgaaggcgatgcgggcgccgggctgtcgttgttgcagggtgtccaccagttgatggagctgatggcgccagcggcgcaagcgtgtcaggccggtggtgtcgttgacgcccatcatgaccagcaccagatcggctcggggcggggcatcgggcagggggcgcgccagcaggcctgccagccgcaggccgttgtggccatggcattgccagtgcacgctgcgcccgctcagggcggccagggggcgggccatgccgggccccgcgccgtcggtgtggtgggtcacgccaacaccggcgacgggggattccccgatgatcagcaggtgcagcggcggccccacggccccgtctggcgggtgcaactggccgcaggagggtccttcggcttccggcagacgcagggccgtgcgacgggtgtggcggccctgtagcgccagcaggggtaatagcagcgccagcaggggcaatagcgccaggaccagtgcccagcacagcagggtgcgcacggcgacctcagggggacggatacgggtgctcggcgtgaatcgcatccagcgccttctccagctccttgtccagcggcacctcgatgctgcgcaggttctcctccagttgcgccaggctggtggcgccaatgatgttgctggtgacgaaggggcgtgtggtgacgtattgcagggccagctgcgcggggctcaggttgtgggcctcggccagttggcagtatttctccgtggcggcctcggcctgcgggttggtgtagcgcgagaactgcttgaacagggtcaggcgggccgcctccggccaggtattgtgacggtatttgccggagagcatgccgaaggccagcggggaataggccagcaggccgatgtcctcgcggtgggccacttcggccaggccgacttcgaagctgcggttgagcagggaataggggttctggatcgacaccgggcggggcgcgcccaggcgttcggcctccatcacgtacttcatggtgccccaggcggtctcgttggacaggccgtagtggcggatcttgccggctttgaccaggccgtccagcgcttcgatggtctcttcaatcggcacggcggcgtcgtcctggcggtgcttgtagcccaggcggccgaagaagttggtgctgcgttcgggccagtgcagctggtacaggtcgatcacatcggtctgcaggcggcgcaggctgccctccacggcctgctccagatgttcgcggttgaggcgcgggccgccacgaatatgcttgatccagtcgccggggcctgcggccttggtggccagaatgatgtcctggcggcggccgctgcgggcgaaccactggccgatgatctcttcggtcttgccagcggtctcggcggaggtcggcacggcgtacatctcggcggtgtcgaagaagttgatgccgtgttccacggccaggtccatttgcgcgaagccttcctcggcggtgttctgtttgccccaggtcatggtgcccaggcacagggcgctgacgttcagatcggtgcggccgaggcggcggtattccatggtgtgctcctgtcgaattcggtgtagaggctcaggggccagatgatagcactgccggtggccgctgcatgaccgcagcgcacaggctggcattgcgtgcccggcgtgaatggtctataccggaactcgcaggttctgcggtggttgcagatagcggttgcaggtggcgtgacaggagcgagacatggacgacggcgtgatgcagggtgagggcgatctggctcatgtgggcgggttcgaggcgctgcatgaagagcacagctacacggtgcccgccagcgccatgcgcgggcgcgttcccgagtcggtgcgcggcaccttcctgcgcatcgggccgggccgcaaccgcattggccacgacactttcggccactggtttgatggcgacggcatgatgcatgcgctgaccttcacggaggcgggcgcctggtatcgcaatcgctatgtgcgcacgccgaagtactgcaaggagacggccgcaggccggattgtctgccgcagcttcgggcataacgcgcctggtggcatgctgcgcaatatcggtcgtccaccggccaatgcggccaacacggcgatctcctgccatgccggcaagctgctggccctctgggagggcggcaggccctgggcactggacccggacactctggagacgctgggcgagcacaacttcgacggcgcgctgggcatggcggacccgttcagtgcccatggcaatacgcacccgcagaccggctactactataaccacggcgtgaccctggggccgggcgggccgcgcatcaacctgtatgaaatcaatccggccgggcggctgacccgcaagcggcattttgcgatcgacaggctggccttcgtgcatggcgcggggctgtcgtcgcgttacatggtgctgctggtgccgccgctggggatggacagcgtctggccttttgttctggggcgcaaggcgttcgatgagagcgttgtctatcgcccggagtggggcatgaaggcgtatctggtgtcgctggagacgctgacggtggcgcatgtcttcgagctggacccgtttgtggtgttccactacggcaactgccgggagcagggggacgagctggtggtggacctggtgcgcttcgaggattacagcgtggccgcccagttgcgtgatgtgttcggccgcagtgatgcgcagggcggggtgccctggcagtatcgcttcaacctgcgcacgggcgcggtggccgccgcgccactgccgagcctggcgggctgcgagttcccccagttcgacctgcgccgcaccgggcagcccagccgcttcctctatacggctgcgatggccgacaacggcacggcgggcttcttcaacgccgtgcagcgcctggacaccgagaccggcgaggtggtgctgcatgatctggggccgggccggttcgtgtccgaggcca

SEQ ID NO: 1593 - DNA, 24368 bp, synthetic construct
  source 1..24368: mol_type = other DNA
  variation 19261..19278: note = n is a, c, g, or t
  variation 19496..19572: note = n is a, c, g, or t
  misc_feature 1..24368: note = Synthetic
tggagatgatattatagcaggtggaattatagaaaaaagtatttaaaattgaatgagaaaaatctccttaaaatataaatttcttcacaatattgatggattaaaaaaatcgttcttttttctgtttttatatgcgcttttattattcatcaccaattgcaaaaagaccagtactacagcaacatttgacacaagctattaccctttaaaaattaaatcatggataatttatgatgtaacctcggtaaaatttgaaaaagattttgttggtcaaatgatttactacgactcatcgcattatcagctcaaagaaattattgatactacttatattgattattccggaagacttaattacagaattgaacgatatacaaaggattccacaaacaactcatggcagattaaagatgtctggtcaacgacaatgtctgactatactgcgctgaaaaatgaagaaaatattacctatgtaaaaataaaattcccggtagaaaaaaataaaacatggaacggaaatttatataattctatggatgcacaaaattataaaattacaactctggatgtaacagaaacgattaatagtaatttatttcaaaatgctctcactgtaacgcagactaacacgctcaatgcaattcaaaaattctactcttttgaaaaatacgcaaaaaatattggattaataaaaaaatacatatttaatatttacgacgtaacctacgcaagtacaacagatcctattgaaaacagaatgaaacgtgctgaaaaatatacacaggaaataatttcatggggtcaggagtaggggaatttggggaggtggttgtcttatattaaattacgaattacgaatgaaaataggaatacaataggaatacaataggaatacaataggaatacaataggaatacaaaaaaatcagtaggaattcaatggatattcaatagaaattcggtaggaatacaattgaacatctaccgaattaactattgaacacctattgaatatctattgaattaacaattgaacacctattgaacatctattgaattcctaccgtagcactatcgaacatatatttaaaatagaaagaaaattatgataaaatacaacttattattattaggattattaagcggagtattattcgccagcacgtgtttctcacaaattgcgcctgaaaaatactggatacaatttactgataaaaataattctccctattcaatttttgcaccacaggattttttatcaaacagggcaatacaaagaagaataacacaaggaatttctgttgttgagaatgacttgcctgttaatcctgattatgtaaattcagtaattacaaccggagctacagtgttgcattctgttaaatggtttaacggtgttatgatacaaacaactgacccgtcagtgctgagtgctgttatggctttgccttttgtcagtggttcaaaaaaaattggaactcccctgccctctttagcgaataatgcatcaaacaaatttccagctctgggagaaaaatttttgcaaacaagtcattctgttaaaaacgatgtattccaatacggctcagcctttgaacaaattcacatgcttaatggtcaggaattgcacaaccaaggctatcagggacagggaatgattattgccgttattgatgcgggattcaacaatgcgaatattctcaatgcttttgacagtttgtggcaaaacaaccgcattcttggcacaaatgattttgttactccgggtcagaatattttcgataacacgcataatcatggaatgaatgtgctctccattcttgcagcaaaccttcccggcgaaattgtgggatctgctcctgcatccgactactggcttttaagaagcgaagacggcgcatctgaatatccggtagaagagtacaactggattgttgcggctgcatttgccgacagcgcaggagttgatgttattaatacatcgcttggctattccacgtttgatgactcaaccatgagttatgtgtatgcaaatatggatggaaacacaacgccaagcgcacgtggagttgatatcgcttcaagcaaaggaatgcttgtcgtagttgcagccggaaatgcaggaaataacaactggcattttattacaacacccggtgatgcagacagtgctttaacctgcgccgctgttgatattaacggagattatgcatcgttcagctctgtgggtcccagttcagatggcgacgtgaaacctaatgtttccgcacgtggtcagggtactgcatacatcggaagcgatggcggtgtttacaatggaaacggaacctctttttcttccccactgatttcaggacttgcagcctgtttatggcaaaaattccctgctatgacaaacatgcagataaaatctgctatcgaacaaagctcacaccttttctcaaacccaacttacgagcttggatatggaattccaaattttgccgcagcattaaataaattggaatttattgcaagcaattcagaaggcataattaaagttttcccaaatccatttacaaacactttcgactttgaattttactcaaccgacagccagacagtaacaatagaaatcatcaacatgcttggatttaccgttttgaaaaataggtataatttcgattacacaaactgcaaaagaattcagataaataatattaaaaatcttgctaaggggacatatatactgaaagctaccactaaaaataagagttatttttcgcgggttgtaaaagagtaagcggtgtcttcgacatttcggcaagctcaatgtccgaagctcagacacctgcggcgaagcattaccaaatacaaatcacaaatcacacatttggaattaggaattacgaacctgcctagcccgcctacttacgcagcttggcaggcttgccgctgtggcagacaggttaggaattaggaattatgttatattgagataaaataggaattcaataggaatacaatcgtacatctattgaatatatccattgttgcactattgaacatccaacaatttaattttcaaattgactaatcttctaatcttcaaatcttaatcgcactcggaaaacctagaatttatatttttcccgcagacctgtcgtgcaaagcaagattacgcagacctgccagacgcaggctggtacgcgcagatgcaaatcattgattttcaatatttatttttctgcgaaaacctaccttggcagcagctatcgtgtggacacaaatatgtgaagtatttttattgaggtgtttgatatttttaatattttaagcctattctgaatattaattaaacctaatatatgacacgaatttcacgaattagcctgcctgcctgtttacaacaggtaaatttactaccggtaaatttacactaggtaaatcagtcgatttatcaactgatgttgacaaggcaggttcgtgtaattcgtgtcaataatacttttcggaaaggacttaataaaaaagatgtgtccacacggtagcttggcagcagacaggtcagcgaaatcagcgggaggcacttatcagagtgaactcaatcttcaaatcttcaaatcacaaatcataaatctcccccctgctcttaaacataaaacggtttagattgctttctttcgtcaattatctatagaataaaaatctatacttcaattaaatacgaacattctttttcttcacaaatcttcgctttatttttatgctttacaaccacaattgattttaatcataaacagtttatttggttattattaaaatagcagaataaaaatcatgtaaatgaaaaagaaagaaataaaattcagtcttgtttacagagatatgtggcaatcttccgggaaatatgttcctaaagtagatcagcttacaaaaatagctcctgtaattattgatatgggctgttttgcaagaattgaaaccaatggtggtgcttttgaacaaataaaccttttatttggcgaaaatccaaatacagcggttagagaatggacaaaaccctttaataaagtcggtattcagacccacatgcttgaaagagcgctgaatgcaataagaatgtatcctgttcctgctgatatcagagaattaatgtacaaggtaaaaaaagcgcagggagtgaatattgcacgttctttctgcggattaaacgatcataggaatttagagctttccataaaatatgcccgcaaagcaggaatgatttctcaggctgcattaagcattacccattctgaaattcatacaattgattattacctgtgcgtaatagataaagttgttgaatacggcactgacgaaatatgtctgaaagatatggcaggtatcggaagacctgtaactttagggaaattagtaaaatcaataaaagacaggcatccgaaaataaaagtacaataccacggacattccggtcccggtttttctgttgcctcagcacttgaagtggcaaaagcaggagcagattatatagatgtcgcgatggagcctctgtcatggggaatggttcatccggatgttattacaatgcaggcaatgttaaaagatgcagggtttcttgttcctgatattaatatgaaagcatacatggaagcccgcgccctcacacaatcgtttatggatgattttttgggatatttcattgacccgaaaaataaaatcatgagttccctgcttatacaatcaggattgcccggaggcatgatgggcagcatgatggcagaccttaaaggtgtgatggatggaataaatcgttatctgaaagaatcaaaacaaaaagaattgtctcaggacgatatgctgataaaactatttgacgaagttgcttttatctggccaaaactggggaatccgcctcttgttacacccttcagtcagtatgtgaaaaatgttgcccttctgaatgtcatgcaacttatcaaaggaaaagagcggtactccatgatggataacaacacatgggatatgattcttggaaaagcagggcaacttccgggaaaacttgattctgaaattctcgaacttgcaaaaaatcaaaaaaaagaattttataaaggcttaccacaggatgcatatcccgatgaattggataagtataaagaagaaatgaaccaaaacgggtgggagttcggaaaagataatgaagagctttttgaattggctatgcacccgagagaatacagagattataaatcaggtgctgctaaaaaaagatttgaagaggaactgaaaaaagcaaaaacaaaaattcaggtaacggaagaaactcctataaagacagaagagaaaccaaaagcgaaagaaaaattcattgacccttcatggaaagaagtaaaatctactcataaaggaaaagtttattttcttggtttcggagaagatcatttgcagataggcgatcatgtaaaaaaaggagacagactctgctatgtggaatctatgctcgtttattatgaaatcaaatcagaatttaacggtagaattgcagacattagctttaaaagcggaaaacaagttgcaaagggagaagttattattcggattgatgcttgacgtatttatactgtagcatcgttccatggaacgatgttacagttttacaaaaaaacacaaataaaaagatatggcattacaggataagattaaggaattaatggctctcagagagcaggcgaaaatgggtggcggtccaaaaaggattgaagcgcagcataaaaaaggaaaactgactgcacgcgaacgcatagatttgctattagatgatggcagttttgaagaatttgatatgttcgtttcacaccgctgtattgactttgggctggaaaaagaaacgtatttatcagacggagttgttacgggttacggaactattgacgggcgtttggtatatgttttctcacaggatttcactgtatttggaggctcgctttctgaaatgtttgcagctaaaatctgtaagattatggataaggccatgaaagtcggagctcccgttattggcatcaacgacagtggtggagcgcgaattcaggagggagtgaaaagccttggcggatatgctgatattttccagcgcaacattatggcatcaggagtaattcctcagatttctgccgtgtttggtccgtgtgcgggcggagctgtttattctcctgctctgactgatttcattgtgatgtcgaaagatacctcctacatgtttgtaaccggacctaaggttgtaaaaacggtaacaggcgaagaagtaacttctgaagaactaggaggagccaacgttcatgccagcaaatcaggagtagttcacatggttcccaacacagagcaggaaggaattatgatgattcgaaaattgctgagttatcttccacaaaataatctcgaagatccgccgatgtctttctgcgatgacccgattgacagacgtgaggaggcacttaatgaaattgttccggaaaatccaaataaaccttacgatgttaaagaagttatcagcttaattgttgactataaagaatttcttgaaattcaaaaagactatgctccgaacattgtaataggttttgcacgtttaaatggtatgcctgttggtattgtggcaaatcagccaaattatcttgccggagttttagatattaatggttctcgcaaagcagcacgctttgttcgcttctgcgatgcatttaatattcccattgttactcttgttgatgttccgggatttttacctggcacagcacaagaatacggaggaatcattattcatggggcaaagctgttatatgcttacggcgaagcaactgttcccaaaataacagtagttcttagaaaagcttatggaggcgcttacgatgtaatgagttcaaaacatctgcgcggtgatattaattatgcatggccatttgctgagattgcagttatgggtcccaaaggtgcaattgaagtattgatgtctcgtgaactttcaaatattgaagatgacaaagcaaaagttcagttcattcaccagaaagtggaagaatacaaagaaaaatttgcgaacccttatgttgcggctaaattcggatatattgatgatgtaattgaaccaaaaaatacacgtttcagaatcatcagggcattggaatcgctctctacaaaaaaagatcagaatccaccaaaaaaacacgacaatcttcctttataaaaattttcattcgaattaaaaaaagctatgacagacacaatagaaattaaaacgaaaaaagacccgacagaagaagaagtcgctgcaatggctgtcgcaatttatatgaacaggatggaagttcacgaccaggaaagcgcaaaacttaccattcagaaaatatcaaaacgctattcgccatggagctcaaaaatttatggtttgaggagaaatcccagatattattaatttcgaattagcaatcctgtgaggtatgcgcacatgcaagtgggatgaatatcctcacaggtttgccgagatggagagtaaatgaattaaaaattaagaattaagaattttaaacatgaaaaagttcaagttaaaaatcaacgaaaattcatacgacatagaaataaaaaaagccggcgatgcccaaatggatattgaagtaaacggcaatccctacaatgtggaaattacgcatgctgaaaaggttgtaaaaacaccggttttggttattaatcccacagttccatctacagactatcatccttcaacagcaaaaaccaatgcgcccaaaggtggaattatttattcaccactgcccggaaatattgttgaaatttttgtaaaagaaggcgattacattacgcatggacaaaagcttttggtattggaagctatgaaaatggaaaacaacattgattccgacaaagaaggaaaagttacagccattaaaatccaacccggcgatgcagtaatggaaggcgatgctttgattgttatcggggagtgatataaaaaaggacttaaatgttttttcaagattgacacaaagaatcattatcaatattctttacctgacttttctatatataataactctacattttaaaaatgagatggactttgctgtttcatttttttattcatagtcgtatttaaattatacactatatgagcaatgtcgaagtatagtttgcttgattttttaagtttaaataagtgcattctctgtattgagcttgtagaaatgaagcttaccttgtctgccttgacgatagtctggcagattttggtcttaatttctcgtcagcccctcactgattgccgtaggaaaggctacctcttcgattaacaatgcttatttgccaatttttatcaaagaacctttagtagataaataataaagggaacgttgcattaataatttccattaaaaatcctgaaaaatttattacatttgcagcaatgacatatcttggttcaaatatcaaatttttgagaaaaaaaaccggactgacacaggaacagtttgcagaaaaattaggcattaaccgcagcctcgttggctcctatgaagaaaaacgcgcggagcctaaattaaatctccttcaacaaattgcacttttttttaatgtcagcactgatcaacttattgcttatgatttttcgtcagaagcatttcctgaaaaaacaaatcaggaatatatttccggaaaaaaattaaggattttaaatattgtatctgatacccaaaacagagaacaaataacagttgttcctgtaaaagcagcggcaggatatgcgagaggatatgcagatgcagaatacattgattcgcttccacaattctcactacccattcctgaactctctaaagaacgaagctacagattatttcagatacagggagaaagcatgaatcctgtaccatccggagcatacattataagcgaatacattcaggactggcatacgattaaagatggtaaaacctacataataataacagaaaatgatggtgttttgtacaaaagaatatttaaaaataacgagcatcttcatctgaaatcagacaaccccgaatttcagtcctattcaattcattttaataatgtatgtgaaatatggcttgctttaggctatatatcttttcagctgcctgattctgaagcgtttttgtaaatcagttcaaacacataaacacatactaaatacttaaaaaaatcgttacaaaaaaaacaaaaatcatgaaatatataatcagcgcacttactattacctgcattattttttacattttcagttataccttccggcttgacgaaatcccttatgaatactcattgaatagtaaagttgatctaattgaaaaagcaaaagaatcagaacttttatcgaaaaaaattaacaacgaaatttttctcaatcttgcatttggtatgtgcaaagaagatattgaaaaatatttattaaagctgcatcaggaaaaaattgtgtcagaaattgaatggaaagaaaatattttagccggaaattatagcatggaataccaatcattatttaacacaggccgattttactgtttctttgaaggagaaaaactcacggaaatgcaaattgatacaacgctgcaaaaaggacaagacctcattgctctatttgaaaacaaatacggaaaaacagatttatattttgaagaagactgctcccgcgaataccactggatacaaggaaacaggcatcttacaatcttccagaatgaaactacaaaaggattgattattgtgtataaagatatgcggtttgagggctgaggaattctgaatacttaatactaacataaagccccaccgaagcggggctaaaggttttacaacctacggcatatagccttattgtgataagaaaaaaaatggaattaattttttcttgatgcaaatatataaatatttgttataaattcttatttttaacgtattattatcagaataatttattaaacaattaatttatggctaaaattttagggctcgatttaggtacaaatagtattggttgggcagttgtggaagatcaaaacaataaaacaactttaatagataaaggcgtaagaattttttcagaaggagtaaaaattgaaaaaggaattgaaaaatcaaaagctgcagaaagaaccgacttcagaagtgcacgaaaaattaaattcagaagaagattaagaaaacaagaaactctaaaagttttaattgaaaacaatatgtgccctcttactattgaagagtggacaaagtggaaaaaagacaaaaaggaatatccaaaaaacccagatttcatcaattggttaaaaacagatgaattaaaaaacatcaacccttattttttcagagataaagcaagccgtacagaattacctttgatgcaaacaggaagagctttatatcatcttgctcaacgacgtggatttttaagtaatagactcgatcagggaagtgatggctttactgaacaaattcgtcttgatctcattaaaaaaatagaatgtgagacggataaaacagaactcttaacatcagttcaatcaattatagatacttattctgaagaagaagataaagatgcaaaaaaactgctaaaaggagttgaaaaattatgtaaaattaacaatgaattacctataacagagtttaaggaaaaattaattaattatttgaataaagcagataacctcggtgctgtaaaaaaaggtatagctgatgtatcaaaaaaaatcacggaaacaggttgtgaaacgttagggcagtatttttacaaattatatcaaaatcaaagcaaaataagaaaagtatatactgcacgaacagagcattattatcatgaattccttaaaatatgcgaaacacaaaacatttgtgaccaattaaaacataaattagataaagcaatattttatcaacgcccattaaaatcacagaaaggattaataggtaaatgtgtatttgaaaaaaataaaacacgttgtgctgtttcacatccagcatacgaagaatacagagcattacagtttattaatagtatcaaagtcagtgaaacaaaagacggtaaaaaagattttcttagctttgatgaaagaaaaaaaatatggccgaaatttattcgtaaaagtaaacccaattttgatttcaaagaaatcgctgaaactcttgataaaaaaggtctatcacgttattataattatactggacatacctctgttagtggatgccccactattgctcaattaacgaatatatttggtgaaaactggcaagaaaccctttttgaaaaatacacaaataaacaaaatacaaaagggttaaaaactatagatgaagttgtaacagatatatggcatgtattattcacgtttgataaagatgaaaaaatcattgaatttggaaaacaaaaattaggtttaaatgaagtattagcaaagaaatttggcgcaattaatttgaaaaaagattatgcttcgttaagtctgaaggcaattaataaaattctgccctatttacgtgaaggattaatatattcttatgctgtatttctagcaaatatagaaaatgttgttggcgaagaaatatggaaaaatgatgaaaacaaaaacctgattaaaaaagaattgcatttattaattgacaactttaatgaaataaaagggttagaagcggttgttaatgattttatagccgattttaaaaaagagtataataatgcccataaagactatgtactggatgaacaagacaaaaaaatacttcttgaaaaaatagaatctaattatggtaaaaataaatttgaaagcctagaacctgataaaaagacagaaattattaattctacagaaaaaatggtagctgaacagctccgtaagcagagaggcgaatttattaaaccaaaaagactcgacgaaaaaataagcgagtttcttattaataactttaatgttactaaaaaatctatagccaggctatatcacccttcagacgtggagatttttaagacagcttcaagaaattcagagggcctgcttttattgggaagcccaatagtatcatctattaaaaaccctatggctatgagagccatgcatcaattacgaaaattggttaatactctaattaaagaaaatattattgatgaagaaacaaaaataaatattgagcttgcccgtgaacttaatgatgcaaataaacgtgcggctataaaaaaatggcaggatgaacgacaaaaagccagagaagaatacaaaaaatccataaaagaattattcaaagccgaatgtggtaaagatattgaaccatctgattcagaaattttgaaatatgaattatgggaagagcaacagcatatatgtatctatactgggaaaactatcaatatttgtgattttattggagcaaatcctaattttgatattgaacatacaataccaaaaagcttatgcttcgataattcaaatgagaatcttactctttgtgacattcaatataacagagatgttaaaagaaataaaataccaaccgaattaagcgattataatagcataaaacctagattagataaatggttggtatttattgatgattatgagaaactatacaatacccgcaaaaaagccaaagggattgaaactaaggagcaaaaagataaaaggattaaagaaaagcattattataagctacaccttgattactggaaaggtaaatacaaaagatttattatggtagatgtaccttctggctttaaaaacagtcagattgttgataccggaattattacaaagtacgctatttcatacatgaagtctatttttccaaaagtatattctgtaaaaggtaatattgttgctgaattcagaaaaatttggggacttcaaaatgattatgaaaaaaaagaacgggttaatcatgttcaccattgtattgatgctattacgattgcttgtatgtcgaaacagaaatacgacacattagctaaaatatatcatgaagacgaagccggatttcacaaaataaaaaaagaaacccaattggtgtcaaaaccttggacttcatttacaatggatgttcttaatattgaaaaagaaatttttgtttcgcatcatacgccagacaatatgaaaaaacaaagcaaaaaagtagttagagagagaggtatcattgcacctaaagtcatttatgaaactgatgcaaacaataataccttgcgtgataaatatggtaaaaaaattgttaaagaatatattttgctcaaagacgttaatggaaatttgattcctataaaagggaaaagattaacgccttcagatattattaataaagttgatggcattgattatttttcattaatcataaatgataaaatacagtattatgaatttgcaaaaagtaaaaaaacaggaaagataatttataaaaaagaacctatatatctacaaggtgatacagttagagggtcactgcatttagacactttctacggtgcaattgcaaaggacattaatggcaatataattactaatacaaatggtaaaattgcaccaaattatgtaattagaaaagaattatcaaaacttaaagaaacagacattgaaaatattgttgatccagtagttagaggaaaaattattgaagctaaaaaaaacaaactaattacttttaataaaagtggcgcagttataaaaacgacgatatggatgaaagaaaaccaaattcccattaacaaagttagagtttactcctcattaaaaaaccctttacccgattttaaaaaacatcgagatttatcacatcttacttacaagcaacaatacaatgtttcaaatgaagaaaattattgtttagccatatatgaaggtaaaaataaaaaaggtaacgtttgcagaacttgcgaattagttaatatgattgatgctggaaattattatcgtttaagcaataaaaattggaaacaacaataccctattgtaccagaaaaagattctgttacaaattattctttaaaaacgatcattacaaagggattaatggttttactttatgaaaaatcacctgaagaaatttgggaattaacatataatcaacaaatggaacgtttgtatgaaataacacaattagatacagaaaaatcagcagaaattaaactattatttcaccaagaagcaagagaaaaaaaggtaataactgaatatatgggattaaaaacaggtatgaaaggcggaaaaaatataggtaaacacaaagagtttccttggataaaagttggtccaaacagttttgatgctttaatagaaggtattgattttaaactcacaccaactggtaaaatcattaaactatgacacccaaaaaaaaatataaaaaaaaatcagaaataaataatttagcaaaagaacctgccgatgcttatacaataaaattctgttcttcttttgaagaaatgaatgaagcagaagctatggaaatggctatgatttcacctttacaacatttaaaaaacgcaacagcgcttattaaaaacatttatgccattgaattaaaaaataaaataaaatacgacactatttattttgtaaatcatgagtaatatattgcttcctgaatttaagaaaatgcttcttcttttaaagaaacacgatgtggattttttactcataggcggctatgcagtaatttattatggatacgacagagtaaccggcgatatggacatttggctagatgcaacaaaagataataaaataaaattatgcaaagcgcttaatgaatttggtattaatgaagagagcattaaaaaagttaaaaaactcaattttgaagaaactcattttttctatttcgggcaaaaaccacaaaaaattgattttcttacaaaagtaaatttaataaattttaaagaagcttttgaaatggctaattattttccactccaaaatcagcaaatacctgtaattcattacgaacacctgattcttacaaaaataagtaacaaaagatctaaagataaaactgacatagaagaactacagcgaatattaaaataccgtaaaaatagttgaacgattattttatgctgccatcaatccaacccatatatgttaaaaagaaccctgtatttcagcaatccctatcacctgaatacagaaaacaaacaattaataataaccaacaagactaatggagaggttaaacagacacccattgaagatattggttttataatttttgaacacccgcacattacctttacacaatcggtaatgcagttcttaacagagaataacactgccgtggtattttgcgatgataaacatttgccgtcttctttattgctaaaccttgaatcaaatcatttgcaaaatgaaattttcgcttttcagatagcagcaacagagcctctgaaaaaacaactttggaaacaaaccatagaaagcaaaataaaaaatcaggcaacgcttttaaaaaaatacaaaaaagaatacaaatttcttatcgcactttcgcaggatgttaaaagcggagatactacgaacagagaagctgtagctgcaaaatattactggaaaaatttattcgacattcccgatttttttcgcgatcgctatgggttcccaccaaacaatttactcaactacggatatgccattttacgtgcagcagtagctcgttccttaacaggttcaggattgcttcccacattgggaatccaccatcataaccgctacaatgcctattgtcttgcagacgatataatggaagcatacagaccatgggttgatgaaattgttttagcgcaatgcgtaaacaacgaagcacccgatgatctcacaaaagaactgaaagcagaattactgggtgttttatcatgcgacacaaaatttgaaaaagtaacacgacccttaatggtaggactttcaataactactgcttcgctggctaaatgttatgagggtgaaataagaaaaatagagtatccggaatttgaataaaaacctatgtcgcacgagcggctcaatgcctatcatataatgtggctttttgtatttttcgatcttcctgtagtaaaaaagaaagagcgcaaagatgcagcgcgtttcagaaaagaattgcagaacgatggatttaccatgatgcaatattctgtttacataaggcattgtgcaagcacagaaagtgcagacgtgcatgaaaaaagagtgaaaaaattcatgccgggaaaagggtacatcagcatattgcgcattacagacaagcaatacggaaatatcgtaaatttctggggtgttgaaaccaaacccctgaccccgggccctaaacaattagagcttttttaaaatacgattgaaaaaatgacggaagaagccttatcttacttcaaccgacactatttttaattcaatctttttctgtctttttctttaataacagtgcttccaagagcatctattatttattattccatttttctttcaaaccacaaccaggatacagtattctgatttatacttatattatttattattccatttttctttcaaaccacaacagcagaaacaaacggatataacaagggatattatttattattccatttttctttcaaaccacaacaggatattgacactgaattgaatactcaagattatttattattccatttttctttcaaaccacaacaatcaatatcagtttcataatttcgagacattatttattattccatttttctttcaaaccacaaccaaaataaatatagcaatgaagcaaaagacattatttattattccatttttctttcaaaccacaaccagaaatggcaggtaatagttttgataaggattatttattattccatttttctttcaaaccacaaccggcggacctgtacccggaacaggcaacaattatttattattccatttttctttcaaaccacaaccaggaactactgttgattttgatgccgatgattatttattattccatttttctttcaaaccacaaccagtaatctatgaacttttgctcgtctgtaattatttattattccatttttctttcaaaccacaacccgtatccattgtaacggtttctgctgtaaattatttattattccatttttctttcaaaccacaacagcagaaacaaacggatataacaagggatattatttattattccatttttctttcaaaccacaacaggatattgacactgaattgaatactcaagattatttattattccatttttctttcaaaccacaacaatcaatatcagtttcataatttcgagacattatttattattccatttttctttcaaaccacaaccaaaataaatatagcaatgaagcaaaagacattatttattattccatttttctttcaaaccacaaccagaaatggcaggtaatagttttgataaggattatttattattccatttttctttcaaaccacaaccggcggacctgtacccggaacaggcaacaattatttattattccatttttctttcaaaccacaaccaggaactactgttgattttgatgccgatgattatttattattccatttttctttcaaaccacaaccagtaatctatgaacttttgctcgtctgtaattatttattattccatttttctttcaaaccacaacccgtatccattgtaacggtttctgctgtaaattatttattattccatttttctttcaaaccacaacccctgttaaagagtgtccctgctgaataaaattatttattattccatttttctttcaaaccacaacttccagcatattcagtcaattcccatctgtattatttattattccatttttctttcaaaccacaaccatcaacaaaatcctttttagttaaaaataattatttattattccatttttctttcaaaccacaacatgtcctcctgtgttcccatttatacagcaattatttattattccatttttctttcaaaccacaacagcaacacaggaactcaaaacttttgaacattatttattattccatttttctttcaaaccacaaccgttgtcgagtgtatgttgattcagtacttattatttattattccatttttctttcaaaccacaacagcgatatcggtgttgttgtggattccgacattatttattattccatttttctttcaaaccacaactataaattaaagatgaagtataaacctaatattatttattattccatttttctttcaaaccacaactgtagctccataattactgaatcttgcaaattatttattattccatttttctttcaaaccacaactttcccggtgtagcttgcaccgtccactgtattatttattattccatttttctttcaaaccacaactgcaacatgactgcaatcgaaatacaacgaaattatttattattccatttttctttcaaaccacaacctttctatctctttgcccccaataacgccaattatttattattccatttttctttcaaaccacaacccacattacctatacacggtgttagccgctattatttattattccatttttctttcaaaccacaactgtcgatccataattactgaatcttgccagattatttattattccatttttctttcaaaccacaacggacttaataatcttacgtccgagggcaagattatttattattccatttttctttcaaaccacaactaaaagtattttattagacaatcaaagtaaattatttattattccatttttctttcaaaccacaactggaatgtcgggagccagcggctttggtaattatttattattccatttttctttcaaaccacaacaccagaagttttcacgattgacacagaagtattatttattattccatttttctttcaaaccacaacctctgttcttttttcttttatgatttaggaattatttattattccatttttctttcaaaccacaactcgggtgggtcgcattcgttatctcctatgattatttattattccatttttctttcaaaccacaaccaggttattttgttcgccaaaatattctacattatttattattccatttttctttcaaaccacaactagtattaatcttaaaacaaaataaaatggaattatttattattccatttttctttcaaaccacaacccgtatccattgtaacggtttctgctgtaaattatttattattccatttttctttnnnnnnnnnnnnnnnnnntattccatttttctttcaaaccacaacaaaagaaaaactattgatcgggaaatgataattatttattattccatttttctttcaaaccacaacagcacgcaattgtattacacaggaatctttattatttattattccatttttctttcaaaccacaacgatggtttcggtcagaaatctcagcaagatattatttattattccatttttctttcaannnnnnnnnnnnnnnnnnnnnnnnnnnnnnnnnnnnnnnnnnnnnnnnnnnnnnnnnnnnnnnnnnnnnnnnnnnnntattccatttttctttcaaaccacaacccggttgatgttaatgtttgtgggtcataattatttattattccatttttctttcaaaccacaacaaaatcgtattactcataaaaaattaacgaattatttattattccatttttctttcaaaccacaactgctcaagagttgctgctttgtcttcagcaattatttattattccatttttctttcaaaccacaactatccatttaagctctggtacttttgctgattatttattattccatttttctttcaaaccacaacgtaagataaattactaaatttacctataagattatttattattccatttttctttcaaaccacaaccatcccagcacctaatgtaacattgccacattatttattattccatttttctttcaaaccacaacaaagaaaataaaaacacgcttgatgatattattatttattattccatttttctttcaaaccacaaccataacaaaattgaagcattgaagaaattattatttattattccatttttctttcaaaccacaacctgcctctacaatagtagcaggatttacaaattatttattattccatttttctttcaaaccacaaccatgaagtggtttctgctgtaatctcgggattatttattattccatttttctttcaaaccacaacataaaccttgttgcatttttcaaaaaatttattatttattattccatttttctttcaaaccacaaacaggtaataaaatatatcccaccaatacaatgaaatattttatttacacaaatataacactgtaaacttataacaacaaataattctttcacaacaaaagaaaccccaatttagatccattccgaaaactctttttataatcccctcgccttcatctccaatggcaaaagactactatatataaatgtattcgcgggagctgaaactccatattttgctgctaatttaacaactgttccgttttgatattcgagttcagaagctttgccttccattatatctctttgcagtgaagaagtagaatcctcatcaagtgtatcaataaaagctaaagttttagaaacaatatcgggtttcattttaatttctgctttcaatgaaatttcaaaaatctcagataacaaagattcaagcatttttcgtgtttcggcaattttgttcaacacggcaaggtttgttcttgtaacagcgcaaagaccgcttgtacaaatatataaaaactttgtccagacttctgcatgaatatcgtcaggaattttagccttgaaatccgcgttgataaataagctttgaatctttttgcatctttcacttacagaattatcattttcgccaaatagtattattggttcaaatcctatatgctgaataattccaggctcttcaattttgctgaaaattttacaaatgccatcaagtacaacagaatggccaagttcagatcgtaattcctctgctgccattatcccgttttgaagcggtataacactcatcttgtctgttttaatttttgataattcttttgcagcatctttaacctgccaggcttttactccaagtagcaccaattcgggactttctgcttccaatacagattgaaccgcttttacatttttaatatgaatattttctttgatactttttattaaaagtcccttttctttgagtgcaataaaatgtttacctcttgcaagaaacgtaacatttgctccggaatttgcaagttttcctccaaaatatcccccgactccccctgatccatatattaaaatcttcattttttatattttttaattaacaatccattcttctaaatttcaacttattaacaagcaatcatgtctgcgaacaccatcataagacaagcacgcgcttcttgttctcaatgagctgcgtaaaaatttatatacaaaacttttttaattaaaagtttgtatataaatttgcaacatagtaataattattttttaattataaaaattgtacccgaagaaaatatgtttaatttaaattatatattatgaaaaaagtaaaaattctaagcgttttattaatgattgtcatgatagccccggtcatggttttaacaaactgcaaaaaaggagaaaatgatccttttctttcgttccggtcaagggataagagattagttggtaactggaccatatcaaaagttgataatacttctattacggatataaaagggaattctgttaattatccgtcattagctgctgcgacctacaataatgattatacaaactcactcacaacgattacaacaacatttgatggttcaacattaaattattcaaatgttgtatctaccaccaattttcattattcaaccgtttatcctgcaacaactccttcttctgttgttacaacaacaggttcaaccacaacaaatgtttatacatattcaattggcatcacaattgaagaacagggtattgccaaagttacagaagtatcaaccgcaaaaacacaaaccctgagccatacgccggcgcagacctgccccgttggttatggaactcccggtcttacctgtgatggtacttatacagtaactactccaaccactaccacaacaaatttcgaaggtacctggcattggggtacagagaaaaagaataaggacatgctggtattagagggagttggttcttatagcggaacgtattatattcagcagttaaagatgaaagaaatagtactgattcaaaaatctgtttcaaataatactgattcaggagccagtaatagttcaaacgctatttctgataacaatacggtaaccctgacccggaaataatctgtttatcgctttagcgatatttacgaacataaaaaaccgccacactttgcccctttcgatgcttcgacgttgctctgcaacctcaagttcagggaatggttcagtgattgcggttttttttttgtgcttattcttcattatatcagcaacacatgcggttgtttcttccaaaagttagcactcgtcgctgtggcgaccccgccccgcaagacattacccggagaagagtgcgaacgtgaattataaaaatctgaaaaaatcaaatatctttgcgcaaaacagagaatgaaaaataatattctacatacaaataatcttaccgaagaaaatttaatgatgctaatagaaagcagaattgaagagggtttgcattattcattcaaaaagggaaacgaagttccaataacagaaaaacaaatagaaaaacttacgcttgaaataactgcttttgctaatactttaggaggatgcattatttacggaattgaatcaaaaagaaaaaaagcgcatagcttttcattcctgaaaaatacagatttttccgtttcaaaacttgatatagtattgcaatcacgaataaacagaccaattcccaatctgaaaattcaatatgtggaaattcaaaatgataaggaaaaatcggttttaataataacgattccagaaagttcagaagctccacacatggcttcagataaatgcttttacaaaagattgcacaataaattttctgtaatggaagaatttgaagttcggcagatgtatggaaagttatctaaatcgaaccttgaattcgtgggcattgttaatacaaacggaattccttctctgacagacggtcttttcaaccatgttatttttcttccccgctttatcattcgcaatacaggaagtgccattgagcgtttttacaaatttgaaatagcaatcccctcccctctttgtgatgaaaattattacgcgcttaacacctatttcaaccgtcatgaaggcatttacagcattttttcaatccccggaaaagcgcccgtttttcaggacgaaatgacaagcatcacggaaattaaattgctcatcacaaaagaaaatcttgaactttttttaacagaaaacattaaaataacattgttctacagcgaagggatgcggtcttcagtgttcaacctatcggatacctttatgtataacaataaaatgttagagaaaaatctgttttgttaatggcggaattgctgaaaataaaacttgaaatcttattatcggaaaaaattattaaaaagcgaaaatgaagagtatctgtctctttcctccatcttttttaaataatcattaataaaataattcatttcttttttattttttgatattcgtaaaaattccgatatatcttttaacgaatctctgattttttttatttccttaattttttcctgtatacgaaacatggcaacattgtctcttaaatgagagaatttagcaacaccagcaaatgcagggttgttatatatacttctcatttcggcttccaaacgatttacctgttcccttagaacttcattaaaaataccaagtttttcatcaggcaatgcttcgagttggtcgttttcgcgatgcaaccactgcatttctaattttaaaagaacagaaagatcattgctttcataagctgctgtaacttttttcatctcttcttctttttctaatttctttacaggatcagtctcagaatcgggatggagtatctttaccaaagcaatatatattgaacgtattgttttatttctgagttcagcttttgctttttccatttcttcattggcaatttgcttttttgtttttttccgattttcgctatttgatttttgagcttttcccatctccctttcaaactggtctcgtatttgttgttgaaggcgtgcaaagtcttcatcgctttcgccaatatcg

SEQ ID NO: 1594 - DNA, 24092 bp, synthetic construct
  source 1..24092: mol_type = other DNA
  misc_feature 1..24092: note = Synthetic
cgagcttttggatgctgtaattgataacagtaagctgcccggctattttgccggtcttgcgctggatgaaaaaaagtacctaaaaaagatcgttaaatggctttattgatagactacaagctgaaagcctctatgatgctggaagcgctcattgctacgatcgttgttgcgataagttttggcctggcggtgagtgtttattccaacgtgctccgatccggggatctgagaaataaactcaaagctcagctgatattaaataaccatgcgattgagatgaaaacagaaaaaaaatacgtagacgataaaatagagtacgataatggtagccttattcaaaagataagtaaatacaatggcacgggaaatgtgttccagcttagtctgacgtttactgataaaagcggaaaagtactagcagcacaaactgaactgattgttgaatgaatgtttttaaaacaaagctaaaagcgcttacgctgattgacgcgatggtaggcatgatcatcagcgctatgacggtagcttttgctataacaggttatcaggtgatctataaacagttttacgattataaacggatgaataaggtgaccgttgaccttactcagtttaattcagtttttaaaaatgatttttttaatgcatttctaataaagaaaaacaataacggaatcgacattgatttgccggtaaagtatggacaggaatttagtaatgctctgtatgaaaatcagattagctaccagtttaatcagcagtatgtgatccgaaagctgaacaatcatcccgatactttttttgtttcctgtacaaatcctatagctcagtttttaaaccacgaacagatgcaaaattcagggctggttgatgaattgacttttgacgtagcgctatttggaaaaaatgaatccctgcatttccaaaagcaatacgctgcggatctactaatgaggactgaagcggagcccggtcaattgttcttaaacacctttgataataaataaaatatggccattgacctgagtctatacaatcaaaaaaggaaagaggaaaaccagtctcaggctaaacgagattggacggaggatctgtccggcctattaagtaaggagattaaactctttggatcgagtttcggagataagaaaaaagtgcgtttctattcagagctatctattttgcttacttcaggtattgacatgcgtacggcactggaaatgctggaagaggaacaggagaaaaaagatgacaggcagcttatgggagaaattaaacaaagcatggtggaaggaaagaatctttcagaagcaacattcgcttctgggaaattttctgaatatgaattttacagcatgaagataggggaggagagtggaagaatgacagaggttctgcaaagtcttaccaaatattacgatgataagctggaacaaagacggcagatcataaatgctttgtcctatcctttaattgtaataagtgcgtctgtttgcgtgattgtctttatgatgcgttttgttgttccaatgttcgcggaactatttcgtcagttcaaaggagatttgccgctcattaccaaagtgatgctgagaatttcaggtggaatgtcaacctatggggctattgtccttttttcagttatcgcagtaatcggtacactttacagccaacgaaaagcgatctggtaccggaagtttttctcttcacttgttttacatttacctgtttttggagcaatggtgaagaaggtatacttggctcgtttttgccaaagcatgaacttgcttctttctgctcagacccctcttaattcggctattgctttagtcaaaaagatggttggattttatcctattgagcagagcctggatgctgtaaacgaagatctgactaggggagctaagctgcatgaaagtttgggtaagtttaaagtatatgaaagaaggatgatttctttacttcgagttgccgaagaagtcaagcaaatggatgttatgttcggaagactcgcccagcaatatggagccgaagtggatcaccagaccaaactacttggaaatattattcagccgattttactattactcctgggcttggttgtcggctttattgtacttgcgatgtacatgcctcttttccagctcagcaatattatgcagtgatttgctgtgccaatatataattagtagaggctgacctgtgaaagagaatagtataagagaggaaagcgaaggtcgggcagacttctaagtacgtagtattaattcattagaaagtcgtaattatttgtttgttagtcggaaaaatcaagttatttttgaataataagtaaacacttatccaatgattaaaaagacacttaatttttcattttttttagcaattgttttgaatacgaatgcacaatcaccaacaattacatctttcagtcctgatagcggttcggcaggaacattgataacaattgttggtactaatttggaaagaccaactgcttttaccacaggcggaataaatactctagttgtctctgacacatctgtattggtttccaattacggagatacgttagtaggattgattatgccaggttcagtaactggcgttatatcggttacaactgccaaaggaactgctgtcagcattagtaatttcaaggttataaggactccttaccccagcctacagcagggaaataaattggcgggtacaggggcaatgggtaatgcagggcaaggtatttccgtttctatctcagcagatggtaatacggaaattatgggaggatatctggataataatgacgcaggagccgcatggatatataatcgttcaaatggagtatggtctcagcaggggaataaactggtaggtaaaggagctgttaatacaacatttgcagcacgtcaaggcacctctgttgccatttcagcagatggaaatactgctatcgtaggaggtgatcaagatgatagcgctaaaggagcggcatggatctatacccgctcaggtggagtgtggactcaacagggtaataaattggtgggcacaggagagctcggctccggatttcaaggtagttctgtctccatttcagcagatgggaatactgccgttgtgggagcatatctggatgataaccaggtaggagctgtatgggtttttacccgatcaggcggtgtatgggctcaacagggtaataaattagtgggaacaggagctactggtaatgcaggacagggcgcagctgtttcgatttcagcagatgggaatactattatcgtgggaggatctgcagataatagcaatataggagctgtatgggtttttacccgatcgggtggtgcatgggctcaacagggtagtaaattagtggggactggagctattggtgaggcaggacagggtggagctgtttcgatttcagcagatggaaataccgctatcgttggaggtcttattgataatagtgatataggagctgcatgggtttttaaccgttctgcaggagcatggtctcagcagggatataaattagtaggtacgggagctattaacgtaaatggacaaaatggagccgcacagggcacctctgtttccatttcagcagatggaaatactgctatcgtgggaggagcaggagataatagttatgctggagctacgtgggtttatactcgctcaggtggagtatggactcaacagggtaataaattggtgggtacaggagctatacattttgcagatcaaggcgcagctatagcgatttcagctgatggaaatactgctattgtaggagggggggcagataatagcactgaaggagctgtatgggttttcgtttcgtcaaacagtgtgatacttacagctgtgaacgaaataataagaacccaaaacgaacttgctgtttacccaaatccaagtaacggcttgtttaccatccaatcgacaaacgaaggaatttactcaatcattggtgagttagggcaaatagttcaaacatttaaattaaatgctgaaaataattataacgtaaatgttcaaaatttaaacaatggcatttatttcattgttggatacgatggtgctcaggcaatcaaacagaaagttttagtagccaagtgattttcaggtattcgtttgctacttgtatgaatatgaattgaatgcagtaatttacgtgtcccatccattaaacttgtgatattgaagattatctaggtctaagccgtcttcataatcttcaatatctctttttgcatcttccaaaatactttcattgtcataccataaatcgtcagacggataacaacaaataccatttgttaatttagtaattattgcacttattaaaacagcgaatctaaaatcaaaatcatcatggtctccccaaacaaaagaaataagcagtgtgcaatttttcagtttgtcgtcaatttttggactttcaaaaaaaatgggttcattttgcctcttaaatagttttggatttaataatttgttggttaacgattgaattttttgtttttcggtatctaaatcaaaagcttcataataaatttcgaaaccagttatcaaatattcatttttaaacttctggtatttggtatttaataatttgaatttaattggcaaaaatccttctccacctaaaaaatgaaaatcagggtgaaattcgcattccatttcgaattcattaagcttttcaactattttaggaataatgtcgtctgatatttctttaacataaatttgtagtatgaggcccatgtttatttatgtatagtaaataacgattactggagggaaggtaaaataataattaaaaaggccaatactatttatcaattactatctgaaacccatctatttaacataagattaattatagggcaaaatagaagcctgaaattttggagattttattttacagtctcgcgtcaaggtatagtttcattggataatacttcctatttttttatttccaatattggtgtctggtttaattttcccattttcatctgcttcacctaaataaatgtcaccagtgggatcaaatacttcatagtgaattttattattcttgtgaaaaaaatcaaagtaccaataatttcccgtttgaatatgcttatatattctttccttggttcttggccaaaatttatttaaaggttcaaagtccttattgtttttcaatgagaacttccccgctggtaatgttaccatccattttataaatccagcatcgctattggtcgatgaaacattaattaattctgggaaggaatttacatgagtaatatccttaataatatgaagctcttctctttcaacagcaatggattgacctaaacaaatacagattgttttctcagaatcggaatccttcaacgtatcttctgctgattctgaaactacaaaaggggaaattacagctgtcacgtttattgtccaattcgcataaatgaactgggaatttcgaattcttgggttgcaaacattagtgctttttgttccaataatagtttgtatttgatttgttattcctgttaggtatgggtcgggaacatatccttttgctacttctaagaaacatctaacattatcggaatcataaaaaatttcatattctgattttttctttaaattgtgcttaattgaatataattcctttacaatatccgtgtaagagtttgaatttgtgctcaaatttttaaatgccaaatcagtagctggaaaatataaatatgcttttattttcatgactaaaatccgagtaaatcgttaagatcaatttctgtttgttcgaaaaaatctttcggttgcctgtctattttacctccaacaagaattttaacggggattacagaagcgaaatgcttatcatcatctcttttgaaatgataaatttttactaaatctttatctatgcctttttgcccctgctcaaaacgtttacatgcaacaagaataccgttaatgatatgttcactatgtgtttcaagaataatttgaaccccgttttgtgctgcaaaggcaaggagttttgctaattctgattgaccactagcatgtaaatgtgcttctggattttcaattaatattagactgcttttatcggctgaaagagcagcaactataatgggcaaagcgtagcttaatccaaatcctacattttccgaactaaattcatttgttggaccgtcaggcttgttaaaactatattttataacatacgaacttccatttctaaccggcacaacgtttacatttgggctaataaccctttcccatgcagatgtttgagcaagtaaatcattatcccctgaagaggaatgcagcaagttttcaaaacgaactttttcctttttctctttcccccaataatacagaaagtgagctactaattccgcttggcccttttctagagatagctgttttttagattctacagcaaatgtattagattcagctttaatcattctggaagcacttaaatactgaaaattgtcattaaatacactaattttctctaaactgccggatgaagaactggtcaaaggaacaaaaccacctgtaagattgttcttctctggtttgaacttccaataatgattttcgttttgttcagttgtgattgaaaactcaattgtatcatttcctgcatattggtaaatggcatcttcgaaattgcctatataagagtatggtttattaagctgcaaacctttttgcaaaacattgttctcatgcgactgccttaaaagtaataaggcctgaaacactgaggactttccaactccattaattccagaaagtatattcaaatttttcaattccaaagacgtatcggaatgagctttgaaattctttatcgctaaactctttatcatgttacttgtcaattgtttcgtttacaattctttcaatttcactaaatcgtgtatacacgctttccttttgtccagtaccggaagatagagaatattcaaatcgaagatcattattaatttcaatgaatttatcttttaatatttcacctttttcaataagcttttgtacctgagcatctgttaatctgctaaatgcaacactaaaagattcaaacaatgctttattcagtggttttcttctgtctcctctatctttgcgctttcgaaaagcatcaattccaaaaattgcaatggatgtattcattgccttaatgaaatcgcccttcatttttattctactttcagcatttgtttgattttttatggccttcataccttttgtcatgaaactgtccaaatcagaatcatatttctgataaggagtaaggtaaaatgaaacgaagcgagttatgaaatctctatcttccattctatctgtcctaatgacccaacaagttgcttctttgaatacttcttccgcagcaagttctgctataaagtcagaagcaactccttgattcaaagcatggcgaatttcctgagctgtcagtactaatcctccagtgttaatgcgcttaaaaatattgaacttcacctcatctggcgtacctttctcaacaacgtataccgttagtggcgttgttttaattcttctatgaagttcccttggtaattggtcgtaacttaagtcattaaactgtcctaaaaattcgagatcttgtaagacgagtgtttttttaactacaaaatttcttatcgcacttgttctttgtaacccatcaattacttgccatttgtcatcttcgctttcatcaaagtaaaaagctggcaacggcaatcgtaaaagaattgattcaattaaaccgcattgttgtttttcactccataaatcttctttgcgttgaaatccagtgaagaaatttatttcccggtgttcgattctgtctataagttctcctaatgtatatggatctcttctaatacggatcaaatttggatcaaagggaacttttattggaacattactctcgtctgactcttcgactttttttgcagtattatcaattgcaatttcttcattttcattattattttgttccacagcaggatattccacttgtgttaaattttcaccgctaacaactgttgcatactttgtatctccagtatttctatattgttgagcattagaaaattcaatgaaagtgtatttattttcagcttctaacaaaattgaattatttgtaaattcaaaaaagcctaccttttgggtgccatctttaaagatcaacttggtaggtttaaattttggagcataaaccgatggaaaaaccgggtcgatactttttgctatttcgtcttttgtcaccttctgaactatttatattgtttaaagtctatcctattatgattttttctacgtatggcggcttcgttgcgccttaatggcggctttggcggctttatggcggcttagcaaatattcagttcccttgcctgttttacccatctgttcaaggatagtcctgtttaccaaatctgtcaaatcgcgtgttgccgttctttctgaggtgtctgctatttttttatacagcgcattagtaattttgcccttttctttcatatacagaatcgctttcatctgacgctcatttaatcctaatttatatagagcatcttcagtataactatcttgcctgaatgtaacaaggatacctcccccatcctcttcatacaaaggttccggcaatccggccttcttacattcctccatcattttaactgttccatgaccccatgattcaatataagaagctttgtaaaacacatctgcaataagctcgtttctcggatatgacgaatgctttttacggagtttagcaatagtaagcttacggcttagctccccattgttccatagtgtaagctgatccgggtatatcttcaactgtgtatgaaattgcgaataatcccggtgaactattgcgtttacaatagcctcccgtaaagcaggttctgggtactcaagattttcttcccgacgtaaagagcgaattttgatgttagtctgaagatatttctttttcaagacttccatagcgccttctacctgttgaaataagttgccatatatctcgtccatgctgagaagcgtagcttcatccttaaaacggccaatcttaatgtaagaactgatatagaactggcggggatccttcccaaatagtaaaattgcggcacgggtgggttttcccttatttaaaagatgtagtttgccaagaagacctgaaagcgatttttccctagccgcagccgggaatctttttatcgccagttctttgaattcggaaattgtttcaggatctatgtcctttaaagttgctcgttcttccggcaatgcatcccaagttaggccacttttatctaacaaaaagttgtggagcccggctccattcaactcctgagtggtacttccggaacggatataatatttaccacgatatgaaattggggtttcataaggttttacccgaatcagaatatattctttcccaacttctttcttaagactaacattcgcaacgaatcccaaaagatcaacgattttgtttgggatgtcttccattagttttttagccccgtcaagacccgctattttgccctggtcatttttaccaatgaaaagttgtccgccatgagtattggcaaaagcacagacagtcttcaggaattcatctctccagttttgtttgaactctgtattttggctttctttattcattcttcatacaaaataagacaaaaggaatcatttagagcgtattctctggaagaaaagagcgaaaaaatcaattaattgaatagggacatttttatggccagccattgggataaaaagtgaaccccaccgaagcggggttcaaggttctcaccttcggcatatagccttattgtgataagataaaaagagggataagctcttaattctacatcaaatatatgaatttttataaactcatggaaattactactttggttcatctgaatattaaatcttaatagatatggctaaaatcctcggacttgacctcggcactaattcaatcggctgggctatagttaatcgaaatgacaaccagtttgaactgataaataaaggtgtccatatcttttcggaaggagtaaaaattgaaaaaggaaaggaaagttcaaaggcggctgagcgaaccaaatacagaagcgcaagaaggactaaattcagaagaaaacttcgtaaaatagaaacacttggcgttttaattaaacataatatgtgtcccctatctcctgaagaattacaagggtggcgaataaataaaaaagcatacccgaaaaatcaggaattcttaaaatggttaaaaactgacgaagccacgaatgccaatccatatttttttagagacaaagctagcagagaaaaaatagcacttaaagatttggggcgggcattttaccacatttcacagcgtagaggatttctgagtaaccgtcttgatcagggagacgatggactcatggatcaaataagaaaggaattactggatattgtgggcggcgaaaccgaccgggatgaactaaatgcttcaataaaatttattttggaatcttatgccgatgaagacgataaagtagtaaacaaattcctgaattcatttgagaaaaatagaaagacaaatgagctaaaacccgttgaagaacttaaagagttattaattaaatttctgaacaggacagaaaatctcggaaaagttaaaaagggaattgctgtattgtcccaaaaaatggaaaaggaaagctgcgaaacattgggccaatatttttatacgtgctataaaaagaatgaaaaaatacggatccagtatactgaccgtgaagaacattacttaaaagagtttgaaatcatttgtgaagtccaaaaactagcattacctgtcaggaaggaattagaaaacgcgattttctatcagcggcccctaaaatctcaaagaggacttgtaggaaaatgttcatttgagaaaaataaacctcgttgtcccatttctcatccatcatatgaagaattccgggcattgcaatttataaatagtattagatgcaatggggaccctttaaataaagaacaacgtaaagacatttggcatctgtttgttagaaaaagtaagcccaatttcgattttatggaaataagaaaggatcttaccccaaaaggcattgagttgaaatttaattacagtgatagaaccaatgtcagtggatgccctactattgctcaattatcacagaaaaatactttcggtgagcactggaaggaaagcatatatgaaaagtacattgctaagaaaacaaaaattggtataaaaagcactgatgatgttataaatgatatttggcatgtacttttttcatttgataaagatgagaaactggaagtgtttggcaagaataaactggggctaaatacccaacaagcaaggaaattcagtaaaataactttgaaaaaggaatattccagtttaagcctaaaggcgattacaaaaattttaccttatctcagagaaggacttatttattcctacgctgtttttcttgccaatattgagaaagttataggcaacgaaatatggagcgatattgaaaatcaaaaattcattcgaagtgaattaaacaatctgattgaaaattacaacgaaatcaggaaacgcgaaagtgtcgtcaatgatctgatggctcatttcaaaaaagactataataatgcggattctgattacgttttagataaaaaagacaaatcggaagtgatagaaaaaatacaggcggtctatggaaaaaagcattttggctcgatagaggttaatcaacaggctgaattagttatttgggttgaaacaaaatatcaagaacagttaagaaagaacaggggcgaatttataagaactgatcgactcgatgaaaaaattgcttcgtttcttcaggataatttcaacgtatcaaacgaatcacttgaaaagctctatcacccatctgacattgacgttttcaaggaagccaagatttcagaggatggtaaatactatttaaatagtcctatgatcccgtcaattaaaaatccgatggcaatgagaaccatgcaccagctccggaaattggtaaatactttaataaatgaaggtgaaatagaaaaagaaacgaaaattcatattgaattagcgagagagcttaatgatgcaaacaagcgcaaagcaatacaggattggcagaaagaccggcaagaggaaagagaaaatgcgaaatcagaaattataaaactatataaggaacaatgtggaaaagatattgagcccagtcaagacgatattttaaaatacatcctgtgggaagaacaagatcacaaatgcttatataccgataacccatccaactccattgggatttgtgactttattgggccaaatccaaaatatgatttagaacataccatacccaaaagcctgagttttgataattctcaggaaaatcttaccctttgtgaagttagcttcaacagggaaataaagcgcaataagatacctgctgaattgccaaatcacagcaatatacttgaacgcctggtaaaatgggaacaaaaaacatctgagtatgaaaaattattcaattcaagaaaaagagcacgcggaattgaagcaaaagaacaaaaagataaacgtatcagggaaaaacattattacaaactgtaccttgattattggaagggaaaatacagccggtttattaggaaagacgttcccgaagggtttaaaaacagtcaactggtagataccggaatcatcaccaaatacgctcgcgcatatcttaaatcagtgttttttcaggtctattctgtcaaaggcggtatggttaaagaattcagagagttatggggattacaggaagcttacagcaaaaaggagagagcaaaccatattcatcattgtattgatgctattaccattgcctgtatgaccaaagacaaatatgatttgctatctaaactataccacgctgacgaagaaggttatcaaaaggagaaaaaggagatgttgcaaatcattaagccttggacgactttcaccgaagatataaaagcaattgaaaaacaagttttggtttcgcatcacaccccggataatgtgaaaaaacaagcgaagaaaaagtcaaggattcgaggtaaaattgaatatggtaaagacgaaaagccaatttatcagaaaggtgatacggtccggggatctttgcacaaagaaacattttatggtgctataataaagccttatcaaaaagaggatttaacacctaaatatgtgattagaatgaaaattgaagacttgaaggcttcagacgtgaaaaacattgtagaccctgttattcagagaattattcaggaagcggttgatggaaaaggcttaattcaggcagttaaagacggcttatttatggcaagtggtgtttcgatcaaaaaagttcgttgttacgctcccacagttgcttcaccgattttcctcaaaccacatagggataagtcaaaatacgaacacaaaaggaactatcatgtaatgaatgatggaaactatttaatggcaatttacgagggtaaaaatatattatctggtaaaatagtcagagatttcgaaattattaatatgcttgaagctggggagcaattaaaattttcaaatcgaaatcttaatgctttggtgaaaccatccaaaaggtccggtaagggtaaaaatgaaatcgaaatttttctaaaggctacaatcagaaaaggaactatggttttattttacaaaaaaaatccggaagaaatatgggaattgacaaatgaagaaagagtgcaaaggctttataaagttcaaaaatttgatgatcgtccgtggatcacactccgttttcatcaggaggcaagaggagataaagaaataaaagatgaaattaattcagaaaatcttattggatcaccgcagttagcaattggattgggtaaatttaatgtattagttgagggttatcatttcactcttacccatactggaaaaatcgaaacaataaaatcgcatgctcaaacgaacactgttatttagtaacccttatcacatcagcaccaagctgaaacaattagtgatagctgataaaaatacaggggaaataaaacaagcggttattgaggatttaggttttgtggtatttgaccaccgagaaataacttttacgcaaagcgtaatgcaattgctcgctgaaaacaacgtcgctgtaattttctgcgatgaaagacatcatcctggtagcatgttatttcatcttgacactaaccaggttcaaaacgaaaggttccgtgctcaagttgcagcaagcgagccgttaaaaaaacagttgtggcagcagaccgtaaaagctaaaattcgaaaccaagccgcaatgttgaagcacattgggcaggaatacgaggatttaatttatttatcgaaacaggtaaaaagcggcgatattgataacgcagaagcccaagccagcaggagatattggccaaagctatttggcagtaatttcttaagggatcgcttcggaatgccaccaaatccatcgctgaattacggctattcaattttgagagctgccactgcccgtgctttgtgtggatcaggattattgccaacactcggaattcatcatcacaacaaatacaatgcctattgccttgcagatgatattatggaaccttatcggccttttgttgatctcttagtttttgaacaaaagacggccaacgatgattaccataacattacaacagaaagaaaagcggaatttctaaaattgctggccagtgatgtgattattccttctggtcaaaataatacgagtccattgatggttgctttaagtcaaagtacggcatctttagcaaagtgctttgaaggagaagatgaaaaaattaaatatccggaattgccatttttataaaacatggagcttgaacggctaaatgcttatcgtgtcatgtggctttttgtattttttgatctgcctacggaaacccaaaaagaacggaaggcagcccaccgttttcgaaaggacttgctgaaagatgggtttcgcatgatgcaattcagtgtatacattcgccacagcgcaagtggagaaaacgctgacgttcatactaagcgagtacaaaaacttcttcctgaaaaagggcaggtaagtattgttcggattacagataaacaatatagcgatatcatcaatttttggggtaaaaaaatagccgaactttcagcttcaccgcaacaattggagcttttttaatcgattttaaaccaaaaaaatgcggaagaagtacaaaaaagacctcaaccgcacttattttttaatgacatcaaatgtttgtaagtggctgaacattagaagaatctgtcatcaactaatgtcatttatccctctctgaaatcaaaccacaactcattacaaaatcaactggtaacagcacaaatgtcatttatccctctctgaaatcaaaccacaactgcaaccagcaagctcggtatcaacatcgcaatgtcatttatccctctctgaaatcaaaccacaacttgtccatctcattttatttaaattccggaaatgtcatttatccctctctgaaatcaaaccacaactaatactggacttattcctaggtattttttaatgtcatttatccctctctgaaatcaaaccacaaccgcgggacgtttgaataccgcactaaataaaatgtcatttatccttcctgaaaccaaaccgcaacttcagttaggaatagccctgcttaaagggtcgtggggtttattaccaaatgtcaaggaacatgaaccaaaaactacaaaattcaaaactaaaaaatgtcgactcaacatagcaataatgtgaatttattaaattttattgagccagcatacgataaattgcagcagaatgagtgctaatttatgccatggattaactataataaaaatgactctaactcaaaatcgtcatatatctaaaaccgtcccgtctgccaaattcgtttaccgtaacgatcttttaatccttcgcaagtcctgttatagaccacttccgtagtctgtcgctggtgtccatgctactgtaattcgatcatgtgtctgccaattcccagtccatcttataggtataaaagcagaagactcgccctgggacgctgttccaatgggtagcgtggcgagtactgttgaaacaaatgtaacacaaaaatcttatgtattatataccttattcagatcaggccgtttcagttcgctttttacacaattcatttcgcatcattcaaatctattgatttatactgctgatactctgcatctgtcagattttcttttaaatattcctccaaaccaatatcctttaattccagctgaaatcttttaaaactcagaacccctttactcttttcaaaacctagtttttcaaaatgagattttaatggattttttaatccggaaagccacatgttaaatagttcctgcgtaggttcaagtttatgggtgaaataataatcactcataagatttataatacgctgttgtaacatttcgcgctgttttatgcaggtgatttatcctttttcagaaatttgatgccctgcatttcgtgtttaaattagtcattttacgcaatatggacaccaggatcctctcattataaccgttggtacagccttccatttatgaccattttcgcattgccataaaagctttgtgtaattgttaatatactgctttgacaaacattttccgtttttgactaatgacaactcctgcatttcttgaatcgtctttctacgactatcgacataacattccggacaccaagatccctttataatagttgtcggggaagaatcccatttgtgaccattttcgcattgccattgaagatgcgtttccctatccacatatttttgagataaacacctaccaccttttgaataagcaatttcttgcatttgttcaatcgtgcctctggaccaatctttagcacaaaccggacaccaggatccttgctttatatcattgggaatcgcttcccatttatgacccttttcacatcgccaaagaagatgagtgctgttattaatatatactttcgataagcatttgccgcctttaacctgagcaagggattgcatttcctcgattgttccttttacatttcctgaacatttcgagcaccatttacctgccttaattccatgaggagtggctttccatttgtgaccattttcacactcccaattaagatgagtatggttgtttatgtattttttggataagcacttccctcctttggactgggctattttctgcaattcttcaatattgcctttcctgctttctttggcgcataccgggcaccaggaaccttgtttaatttcattaggaaccgcctcccagatatgaccctctttgcattgccaaagaagatgagtgctactgtttatatactcttttgataaacattttccgccgtgatctttagctatctggaacatctcctcaattgttccctttttccttcctgaacagaccggacaccaggatccctgcttgatggttgaaggaaccgcctcccaggtatgacccttttcacatcgccataacagatgagtcctagcgtttacgtactttttagacagacagacacccccattgagagcggccattgatctcatctcttctaaatacaatacgtcctttttatcctccgttttcattctcttttggtacgccttcaactaaataggcctgcttacgttttagctctatgcccagtaaaattcaatccactgatcttttaacatataggacaccagtgcccttttttgatggttttaggtgctgtactccatacatgaccctttgcacattgccaatcaagtctagtggtattatttacatatacttttgataagcaatgtccggctttggccttagccatttttcgcatctcttgaattgttccttttttcacacccgcgcaagcagcacaccatgaaccaaagctgacccctgctggagtagcttgccatacgtgcccctggtcacatttccatttaagatttgtaagagcatcaacatatttttttgacaaacattcccctcccctactatgagccagcttttgcatttcttcaatgctctttttgacaactccggcgcagaccggacaccatgttccatttttaacattgccaggcacagcactccatttatgacccttcccgcattgccaactgagattttccttaccgtttgtatattcatttgataaacatctaccgcctctgcttaaagctaattgctgcatctgctcaattgttcctggcttttggcctgcacattccggacaccaaaaaccttttttgactaccgcaggctctgtttcccatttatgaccttctgcacactgccagagtaagtgagtatgagtatttatatattctttcgataagcatcgtccacctttggccaaagctagcttttgcatttgctgaattgtccccttgctcagtccggcgcattccgggcaccaggatccttgtttaatcgaatttggaactgctttccatttatgcccctcagcacattgccaaagaagatgagtggaatcgtttacatattccttggacaaacaattgccaactttcttctgggccaatcgctgcatttcatcaattgtgggcttatatttatttctggcgcaaacaggacaccaggtgcctcgttttatttcaccaggcgcagcttcccaaacatgacctttttggcagcgccaaagaagatgcgttttactgtttatataatgctgggaaaggcactttcccccttgaatacctgctatttcttgcagatcctttaagaatattaaacctttcaaatctttagtttccatatgaactaaaatttttgcaaaacacctggtttaaaattcctttccacagatagccgaccaatcttcccaagcggtagcgacacagcgtaaaagatgaatacttaatttttcacaagtggcctgtatttcatctctcacctgttccgtggtttttgtcggatggtacaaggtagtactcggaaaataaattactttacacgcatctccggaaatgtggtctttatatcctaacgtaagcattgaattttttaattccagatccttttctgctacgtcgtaggtaactattgaagccactataatttattttaatgttcgcccaatacatttgcagtattgactagagccatgtgtaataaaaggtatcaatggggtaaaggcatatcattagaaattgtaccaagcaaatacgaaatagccttcagccttgttattaaatcttccgagttaacttcgtttcgtctaatttgtcctaaaatatgctctaaatatacgttctgctgacctattcgtttaacgatgtccttgtaaaattccggtgcttctgcttcatttttattaactaaaacagtgttttcaatgcttttaacctgggaatttatggaagtggcccaccgaaaaatagtagaagaaacatcattatctacaagaagaattaattctattgtgttttcaataagttttacccgcggaaagcgaatttcgaaatctttgttcattgtaattagatctattcaattctttgagcgattgggcattttattgatccataagagcagaatacacaatgattcccctcaattgctgaaatcgtttcgttgcaatatctgcaatcttgtgccatttttcgtcccttttcaggcattgtagcctgctgctccctcccgcaatggggacattttaatatagtaacaagaatcacgtctttgaaaccaccatgcgccacgttctccataaggataaaattaagcaaaaacagcaaatcacaatcttatggtccattaagtatttaaatcattgtttactttgcagtatatgataagaatgctcatattcctcgataggatgattgtatcttaaggaacttctttcaaattgacatccagatccaagatttaagcgcgtttatagaaccaagtacatcggcatcagatggtagagaaaacgctctcacaaataatctgaaagaaagattagagattcaattaatttcagaagaaagaattccatttgaattatttaaccctttagtgaatcctgattggacttttaattgtttacttttgaaaatcaatattattttaataaattttcaatcttaaaaataataaagtatgaaaattttgttaattggcgcaaccggaggcacaggcaaggaaatactaacccgtttgcttgcggcgggacatactgtgacagcactggtgcgcaggcctgaggtcatcccaaccaaacatgagcatctggttctaattcaaggcgatgtactcaactccgaactggtaaaccgtgctgtacagggacaagatgcagtgataagcgctttcggacctcgctcattgaaaaaaaagtgatatccaggaagtgatgatgcgtaacctggttgtggcgatgacaaaatgcggtgtaaggcgtttggtcaatctctcagcctggggcgcgaatgaaaaacataaacccttcggcctaatacagaagattctcctatgggttttcttgcgcaatgtctttgaagacaagaagcgcggtgagaaactactttttgcatcagatttggattacgttaacgtatgtccaggtcgcttgctaaataaacctgctcgcgggggcataaaagcatcgattgatggaacaggaattaaccctagtattgcacgtgctgatgtggcccagtggatggtggaacaactcaccagcgacacttgggtgcgcaagtctcccgtcattggttaatagacatctgacaaattgtttcatttttcagataatcctttcataatcttctcatttcttatctgatgtttgccatctaagaaatcaaaaaaacctctcaatattttttttaattcctccttagaaataaatttctcttctatctttttaatttcaccataaaacatggaccttaccatcgcaattgttatctgatctatgtctataatcaaattgctgaataggaaattaataaattgatgaacaatgtcacctgaagaagccaacgaaccatcagatttaatatgcaaaagataatctttgtattcttcaaggtagccgagcattttatcatggaagtgttttgctggccagcaatttgtttggtcttcagttaattccctttcagcgccaattgactctccttccttaacattccaaacaagcattgaaattttcacatcaaaccattcgcaaaacaactcatacgttttttctctaggccgaagcattaggtcattggtccaattatcaagttccctttcaaataatctaacagcaatatgtggaaggtctatttcaatctcatcgctttccaccagttcatcgaacatataaactgacggaagcattttatcaattgtgaataccttgtcttcaacattctcaatgtgttccgcgaggtcatctgaaataaagttaagccaatcagcgaaaggttgtttatgggttaaaataatggcgtattggtctgtaacgttaaatttgatgttcggggtcatcagtaattttaattgagttgtaggatgtgaagatagtgacacctatgaaaatgacttctccaaatggacctaaaaaggtataataagacataaatttcgtcattttcaggttttacgatctggcaaattggattggcccactgaaaagcccttaactggttgatccatccagattgattctaagtagaattcttgctgttttccttgttttaaattagttcctggcgatttttccctttccaagtgagtaaccgcccttcaattttatccaggtgagctgtaatgatccaaaatcgtttcgattttattctaaatttgatgtacccaaaaacctatcccatgaaaaagtccaagaaaaaaccagccaaagcaaaaaagaagcctgttaaaaaggcaaatagcaaaaaatctactcctgtaaaagctaaaaagaagtcggcaaagaaatcagctcctgttgccaaaaagaaaacggccaggacagctactgctgtcttgaaaaataaatccgtaaaaaaggtaattgcaaagaagcctatcacaaaggctatcgacaaaaagctaacagccaaaaagccatcgccaaaagttaagtcaactccacggcctcaactcaatatggattttgatactgttcaggctcctgaaacagttacctctttaccagaagacgggccctttatggacagcctgggagaagatttaatgaacgaagccattgaggacacagaggataatatggaacgtgatgcagacgatgagattcagggggaagataaaaatgacaattaatgacatggacaattgatttattcaattcttcgctctgtttctgctcatgttggtcacggggatattgaactattcaaaactcatttacaatgaacacgcaaattcaagaagtatataaaacctcaaagagttatccagaacttgtttccaagcttatagcaataggaatcgagtcatatacggtgaatgttgccacaagcacaatcttttaccggctatcagatggtaaaaccgttttacatccaggcaatattgctccaagaaatataaatccgcagtttagtaaggcagatacaattcaggccattagggacaatcagcagaagaaaacagactatccaacctttatgaacgatattgccttggcaggagttcatttttatgaagctactctgataggcgacagaaagcgtgtaacttatatcggatcaggcggacattatgaagaaatgcttccagctattcaatgagaatttggtccattcatccaaaatacctagataccaaaggattggttgcattgtggcgagaagctcttttggcaaagcatgtattggagggtaaaacaaaaggatataaaaaccatccgcaacttgacagattcaaaaaggcaaacagacctgttgatgccataaatcagtacctttctgaaatccatattgaagctacttacagaaagtataattttaataacggaaaaatagattggcattttaaaccaacccagctcaccgtaaccgagggacaacttgcttacgaggtgcagcacctgttaaaaaaactgaaaataagagatccaaaaaaacattcagaaatagcggtaaataaaaaattcaaaagtcatcctcttttcaaaatagttacaggagaaattgagcagtgggaagtgatttaactccgtccaataattttgacactaaccacgatatattaaagccggcaattgagagcagggattattattacataaaaaatattgtatcaaaatgagttagaatcccaatatcagtcaaaggtttcgcaggagattgatttagcctattgcaaaatccactatgaaaagcccattgtttattttattttcaaagaaggcactgaattgggtttcccagaaatgcgtgagtgtagagcaaatgctgaaaaactaagtggggggaaaccatacttcactttttctgacgtgaggcagaatgtaaatatgaccaaggaagggcgaaaagttgcatcagatgagaaggaagctcctttgcatagaggcaacgtggctcttgtaaatagttcacctttaaagcatgtcgccaattttttagccaatttcagtcaagctaaatatcccttcaaagcgttcactgaaaaggagaaagcaattgattggcttttgaaattacctttggataaatagttagtaaaactacattaaattaaatcgagtaggaagatagaagatagccattaatttggccatctgtcgcagcttatcgcaattaagaaaatacgatagtcatagtatttaccgcctatatccccagcaatccgccggacaaatcccacgaaccatagttatttttcgttttgctatgccttctgatattatcccttcttctttcgtggcttaccttttgaagct

SEQ ID NO: 1595 - DNA, 24074 bp, synthetic construct
  source 1..24074: mol_type = other DNA
  misc_feature 1..24074: note = Synthetic
aatccggctaacgaagctatttgtattgcacataaaattgaagagttgatatcatcgggagatactaaaccttcagagattgctgttatatatcgcaatcacaggcaggttgaagatctggtaaattattttgaaaagaaaaatattcgtttcaacatgaaacgaaatgtaaatattctggaacttccttttgtcacaaagatcttgactatacttgagtaccttgccctggaatctaacaaagaatacagtggtgatgaaaagctttttgagattctccattatgagtttttcaaagttccaccaatagatattgcacgattaagcagacaggttgctcaaaagaattttaactggcgtaatgaacgttattccctgcgccgtgctattagcgaagaagggggtacaacacccgatctgttcagtgaggttgaagccagcgaactgaaaaaaataagcaacgtatttgaagagcttattaaaacagcgaataatgttacccttcaagttttatttgaagtggttatccgcgaagcgggaattctgaataccattatgaattcacttgataaggtttggttaatggaagttgttacttgcctattcaaatttattaaatctgaaacacataagaatccggagataaccttgcagaggctactcgacatgatcaaaaccatgaagaataacaatatcaggctgaatcttgaaaaggtttccgcctctgctgatggtgtaaaccttgttactgctcatagttcaaagggtactgaatttgaatatgtgtttttgataggatgtaataaaggcatttgggatgataaaaaatcctcaggccactttgagtttaccatgcccgataatctttcatcaactcaatatgtggttgatgagttggaagaagccaggaggttattttatgtgggtatgacccgggccaaaactcatcttgctatttcatattccttaatggataattcaagtaaggtattggaacgttcggcatttgtgggggagattattgaaggcactggaataatggagcaaaaagagtttgccgatgagaacacagtttccgagtatctccaattacaattcactgccaaagcaattcccgaaattgaattgatagataaaagctacattgataaaattcttgaaaactattctctgagtgttaccaacctgaacaattacctggagtgccctataaagttctattacatgaacattataaggattcctgctgccatgagtgaatccatggcttttggtagtgccgtccattcaactttacaggttttgtttgaaaaaatgaaaactgacggaaacttatttccatcaaaagaagtaatgctttcagacttcgaccgttttatggaaagaaaccttgaattatttaccaaagaccaatacaacaggagaaaggaatacgggcacaagatacttccaccctattatgatttttatataaacaaatggaataaaatagtaaaccttgaggttaacattcgcaatgtggaagtggaaggtgttcccttgaatggtaagttagataagttggagttcgatggaaagaaagtgaacattgtagattataagacgggccgctatgacaatgcaaaaaagaaattaaaaccgccttcagagaacgataaagttggtggagattattggagacaggcggtattttataagatacttttggataatgaaaaatataataactggaatgctgtaagctcggaatttgattttgtagagcctgtaaaaaaggatgaatataaaaccgaaaaaattgtaattacccaagaggatattgcaattgttctatcacagataacagatacatggcaaaaaatacaaaaccatgaatttagcaagggctgtggcaaagatgactgccactggtgcaattttgtaaaggaaaatcacaagcatgtggctttgcatgagattacagaagaagattagaaccttagactcctaaaatctttctatttttacgcttcttttaaaattggctctgtagtacaacgaccgcccggaaaaaatgttcggacagggatagtatggaggtttaaattttaaggtaattttggcagattaaaaacaaattggctctgtagtacaacggatagtatggaagtttccggaacttctgatctaggttcgattcctagcggggccaccacttttggataagttaaattcatttccggtattccgaccttatttcggcttacaacctgcatcctttctaatatccataaaaaggaagaattgaatctgggggttcgacagatattatttttcttgttatagctgattccttcaggaaacattaggttttgcagcttttttctttcaccataccccatatcatcccacattttaggcagattcacggagtaatcaattattgtaccagtaaaacatatagaccatatattcttgatagtaatgccgctgcgattgaacgttttaatgttcagaatttcagtcactctgttaagaagcataattggggactaccatgggagaaaaaaatcgattacctgtcacttgacgcagaattttggaactattccaactgctgggatttgttccatacgtggcacatgccgatgcttaaggcaatgtacgaagcatcgcatgaatgtgctgaaggagacttgcgggttgaagattatatatatgaacctttgaattattataataccagtttaaatgttaatgactcgatagacttgatgatggcagattccatttctctttacactgaccgaattctaaattctgtttattcccaatatgaaaatgtaacttacaacgaggcagatttcatcatggcatatccgcattttgggaacaatgtaaataagaatatggaaatatggcccactttttctgccgaagattgttcaagccactgctcccgtcatttttgctactatgctggcgatgatttttctgggcatagtctttgttatgccaacaaattcgacacggccgattggtgcgaagggttatattatgacagccttgtctttagtgaaaagtaccaagagtttacctccagtattgcaaatcctaccccgatgggtgcagatacaaattttgaaattttgggttcagcctggtacgactatttgtcaattcgcacacaggatatattatttgatacgcttaccagtggtacgcataaaggttataaacgtttttatgttaccctgcctcacgatgttcaatggttctacccaagtgtaatgccaccccgacctttttacattacggcaaccgtgcatggaggtgtaccaagttatcactatatatggtacgacatggatagccgtgcagtgcttcaaagcgacactactagaagtttaaaaattacttggtcgccaacctatcctcacagaattaaagtattggctgtagatggtaacgattcaacagcggttgactatataaatatttacccaatatgccaacagcccccattggaaactcccgttcatcacaataaaccaaaaacggtccagccccttgccgaaggtaaagtaaaagtatatccaaatcctaataaaggcacgttcaatatttcaatgcaaaatataaatgaaaatgcttatgtggaaatatataacgcattgggacaaaaagtgcttacggaagttcttgtgccatcagaaataaacgcagtaagtcttagtaatcacccatgtgggatttatttttacagaataataaaagaaaatggaaatttaattaaagcgggtaagattgtagtagagcaatagaaagcaaaatttatcttatatttgaaatgtaaagtaagcctgttatgaggaaaaggattgcatgtgtttttttctttgcatcattttttacggcattaccggcaattgcccaatattccgtcctccttaatttcgacagtttaaatggtcagtatcctaatgggaatttattactttcaggcggtaaattttatggcatgacctatcatggaggattacaaagtggcggagttgtgttttcagtagatacgggcggaaccaactataaggacttacttgatttcaatggatttaatgggtctgatcccaaaggttcgctcattagggtcggcaatagattatatggcatgacttcaggcggggggttacatgattcaggtgtcgtattttcaatagatacagatggcactggatataaaaaactacacgactttggaggcaaaaaaggcggtgtaccttatggttctttggtgtgtggtggaaataaactgtttggtatgacctatgaaggtggctactatacttatggttgtgttttttcactcgacacagatgggactggatataaagatatgttcgacttttatcattcaactggtcagcaacctcaaggctcattaatcctttcaggaagtttcctttttggaatgacatcagatgggggcaccgggtcgggtaatatctttaaaattgatacaagcggtaataattacaaggatatttttgatttcaataacgttaatggtgccgctccttttggttcccttcttctttcagggacaaaattttttggaatgacttttgatggtgggatacatgcctacggtgatatattttctgtagatacgagtgggaaagactttaaagatttattggattttgatataacaaatggcaaaacaccttggggcgatgtatccttaattggaggaacattatatggaatgactgaaattgggggtttgtatgattatggggtgcttttttcaatagataccgacggcactggatttgtagacttgcatgatttcaatattcctgacggggcgaacccttttggctcacttacaatctctggaaataatttatacgggatgacagattatgggggaaccgataccgatggtgtagtatttcgctatagtattattccaactggagtaaataattcggttgaaatttccaagaatgtaaatgtttacccaaacccaacaaatggacaaattacttttcaatttccaaaaccgactgatggtattattgaaatttataatgtaacaggtcagaaagtatatcaatcaaaaataagttctgaaaatgcagaaatagatttaggaaaccaagttgttggaattaatttttacagaattattgatgaaaaaagcaagttgattggcgaagggaaagtggtggttgagaaataatttgtcatgcgtaaaaagagcatatttattttttcttttttgctatttttcaccgctttacggacagatgcccaatactccgtattgcttaattttgatagtttaaatggtcaataccctaatgggaatttattgctttctagcggtaaattttatggcatgacctatcacggaggcactcaaaaaggcgggcttgtgttttcagtagatacagatggaactaactataaggatttactaaattttaacggacttaacggtgctgaccctaaaggttcattaattatagtcggcaaaaggttatatggcatgactttgggcggggggctgcatgattcgggagttatatttgcgatagatacagatggtacaaggtttaaaaaattgttcgactttggcggcacaaaaggcgggttgcctgacggctctctggtttgtgcaggaaaaagactgtttggaatgacttattatgggggaacgggctatggcgttgctttttcaatagatactgatggaaccaggtataaagatatgattgacttttatcatacaacaggtcagaatccttatggctcattcattctttctggaagcatgcttttcggaatgacggtggacggaggaacggggtcaggtaatatatttagaattgatactgcaggaaacaattacaaagacatatttaatttcaacctcaataatggtggatctccttttggttctcttcttctttcggggagtaagttttttggaatgacttggggcggtggcatacatcgttacggaaatatattttccttagataccgacggaaacaatattaaggatttattagattttgatggtactaacggtgcttcgccttggggtagtgatgtatccttaataggaggaacgctatatggcatgacggaattaggtggagcttatgtgagttatggtgttcttttttcaatagatacaagtggtaataattatgttattctgcatgacttcaatgttccagatggggcaaacccttttggttcacttacaatctctggacataacctttatggaatgaccgattatggaggaaccaatactgatggagttatatttcgatatagtattattccgacttcagtccctaattcggtgcaaataaccaataaagtaagtgtatatcccaaccctacagatgggcagattacatttcagttatctataagtgacagcccttggtctttggagattattgatataactggaaggtcattattaaaagaaagattcaccgaatcttttgcaactattaattgttctgcatttctcaatgggatttatttttatagagtttttaaggatacgggtgaattatgtggaaatggtaaattgattattgaaaaataataaatttgtttatcagattgtactatatcatgacaactaccaatggataagccctgccataagcggggcttatgtgtttctataccatttatataatgccactattaatttgtcttgttatctttgccttgaatctcaaaaaaataaaactattgattaactaaagacatataaaaatttgcgtttagcaaaacaatcctgtatctgaaaattagacagttcaagtacacagggaggtttggcaaaacgctcacgcaaggcgtgggcgttgccttactctgtgtacagggtgtctaatccctcagatacgagtaatggcaattagctcacgctgattttttgtgcccaacacaaaaagcgatgaatgaaataacaaaagaacgttcaattaataaagtaggtgaactcgttacccgatttggtgaacaatatgattcttataaaagttctgcatataatgaaactcttactcgcagggatttcattgacccattcttcaaagccttgggatgggatattgataatgaatcaggctatgcagagagttacagggaagttattcatgaggatagagtaaaagttggaaatgaaacaaaagcccccgattattcctttaggttggttggcgggaagcggctcttttttgtagaagcaaaaaagccaagtgtacatattaaggacgatattgttccggcatatcaagtacgaaggtatggctggagtgcaaaactacccattagtattataacggattttgaagagttcgctatttacgactgcactaagaagcctcatcctatggataaagcctcaattgcacgaattaaatacctcaattattccgaatacttaaaggactttgattttatatggaatactttcagcaaagaaagagtattgaagggcagtttcgaccaatttgtacaaaacgatacctataaaaaaggaacagccaccgttgataaggaattcttgcaatcgcttgataattggcgcacatatcttgcgacaagtattgccataaagaataaacatcttgatgaggatgaaataaactttgccgttcaacagactattgacaggattatttttttacgcattgccgaggatagaagtattgaaccctacgggaatttaagggattgcattaaacagggtaatttatatgagaacctttatcacttgtttgtaaaagcagatgaaaaatataactcagggctgtttgatttcgataaagataaaattagtcacaatcttgaaattgataataaggttattagaaccataatcaccgagttatattatccgtgcccttatgcctttggtgtattacctgtggagatattgggaactgcttacgaacagtttttaggaaaagtaatccgtattacaccggcgcatcacgctaaaattgaggaaaaacccgctgtcagaaaggcaggaggagtttattatactccccaatacattgtagattacattgtaaaaaataccgtgggcaatcttattgagggcaaaacaccgaaagatgttagcaaaataaagattgttgaccctgcctgtggaagtggtagctttttattaggggcctaccaatgtttgcttgactatcataaaaactattacacggataacggcaaaatttcaaaaggggctaaaggaaacacacttaccccggaaggaaacctgaccacggcagaaaagaagcgcattttgataaacaatatttatggcgtggatattgatattaatgcggttgaggttacaaaactaagtttattactaaagtgtatggaaggtgaaaccgaagccagtattgcaacccaaatgcaattatttcatgagcgtgttttgcctgaccttgataataatattaaaagtgggaacagcttaattgatactgattattatgatagccagcttgattttggagatgaaaagaaaataaaaccattcaattggcaacaggcatttcccgaagtatttaaacagggtggttttgatgctgtaattggaaacccgccatatgttaatttggttgcaattccaaatgaacaaagagaatatttccaaaaacattttaagacttgcaggaacaagagcgatttatattccttttttcttgagaaagcttgttcaattactaaaaaagatgaaggtaagtttgggttcatcgttccccatacatggttagctacggaaagctttgaggttttacgtaaaaaacttttagatgagatgcgaatagaaagtatatcggaaatgggattcaaagtttttgaaaaggtagtagttagtactgttatactaatctgttcctcaaaaaagaaagacataactgtttacaacaaagatttcacaaagcggttttcaatttcagccttgaactggataaatgataattatcatatagatttagaatggagtcccaataaggaattaatttataccaagctcacaaagaataccgttccgcttgaaactatgattcaattttcaaggggaattaaaacgagtgacgacacaaggtttataaataaaattcctaaaaacactgattttaagaaggtttatagaggtagaaatattaaggcttattcattgaattggatgggtgaatatatttggtatagaccagacttgatgaaagaaaaagtaggttgcctgcctcatacaaaagagttttttgaagtgccggaaaaattaattacccaacgagttaatagttccatgcagctattagttgcttatgatgctaataaaaactattttcttgacacaacaaatgtttctcgctatgattcatgggataaggtgcattcaatgaaatatatagcaggtgttttaaactcaaaacttattaattactggtactgcaacaggtttaaaatgccgacaataggtttatatgaacttcattcaattccattcagggtaattaatttcaatagcaatgagaaaaaaagtcatgatgaaatagtgaagaatgttgagacacttttaaaacttaatgaagaaatccatgaagtcaaattacagagtaaaactgagcaaatacaggcacacattgcccattgtaagggtaaaatagaccaaattgtctatgggctttacgggttgaccgaagaagaaataagcacagttgaagaagtcatgaatggagagtacttacacaattaaaagacattcaaaatataacttaatacaaaaaaaataagccccaccgaagcggggctcaaggtaaaaaccttcggcatttagccttattgcggtaagaaaaatcaaagagggattctcttttaagttctttacagggcaaatgtaaaatatttatcaatatgaaataaatttctctacttttattctctaattcttctgtttatgggtaaaatacttggacttgacctcggcactaattcaattgggtgggctgtaatagaaaccgataataaatccttctcattaaaagataaaggggttcatattttttcagagggtgtaaaaattgaaaaggggaaagaatcatcgagggcggcggaaagaacaattttcagaagcgcacggagaatcaagtttaggaggaaactaaggaaaatcagaaccctcaaggttttgattgaaaacaaaatgtgtccactcacaatagatgaattaaatacttggaagcaacataaaaaagcatatccgcaaaaccttgagtttcttaactggttaaaaactgatgaagcgaccaatattaatccttactattttagggataaggctagcaaggaaaaacttccattacttgatttaggacgggcattttatcatttatcccagcgcagaggcttcctaagcaatagacttgaccagggggatgatggattagttgaccaaataagaggcgaattgctacgaagtgttgaatttgatagtgatgcggaggatttgaaaggtgtacttcaaattgcattacagaattattcagaggaggaggataaagcacttaagaaattccttaaaggatttgaaaaggtattgaaagaaagccaattgaagtcaattgaagaaatgaaagttagtctattgaaatttctaaataaaactgaaaatctcggggcggtaaaaaaagggattgcagaattgacaataaaaattaaggatgccggatgcgaaactttaggccagtatttttataaatgctaccgggaaaagcaaaaaatacggacaaaatatacatcacgggaagcacactacctaagtgaattcaacaggatttgtgaagtacaacaattatcagagacgacccgaaaaaaccttgaaaatgcaatattctaccagcggcctttaaaatctcagagggggcttgtagggaaatgttcctttgagaaaaataaaccacgttgtccaatttcacaccctgcctttgaagaatatagggcattgcaatttattaatagcataaaagccacagatgaaaatggtgaaatggttttcctaagtgaagatgaaagggaaaaaatatggcataaatttactcgaaagagcaaacctaattttgattttgaggatattgcaaaggaattaacgtctaaagggaggcaacggaaattcaactataaaaataaccatgcgataagtggatgtcctactattgctcaattaaaaagtgtctttggcgataattggaaagacgtaatttatagcacctacacgaataagcagacaaagaaaggcgcgaaaagtacagatgaagtaattagcgatatatggcacgtactttttacctttgataaggatgaaaaattagaagaatttgcaaaaattaaattggggcttgacgctataaaggcaaagaagttcagtaaaattgttttacgaaaggactatgcaagtcttagtttaaaagccatcaacaaaatccttccttacctccatgaagggttactttattcctatgctgttttccttgccaatattgatatagttatcgggagcgaaatttgggataagcccgaaaatcaaaaaataattcgcaatgagattagaattctggtagataaccataccgaaaacaagaaacgggaaggcattgttaatgatttaattgcgcaattcagggaaaaatacaacaactccgaaagcgactatatacttgatgagcaagacaaaaaagatgtgaaaaacaaaatccttgctgtatatggcaacgtattcttccctgctttacctgccgaggaacaaaatgaaattattagttggattgaaaacaaatatgtcaaacagttacggaaatacagaagtgaatttattaaacctaagaggcttgatgagaagataagtgattttttgcacgataattttaatgtttctcctgctgcccttgaaaagttatatcacccatcggatattgagatatttaaagagccaaaacgtaatgaggatggtaagatttacttgggaagccctgttgtatcttcaattaaaaacccgatggcgatgcgaaccatgcatcagctaagaaaagtagtgaatactctgattaaagaagaagcaatagacgaagaaacaaaaatccatattgaacttgcccgtgaattaaatgatgcaaataaacgcaaagctatacaggattggcaaaaagatagacaaaatgagaggaatgaatacaaagaggacattaaaaagttgtataaagctgaatgcaatttggatattgaaccgtctgaagatgagattttaaaatttcaattatggaaagagcagagcggtatctgtctttataccgggaaatcaattaacatttgcaattttattggtggaaaccctttatttgatattgaacacaccattccaaaaagtttaggtttagataactctcaggaaaatctgacactttgcgatgtgagatttaatagggaagaaaaaaggaataaactgcccagcgaattatcaaatcataatgagatattactcagacttgctaaatgggaaaagaaaattaaggaatatgaggggaaatttaatgcacgaaaaaaggcaaaaggtactgagacaaaagaacaaaaagacaagcggattcgtgaaaagcattactacaaattataccttgactattggaaaggaaaatataaccgatttaatagaactgatgtaccggaagggtttaaaaacagccagttggttgatacgggcattattacaaaatatgcacgggcgtatctaaactctgtattcaataaagtatattctgtcaaaggtagtatgaccgccgaattccgtaaagcatggggattgcaaaatgaatacgaaaaaaaggagcgcattaatcatattcatcactgtattgatgcaattaccattgcttgtatgactaaggacaaatatgatgcccttgcttccgcatggggacaggaggatgaagggaaaaagcaggaagcaaaaaaaatccttgaagaatcaaaaccctgggcaacatttgctcaggatttgaaggcaattgaaaatggggtattgatttcacaccatacccctgatagtatgaaaaaacaggcaaagaaaaaactacgaaaaagaggaaaaatacaatacggtgaagataggaaacctatttatcagcaaggcgatagtgtaagagggtcacttcataaggaaactttctatggcgcaattattaaaccacatcaaaaagatgacctcattcctaaatatgtcgtgagaaagaagatagatagcctgacagcgggagatttgaagaacattgttgaccccgttattcaaagcattatccaaaaggccgttgatgataaaggtttaagtcaagctgtgaaggatgggttctttatggaaagtggtgttccaattaataaagttcgcacatacgcccctactgttacaaagcccattttcctaaaaggacacaaggataggtcacgttttgaatataaacagaactatcatgtcatgaatgatggtaactatctgatggcaatttatgaaggcatggataaaaaggggaaaataattcgtgattttaaaatcgttaatacccttgaatcgggggaaatactcaaactttcaaacaaaccaaatacctctcaattagttaaaccatttatgataaaagggaagggagaaaaacaaattgatatatctcttaaagcaactataaaaaaagggacaatggtattattctataaagattctcccgaagaaatttgggagttagaaaaaacagaattaaacaaaagactgtataaggttcaaaaatttgatgaccgcccttggataacgcttagattccatcaggaatcacgctcagataaagaaattaaagagaatatcagttcagagaatgagattggctcgccgcaacttgcagtaggattagaaaaatttaaagtattagtacaggactatgattttattagcaccccaaccggaaaaattgaaagaataactcgccatgcctaatcgcactcttttctttagcaatccttatcacttgagtataaaacttggacaattggaaattgccaataaagatacaggtgaggtaaaaactgcgcccattgaagatttaggctttgtgatacttgataacagggaaatcacttttactcaaagtgtgttgagtgaattagcagccaataatacggcagtgataatttgcgatactaaacatttgcccgtcagcatgatgtttcatcttgacacgaatcaggtacaaaatgaaaaatttagggcgcaggtaggcgcaagtgaaccattaaaaaagcaaatgtggcaacaaactgtaaaagctaaaataaagaatcaggcggctatgctgaaatatgcagggaaaagtaatgaggcgttattatttattgcgtctcaggttaagagtggcgataccaacaatgaggaagcacaggcagccagaagatattggggcgaattgttcggagttacatttgtacgtgaacgagaaggaatgccgcctaatccatcactaaattatggctatacaattttgagggctgccgttgcccgtgctttatgtggtagcggcctgttacctaccctcggcatttttcatcataataaatataatcactactgccttgccgatgatataatggagccttaccgcccctatgttgacaaagcggtttgggaacaaaaagaaaccattcctgagtaccataatattaccaaagaacgtaaagttgaaataataaaggttcttgatagtgacgtggtaatcaatggtgagaaaagcccaatgttagctgccatttctcaaacaacggcctctgttgccaaatgttttgaaggggaagaaaaacaaataagttatcctattttctcttgataaaaaatggaatatacccgcctgaacgcctaccgtgttatgtggttgtttgtattttttgacttgcctgtcgaaactaaaaaagcccgcaaagcggcaactcaatttcgtaaggaaattatgaaagatggttttaccatgatgcaattcagcgtttacattcgacattgccccagcggtgaaaatgccgaggtacatacgaaacgtgtacaaaaggcaatccctgaaaaagggcaggtgagcatagttcgtataacggacaaacagtatggggaaataataaattattggggacaggaagaaaaacctttagaccccggccctcagcaattggagcttttctgattatgtcttgcgttctttcctcacttttagtagttaaaactgcaatttgtgcaataaaaaaacgggaaagaaaggtgcaaacccatcaatcccgttcatttttaataacactcttttgctctaactcaatgaacattagaagaaaactttatcaactaatgttattcatccctctttgaactcaaaccgcaactacctattgcatagacacactttgtagcataatgttattcatccctctttgaactcaaaccgcaaccataaggtcatcccttccaacgtcatctaaaatgttattcatccctctttgaactcaaaccgcaacttatacaggatcaacataaaggaaaatcaaatgttattcatccctctttgaactcaaaccgcaactgagtagctttgcgcctaatgtagcctcaaaatgttattcatccctctttgaactcaaaccgcaactctggcaaatcaatgataggcagtcgatgaaatgttattcatccctctttgaactcaaaccgcaactttggttactacttacgcagctttacgttcaatgttattcatccctctttgaactcaaaccgcaaccgaagcgttccacatattcgcggcggtggtaatgttattcatccctctttgaactcaaaccgcaaccaccccattgttatgggcttggcttgcaataatgttattcatccctctttgaactcaaaccgcaaccgggtaagaatagttcactaatcaaattcaaatgttattcatccctctttgaactcaaaccgcaacccggtgttgctgttcccggtgtttctgcacaatgttattcatccctctttgaactcaaaccgcaacccactatcggttccgctattcatactgccaaatgttattcatccctctttgaactcaaaccgcaaccaaaccaatcaatacataatttacaagcaaaatgttattcatccctctttgaactcaaaccgcaaccatggcgggtgcttctttcattatttccctaatgttattcatccctctttgaactcaaaccgcaaccctgaaacgtagtacaagtacgagaagttaaatgttattcatccctctttgaactcaaaccgcaaccgcctgctctcgcagtcgaaagtggtttaaggggagggggcgtttggggtttcaaaatttcaatatttcaaagaactcccatgctatttccaatcgttgtaaaattagtgatttttttgtgtacccaactatgaatttattttaaagagagcaaggttgaaaagtctttgttgtagacgagacgaatttaccccttatcggaaactactatctttgaataagtatctgctaaatcctccacaaaatggttcgacaaaatacttatctgttccacaaaagcatttgttatgttttatgcttatgttctgaagagcattaatcatgattatctatataaaggacattgcgaaaaccttcagaaacgattagaacaacataattcaggaatgacagcctcaatcaaaccttatttgactttcaagattatatactttgaggaattcagcacattaggggaagcaattgaaagagagaagtattttaaatcctcagctggtagaaaatatttaaaaactaaattggctctgtagtacaacgcccgcccggatgaaccgttcggacggggatagtatggaagtttccggaacttctgatctaggttccccgccagaatgaatctttcgggctgggattcctagcggggccactctaattcttacgcggatatatgtcagtggctgccggcactattcaaataaaaccgaaaatatttttaacaaccgtgcttttatcagccattacatggagcggaggactagtactcactggaagattactgggtccttactggaaagaagtcgtaaaacaaacaggagtacttcaattcattggaataataatactcctggtaattaccctgttatttgtcggaaaacacgtttctaacaagctattactggcgagagaaagcaaaagagtttaacctgctacggttaatatatttccatttagtgtacaggtatacttccttactccgcttgatgccgggccttgaacaacattgccgctttcatcaaaaattgaaccgtggcatggacatgggaattgagatgaaccatcaaaaattatgtcgcagcctgcatgaggacatacggaatacagtgccacataattgccgcttgcatcacaggctactatagtagtatttacatatacgtagctgcctttcgttttgagtgacttgtattgagtagaactcagatctatcgtaaaattaacgcttggcccgctggctgctgccgatgtgcttgattttccacatgcacttaagagccatgacgctccaacagttccacccgccaataaaagtgatttctgtaaaaaatccctgcggtcaatattgctttttacggtttgtttttctgggttcttttccatacaataaattatgcgtttacacctttagacgatggatatcggcaaatggttgcacacaatatataaaaaacacgttcgttttaccccagataggtctttaatatcttactcctggaatttaccctgagcttacgaatggctttatcttttatctggcggacacgttcgcgggtaatttcataacgctctgcaatttcttccagtgttaatggatgttgcaaaccaataccgtaaaacaaaataacggtgttactttccctttcagaaagtcctgacaaggctctctttatttctatactcaatgaagtagccataagcatactatccggttgaggactgttgtgatcctgcaaaacgtccataagcgtagtatcttcagcatttgagaatggagaatcggtagataaatgtctgtgggtagatgccatcgctatcttcacttcgttttcagacatctccaatatttctgcaatctcagaaggacttgcctcacgttcaagtttttgttctaacaacccacctgcttttttaatacgattaagagctcctactttatttaacggaagccttataacccttgagtttacagctaccgcctgaattatacactggcggatccaccacaccgcataagagatgaatttaaatccccgtgtttcatcaaaacgttttgctgctttaacaagaccaacattcccttcattaattaaatcggaaagacttaatccctgattctggtattgtttggcaacagatacaacaaaccttaagtttgctacaaccaatctgtccaatgcagcctggtctcctgcccttattttttgggcaagaatggtttcttcttctgctgacaccaattcgtgtttgcttatgtccgcaaggtatttttcaattgaggtactatcacgattcgtgatcgatttggttatttttagctgtctcatggatggtattaaactggtttacttatgtttttaatttttataattcgcattgcatgcatgcctctcatggcaagatagcccatatccacttcaaaccaacggtcagcattattgggtttccccgggtgctgatgatgattgttgtggaatgattcgccccaaaatatagggtcaaacggcagtatatttctggatgtgttgtttacttcataattacggtagccgaaaacatgcgcccaccagttaacgacaacaccctgcaacgagcccatgataatggttgccggcaggaatagccattgccaccatgcagttgcgaagaaatagtaaaatgttacgtatgcagcaatccagagtatgcgtgtgatccagttgtgagcaattttgtcgaaggcttcccaaacaggcagatcctttttatacttctcttcaacaggagtagcacctttatacagatcgaaataactgttcctcgtcatccacatcatggcaaaaggatttggagtgatggatggcgagtgcgggtcttccggagtatccgtgtgtgcgtgatgtaaacgatgcataatgccatatgtagttgcgcttatatacgaagagccttgcgtaataaagcagcctatataaaataagcgttcccaggttttagacatggtgaatacacggtgcgccgagtatcggtgatggaataccgactgaaaaaacagtgaggcataccaatgaattgcaaaaaaaatgaggataaccatgtatttagctttttagttgaacaaataaggtctggtaaaatttcctcaattgaattccgggttatgtaaaggcattacaaactcaattgcaagaatatcctctccgtttataatgatactaaaggtagtattgaataagccttttttactatgctcttctctgaaagcttttgaattattcctcggaatgaacctgtaacggttcttctccatcaattcagaaaaatcgctgaatgaattaaaatagccataataggtcacatcatctttgcagataacgcgcataacagacagattgctgccttcagcatatcggtcctttatcattgtggctacttcttctttattcatttttcagtgttcagttatcagttgtccgtatctactgacgactggtaactgtttactttattttatgctactgatacattaattgcacggaggcctttttcggtttcttctacgtcgaaggttactttatcattttcgcgtattgggctctttaagctcgattcgtgaacaaacacgctatcggaagctccatccattgttataaatccgtagtgcttttctgcgttaaaaaactttactgttcctgttttcattgtgttgattatttgtgatacgtttaatttagtgaatgcgaataattacattttcatgaaaaaggatgggtcgcaactacatcaatatttttcttaattagtttgtgtatatttctcatataagctctttcatcggtagtgcagaatgaaattgcaacaccggactcccctgcccttcctgttctaccaatacggtgaacataggtttcagcttgttcaggaatttcaaagttgataacatgcgttaatttgtccacatcaatacctctggaagcaatatcagttgctacaagaaccttaatgcttctgtctttaaatcctttcaatgcacgttcgcgtgcattttgcgatttgttaccatgaatagcttcagctttaattccgtttttattgagttcttttacaaccttatctgcaccatgcttggtacgggtaaataccagcgcatgttcaattgattcgcttttaagaacgtgtcttaatagcggtcttttattttcctggcttacgtaatacactgcttgtctgataaggtctgaagtagacgcaacaggtgcaatatttatattcaccggggtcttcaatagggtatctgcaaactttttaatttcaaagggtgctgtagccgaaaagaataccgtttgtcttttttgcggaagacgcgctatgatcttcttaatgtcattgataaagcccatatcaagcatacggtcagcttcatccagaacgaaatattgaatgttgttgagtttaacatagccttgttgcatcaggtcaagtaatctgcccggagtagcaactataacatccacacctctgcgcaaagcagttgtttgggcgtgttgagatacaccaccaaatattacggtatggcttattctaagattactgccatatgccttaaagctttcatttatctgcaatgcaagctcgcgggttggcgcaagtataagtacttttgtgcccggtaattgatttgctttattctgatgaagaagctgaagcaatggtaatgcaaaagctgctgttttgccggttccagtttgtgcacagccgaaaatgtctttgccctctaaaatacaaggtatcgctttctcctgaattggagttggttgcgtgtacccttctttacttactgcctcgagcaaaggaggtataaggttcaagtcatgaaatgtcatactattataattgtttaattatggttacaggtgtgccaatgcggctttccttagctaactttttaggaaaaacgtaaaactgcactggataaaatggggtaaccattaacagattgagatacaatcttcgaaagaagtgatgcaaagatacactattttttcaacaatccttagaaaaagtgaaaaatgaaaaatgaaaagctaaaaagggaagcctttgggatttttatttaccctcattacctattcaacataagacagatacaagtgaagttgaaaataaacttcaggcgttttcacttttaatttttcacttttcacttttcacttccggaaagaagggtatctttgtattattatgcataaagccaaattattaaaagtatatagctgcacctattgcgcgcaggtagaagttggaacaaccacccctaaaataagaggttgtaagaaatcatcatttcataattgggtgtgcgttggagaacacggacttgataagtatgtttgcgccaattgcggtataaaggttaaaatattcggaacgccgaatgctgaaggctgctcggttaacaaaacccatacctggaacaaagtttagtcggaggccgatcgccaaataaattatactattctattcctgaaaattaaggaaattacacgtagctttgcaggtaaagtaacctgattaatgttcgccattatagatatagagacttgcggaggtaaatttgaataccctcaagggaggataatagagatatctatccttgtgcatgacggcttgcaggtgactgataaatttactacgcttattaatccgggatgttatatttctcctatgtacactcgcatttcaggtatcactaatgaaatggtagagaatgctccgcgattccatgaagtggcgggtaaaatactggaaatgactgaaggccggatttttgtggcgcataatgttggatttgattatagcttcgtaaaggaggaattcaaatctctaggttataaattccaacgggaaaaattatgtaccgtaagattaagccgcaaacttattcccggaaaggtttcgtatagtcttggtaatttgtgtgcatcactcaacattccgatagagggcaggcacagagccgaaggcgatgctgttgctaccgccaaattatttgatcttctgctccaattaaagtcaatggacccgcagtataaaaacaaaggggtagatgacttaatgggcagaagagttgataaaataaaagattttatcctaaaaaaactacctgaagaatgcggtgtttactactttctcgacaaggaaggaaagataatttacattgggaaaagcaacaacatgtaccaacgggctcagagccatttcaactcgaaagaaaaaaagggcaagggtatgttgaatgacttgtatgatgtgaattatcagcttacaggaagtgaactaattgcattgttagtggaatcggaggaaataaaaaaatatcacccatggtataaccgtgcccgcaaagcggatttattcacccacagcataaactggatgaaagatgaaaacggaattatcaattttaaaataactccgtttgaagaatcattcaatacactccgttcctttacgagttatgcaactgcaagggaaacacttgaacggtgtcttgatgaaaatattttatgccttcgctattgcggacttacggaagatgacgcaatatgttttaatcatcacataaaaaaatgcaacggcatttgtgccggagatgaagatgtggaagagtacaacaaacgtgcttcaattgtgttgaaagaatattctttccggaataaagactttttaattattgatgaaggcaggcataaggaagaaagagcaataattctggtagaaaacggtcactacaatggctatggctacgcagatttaacaggacaggcaaacactcccgaggaattacgtgagtcgataaaaagagttcattcattcccagataacgatgatattataagaggttatttaaaaaaccataatgtgaaaacattagttttgaaaggaattagcgaggtgacagaataaaggtcaccggttcattattacaaacttatgtataatagaaccatggcttgttagtatttgtaatgtataaacccccgtggccaaattccgcaggttaatggtttcttcaatattcccagcgtgtttcatttcagttttatcatataccgcttgtccaagttcatctataacagttgtacggatactcaggtttccctcaagggaataacttagttttatcaatccatctgaaggatttggatagatgttcaagcttgaactttcgtttccgatactttgaatcgcagttggagaagacgttaccgaaatacatgatttttggctgtttccgcagcaattacccgccattacacataaggaatatgttcctgcagttgaagtatttgttacggtaatggaagttgtcccctgtcctaatgttattgctgccagatttgtattcgatactgaccaggtataagttcttgcattagcaatcggcgacactgtatatgtattcgtactacttacagctggtgttaaatttcccgatggagctgaaggggtcgatggtgctactgtcactgaaatagcaagtgaatctggactactattaccgcaagaattatcggctgttacaatgacataacctgtggccgccccgccaaaagtaacatagatggaggttgaaccttgacctgcagttatggttcctcctgcactaacagtccaggtgta

SEQ ID NO: 1596 - DNA, 19238 bp, synthetic construct
  source 1..19238: mol_type = other DNA
  misc_feature 1..19238: note = Synthetic
ttgaatattgaccctcttttcaactttcagtttggagtcgatcgtgccgatacgactggtgaaaaattatacaccaacactagaggttttatggtgagaggaggaattggaaataagtttgcgtttgaaacttctttttacgagaaccaatctaccttccctcgttaccttgattcatacattgctaccaccaccaaattatttcctcaacctgctaatactaacgagaattatgcggtgattcctgggcaaggacgctcgaaaccttttaagaagaatggatatgactatgccatggcttcaggatatgtttcttatacgcccaataaatatttcaactttcaaattggcaatggcaaaaactttattggcgatggttatcgttctttacttctatccgataatgcctttaactatccgtatgcaaggataacaactacctacaagaatattcagtacacaaatttgtacacttcgtttatgaatctcactgatggtggagttaccactccagcccatgttgagcgtttatttcaaaagaaagttggtagctttcaactcttgagtatgaattttttcaaacgtttgcaactcggattgtttcacggaatgatatgggaggctgctgattcaaccaaccgtcaacatgtaaacttcaatactttcgatcctgtgattggtgtgaatactttgaattacggattgcacaatacgaacaatattgtgttaggtgctaccatcaaaattaaattcaccaatagcatttccatatttggacaaggcatgttggatgatgtaaatataaagaacgatagaggcgacaaggttaataagtatggttatcaaataggaattaagtattttgatttgttcactataaaaaacttgcatcttcagttggagtacaacaatgtacgtccttactcctattctagcaccaatccagagcaaagttatacccactataaccaatcattggctcaccctttgggagctaatttctacgaagctattgggtttgtcaactatcgcttcaataatttttttgttgaactaaaaggaaactatgctgtgaaaggggctgatagtttgaacttcaattttggtagcaatgtttttaaatcggataatgcttatcccatctcacaaaacatggaaaatgtgcaaacgactcaaggattaaaaactacgatagtaactgaagatattcatattggataccttctgaataagtcatccaactttaacattgtgtttggtgtatcaaaccgaaccgaacaaacagatagaaagacaaacaatacacaatgggtgtattttggtgtccgaacatctcttacaaatttatattacgatttttaataaacctaacccatggaatttttagtattagtatttgttacagcgtttatggtggtattgctcgccactccttctttaattaaggttgctattttgaaacgactatttgacgacccaactgaaaagcgaaagcttcacaaacatgccattcccacaattggtggtgtgattttatttgctggaaccttgttctccttttcgctttggtttcctcgaaatcttattcatgaccctattatcgaattgaaagcgatggatgattacaaatacattgttgctactttgttgctcatgttttttgttggcataaaagacgacataattggtacagctcctgtaaaaaaactcatcgcacacatgatggtgagtatgatacttgttttgatggccgacatacgtattgttagtatgcatggcatttttgggattcacgatttgccttattgggcaagtattttcttatccatcttcacttacattgtggtggtaaatgctttcaatctaattgatggtgttgatggtttggcgagtggtgtgggattaattgctacacttgcgttcggcacttggtttgcttttgtgggcgatgcggtgatggctgctcttgcatttgcattagcaggttcgttgtttgcatttttatttttcaatttctcgcctgctaaaatcttcatgggcgattcgggttcattaacgattgggctcatcatttgtatacttgccatcaaacttatttcatacgatgtaagcaccattccaaacgaattcttgcttcacgtttcgaaaccaatatttgcgatggctgtgttggtatatccgcttacggatacgttgcgaatatttgtttatcgcaccattcgtgggttatcaccattttcggccgaccgcaatcaccttcatcaccgattgcttgacattggttgtagtcatagaaaaacagtgattgtaatctacattgtcaatgtatttgttatcgggctttgtctttttctgagtgtgctcaaccctacttatgtattcatcatcatgtttgctgttgtgcttattcttgcacaaattccaaccttgctcaaaagacaaaaaaacaaacgtgttcatcataaacaatgattaaaaaaagtaatctaattgttcttttcttgatttctgtttgcggtgctttgcaagctcagcagatgaactacaccttgcagcgcgactatttatggggtattgacaaatattacaatagctcggaacaaaactttcagacctttgtaaaaccatttcgttatgcagatatttatcaaatcaacgattcgagttctactttccctagagggtttgcgggcttaaaagcgaaagcgaaaacaactgacaagaacgaaaacaaatcgttaattgaaatttcacctttggtggttgccgaaacgggttatcaattaggttcggtgtcgcggatgacaaatgacttagcaattggagcaagtttgaatggcgacattggcaaaaagttttcattcaattttaaagcacttgctggaagagctgtgttcaactcaagcaccgattcaattgtacgacaaactcacgtggtgccgggcatgggatatgcgtatcgtgccaataccgattcgttgaatacgatgtatgcttatcaatattattcgggatacctttcgtattctcccaataaaatattcaactttcaagtgggcaacgacaaacaattttggggagatggttatcgaagtttgtttctgtcggatgtagctgctccttatccttacttgaaaataaccaccaatatatggcaccttacttatgtgaacttatacaccatgatgaaggatgttaccaacccttcgggcatgaaaagtgattggttgaataaatacgctacgtttcattacttgggttggaatgtaacaaaacgaataaatgttggtttgttcgaatcgattgtgtggcaaggcagcgacagcactcgctaccgtggctacgatgttaactatttgaatcctgtgatgttttataggcctactgaatactcgcttggttctaccgacaacgctttacttggatttagtgtgaaaattaaactttggaaaaaacaacaagtgtatgggcaattgctattggatgaatttctgttgaaggaagtaggtgccgatgtcaaacacgttgtgctatcagacaattcgggcaaatggggttggtgggcgaacaaacaggcagttcaacttggcttgaagagtttcgatttgtttgggttcaatgggttgaattttcaaaccgaatataatctggtgaggccttatacctattcacatggtagtgtgcagcaaaattatgcacatttcaaccaacccttggcgcatccgttgggtgctaatttctgggaacaatctgcttttttgaactaccgcatcaaacgcttttttattgaagctaaactggtgtacgctgtgtatggggctgatagcgctggaactgattatggtaaaaacatttttatatcgtataccaaccatcagagcctttattacaacttcaccacacagggttttcaagctacacttatcaccagttctttgcgggtggcttatgtgttggatgctcgcatgaacctaaaacttgaacttggattggtaaaccgaaccattaaaacgacatctaccacacaacaaagtccaggtattttcataggacttcgcactgacctctgcaacctttattcggattattagggcttttggatgtgagatttgagtattgagatttaagattttcttgccacaaagacacgaaggcacaaagagaatagaagaaatgagatgggagataccaagaaacgacccatgagaataccagaaacgatttattggagtaccagaaactatgtatgagtatataagaaacgatatatgagaacataagaaacggtgtatgagtatataagaaacgaaatatgagaacataagaaacgatgtatgagaacataagaaacgatgtatgagaacataagaaacgaaatatgagaacataagaaatgatgtatgagaacataagaaacgaaatatgaggatataagaaacgatgtatgagataccaagaagcctaatatgagggtggtgaaatgaagaagaggatacaagaaacggtgtatgaggatataagaaacgatgtatgagaatagcagaagcggtgtatgaggacacaagaaacgatgtatgaggatataagaagcgatgtatgagtatataagaaacgaaatatgaggactgaaaagaggatatgagtatataagaaacgatgtatgaggatgtaagaaacgatatatgaggatataagaagcgatgtatgagtatataagaaacgggctatgaagggggaataaatgcagaaatagctgaaaatatgcgagttatggaatgggaggatgaatttaggggtatactataatatataggggaaattttgggagtttagggacaagaaggacggaaagggaaattggagggaagggactggaaggacggaaagggagaaaattgaaataaaaaaagccccaccgaagcggggctataggtttacaccttcggcatatagccttattgtgataagaaattcaaagattgaataaaaatttcttggaacaaagttagaaaagaattcgataaatggatgttttttttatacttttataacgaaattaactttataaataattgttatgacaaaaattttaggacttgatttgggtacaaactcgattggctgggctgtggtggatagtgggaaagaacaaacatctttactggagaaaggggtacatatcttctcggaaggtgtaaaaattgaaaaaggtattgaaagttctaaggctgccgaaagaacaaagtacagaagtgcaagacgaattaagtttaggagaaaactacgcaaaattgaaactttagaagttttaattaataataatatgtgtccgctaacaatggaggaacttactgcttggagaaaaaacaaaaaagcctatccgaagaatgaagagtttttacaatggttgagaactgatgaagctacaaattcaaatccttatcatttccgggacaatgcaagtagaggtaaagttcctatgaaagagttaggaagggccctataccatatggcgcaacgaagaggctttttaagcgggcgacttgaccaaagtgatgatggaataatagaacaagtaagacaagaatttttaagcgttgttgatattgaggaaaatagagatgatttgatagacgcaataaatattatttatgataattataccgaagaacctgataaagcggtaaagaaattattaaatagtattgcaaagttttacggagaaaatagattaaaatcggatgaagaatttaaatcaggtatttacaaactttttaataaaagagaaaaccttggtgcagtaaagggtggtatagctgatttatcaaaacatatttctgatgccaattgtgaaacacttgggcaatatttttataagcaatatcaaaagaaagaaaaaataagaactcattatacttctcgtgaagaacactatttacaagagttcaataagatttgtgatgttcaggaattatcaaaccaattaagagaagaactcttaaaagcaatcttttatcaacgtcctttaaaatcacaaaaaggattggttggtaaatgttcgtttgaaaaaagcaaatcacgttgcccaatatcgcatcctgcttttgaggaatttagggctttacaatttattaatagcattaagataggaacaacagagttcggtgaaaaagaatttttgagcgaagaagaaagaaaacgagtttggccgaagtttacacgtaagagcaaagctaattttgaatttgcagatattgcaaaagaacttactcctaaaaatgaaaagcgatattttaattacaaagactatgtcactgttagtggatgcccaacaatagctggattggtaaacatttttggagacgaatggaagcaaactattgtagaatcttatacgaatgcgaaaggaaaaagtattgaccaagtaataaatgatatttggcatgtattatttcagtttgataaaaaagaaaagctacaagagtttgctaaaaacaaacttggactgaatgacctaaaagcaaagaaatttgcaggtataattctaaaaaaggattatggaagtttgagtttaaaagcaatcaataaaatacttccttatttgcaccaaggattaatttattcgtacgctgtgtttcttgctaacattgataatgttgttggtaaagatatttggagtaaacctgaaaatcaagaattaattaaaaaagaactaaaaaatttaattgataattataatgagattaaaaagagagaaggcattgtaaacgatttgatggggcagtttaaagagcattataacaattcgcacaaagattatgaattggatgaaaaggataaaaaagatataaaggaaaaaaccattgctgcttatggtagcaaatcatatgctaagcttgataccatacaacatgaagaaataattaattggattgaagaaaagtatttgactcaattaagaaaatatagaggggaatttataaagccacaacgattggatgaaaagattgctgcttttctatctgatcattttggtgctacaccaaaagacttggaacaactttaccatccatcggacattgaacttttcaaaacccccagacgggctgaggatggtaatttgtatttaggaagtcctattactggttcgataaaaaaccctatggcgatgcgtgcaatgcaccaattacgcaaattggtaaatgaacttataagagaaggtaaagtagatgaagaaacaaaaatacatattgaacttgctcgcgaattgaacgattcgaacaaacgagctgcaataagaagatggcaggaagaacgcaaaaaacaaagagatgaatatagattagaaattattaaactatataaagaacaatgtgggcaagacattgaacctacagaagaagaaatattaaaatatcaattatggattgagcaaaatggtgactgtttgtacacaggtagaaaaattggcatttgtgattttattggtggaactccaaaatatgatattgaacataccattccaaaaagtttaagttatgataattctcaagaaaacttaacactgtgtgaaaacaaatttaatcgtgaggtaaagaaaaacagaattccatttgaacttgcaaaccacaaagatattttactacgattggctaaatgggaaaaggaagttgaaaaatatgaaccactttataactcccgtaaaaaagcaagagggatagaaacgaaagaacaaaaagataaacggataaaagacaaacattattacaaattacatctggattattggaaaggaaagctaaatagatttacaagagaagatgtgccaagtggttttaaaaatagtcagttaacagataccggaattataaccaaatattcgagagcatttctgaaatcgatatttccacaagtatattcggtaaaaggagatgctgtggctgagttccgtaaactatggggattgcaacaggagtatagcaaaaaagaacgcattaatcatattcaccactgtatagatgctattactattgcatgtatgacgaaagacaaatatgatatgcttgcaaaactttaccatgctgatgaagaaaacagaacaactgaagcgaaagaggtgttgcgcaatttaaaaccttggtcgacttttacagaagatgtaaaagctattgaacagcaagtaatggttagccatcatacgcccgacaatatgaaaaaagaaagcaaaaagaagttgcgagtacggggtaaaataaaaaaagatgaaaacaataaaccaatatatcagactggtgatacttcgagaggggcattgcatttagaaactttttatggttctatattaaccccagaaattgataaaaagacaggggagaaattacttgatgaaaatggagaaattaaaaaagtaataaaatatgttaagcgcacagagttaagcaaattaaaagaaactgatgttgcaaacatagttgacccgattgtaaagataaaaatagaagaagcagtaaaggaattgggttttaaaaaggcaatgcaatcagaaatatggatgaatagggaaaaaggtgtgtctattaaaaaggtacgtgtatttgcaccatctgttacaagtcctatttcgttaaagcatcaacgagattcttcgaaagaatcgcataaacacaaggaaacctattatgtagccaatgaaggtaattatttaatggcaatatacgaaggaaaggataataaaggaaaaacaaaacgtgactttgaattactgaatacgcttgatgctgcaaattatttgaaacaaagtaatacagataaaaacaatttaccaattgtaccagagaaaaaaatatacagtattggaacaaaagatgaatatagcatacctcttgcaaaacggaataataaagagattattctaaaaataggagacatggttttgcttaaacaaaaaccagatgaggatattaattggaacaataaaacagaattaaacaaaagattatttaagattaaaggattgtcacatacttacattcaaaacaaatatgactacggtgtaattatattaattcatcatcaggaagcgcaagccgttagtactttaaaaatagggaatggagaatttaaaattaatgataatttactttatagaaaactataccattctcaatttaatgctttgattcaaggtattgattttaccatttcgagtacaggaaaaattaaagaaatcaaaaaatgataaaacaaaccctctacttttcgaatccatatcatttgagtgcaaagctcaaacaacttgttattactaataaagaaactggtgaggtgaaggagagggtgattgaagatttaggttttgtgattattgaccatcaggaaataagttttacgcaaagtatgatgcaggaattggccgaaaacaatgtggctgtggtgttttgtgataaaacacatcatccttcttctatgctttttccattagatggaaacacactgcaaacagaacgtttccgctcacagatagatgcaagcgaaccgatgaaaaaacaactgtggcagcaaaccataaaggctaaaataaataatcaggcagaattatttaaacgactgggtaaaaatgatgaggcgctgaaacgctatgcctcgaaagtactgagcggagatagcactaatgaagaagctcaggcggcaaggcattattggcaaaacatttttgaaaatgaacggtttattagagatcgatttggaatgcccccaaacccaacattaaatttcgggtatactattttgcgttcggcaactgcaagggctttggtaggttcgggattgttgccaacgttgggaattcatcatcataataaatataacgcattttgtttggctgatgatattatggagccttatcgcccgtttgtggacaaactggtggtggagttgaaaaacgaaagcgatgattatcataaaatgagtaaggaaataaaagcaagattgataggtattataggcatggatgtgatgatggaaggcaacaagcgaccgatgatgatagcgctgagtcagacaacatcatcgcttgttaaatgttttgaagggaaggagaaaaaaatagtttatcctactttaccagattgagatgtatgataaaaacaaatcgagattaaacgcttaccgagtaatgtggctatttgtatttttcgatttaccaacggatacaaaaaaagacaggaggaattattctcgattcagaaaggatttgatgcaagatggatttaggatgatgcagttttcggtttatatccgacattgtgcatcggcacaaagtacggaagtgcatgtgaaacgagtagagaaaataattccaaaaaagggtcaagtgagcatagtacaaataacagataaacaatacggagagatagtaaatttttggggagctaaaacagaaccattggaatcgcccccaaatcaattagaattgttttagaaataaaaaacgggaaagaacattggttaaatgttcaatcccgcccattttattttacattgtttctttataatacattgataagtaatataaatagatttgcatctcatgtaatctatcaatctttgaaatcaaatcacaactttttattgcttcggtgactggtgctagaacatgtaatctatcaatctttgaaatcaaatcacaacagcctgatggtgtgtatgtacatgggaaggcatgtaatctatcaatctttgaaatcaaatcacaacatggaagtgcggatgatgtaagaagggcggcatgtaatctatcaatctttgaaatcaaatcacaactcaactcgccctcagtttccatcaagtgcgcatgtaatctatcaatctttgaaatcaaatcacaactacaattacatagagatttatcaattacacatgtaatctatcaatctttgaaatcaaatcacaacttaaggctgatgagactgtattgacagaggcatgtaatctatcaatctttgaaatcaaatcacaacctctttaccttagtagtcttacaagtgctcatgtaatctatcaatctttgaaatcaaatctcaacttacaagtgctgacaaagatttcttgaaagcatgtaatctatcaatctttgaaatcaaatcacaactagtcatttggtgatactttatcgataggtcatgtaatctatcaatctttgaaatcaaatcacaacgtaatggcactactgctaacagcgcataagcatgtaatctatcaatctttgaaatcaaatcacaacacggatgttatggtatagatggggcacaatcatgtaatctatcaatctttgaaatcaaatcacaactgtatccagaaaagaagtataaatgtgtatcatgtaatctatcaatctttgaaatcaaatcacaacaacgcagggacggctttaccaacagcatccatgtaatctatcaatctttgaaatcaaatcacaacctgatattagaccaccaagctatccttaatcatgtaatctatcaatctttgaaatcaaatcacaacagatttcctcaggtgttggacaagtgttaacatgtaatctatcaatctttgaaatcaaatcacaacgtgattgaccagcaaatattccagtatcttcatgtaatctatcaatctttgaaatcaaatcacaactggggtggatttgcttggaaaaacttaactcatgtaatctatcaatctttgaaatcaaatcacaacagtttttgttaaattgttaatatctattttcatgtaatctatcaatctttgaaatcaaatcacaacttgaaccattaactgaaacaacataataacatgtaatctatcaatctttgaaatcaaatcacaactctgcgcttctttgaactcctgctttagtcatgtaatctatcaatctttgaaatcaaatcacaacaacgcttttatggtgatgtgataagaataccatgtaatctatcaatctttgaaatcaaatcacaacacgaatggaagctggcatcacctcctgaacatgtaatctatcaatctttgaaatcaaatcacaactgttgagcggtctaattgcttcgggtgtaacatgtaatctatcaatctttgaaatcaaatcacaactacttgccgtcggcactattaaactctttacatgtaatctatcaatctttgaaatcaaatcacaacagctgtggttgtgcgatatgcaggggctctcatgtaatctatcaatctttgaaatcaaatcacaactataaataatactcatgcaatattgcccgcatgtaatctatcaatctttgaaatcaaatcacaactattcgttaaaatgttattaattgtttaatcatgtaatctatcaatctttgaaatcaaatcacaactcatatgtacttttatcaacatgtacacgacatgtaatctatcaatctttgaaatcaaatcacaactatttgcagtcaaagtagtatcgccctgccacatgtaatctatcaatctttgaaatcaaatcacaaccgaaacaatacagccgaatttataaaagatcatgtaatctatcaatctttgaaatcaaatcacaaccctgcgaaggattcaactataaacatccaatcatgtaatctatcaatctttgaaatcaaatcacaaccggtaattacatcaaatacctttttgaaacatgtaatctatcaatctttgaaatcaaatcacaaccagggacagattacagcctatatcatattccatgtaatctatcaatctttgaaatcaaatcacaacaattcaacagctttattgttttggtaaggtcatgtaatctatcaatctttgaaatcaaatcacaactggctgaaattggtttacttccttatccaacatgtaatctatcaatctttgaaatcaaatcacaactgcacgacaaaggtaaaaaaaaaaacaatacatgtaatctatcaatctttgaaatcaaatcacaactctctcacatcgtttatccttacaaaaggacatgtaatctatcaatctttgaaatcaaatcacaaccggatgcagttactcttacaactgcagcagcatgtaatctatcaatctttgaaatgaagataaaacgactagagatggaagtgaaaaatttcttgtcaaagaacttaggtttcaaaagtaggtaaaaaaaagggatgagggatgtaatttagaccgaatttaaattaggttggtggggaaaaaaagatgaaaaaaaaatttgtgggaatggaaaagttttataattttgttgcatcaaagtaagggaattattattttgtgttgaaagagaatagtaaagatcccgtattgtttaattaaaaactacaaacatatgtcaaaagcaaattacctcatgacgcaaaaggagttgtactcggtagcagataccatgattgactcgttagaaaaaccagctacgcttttaaaatttaaaacgtacaaaccaaccaagtattcacctgcttttatagcgaatttacgagcgaataagaaggctgcatttgtgctgcctgatgatacgcaacgaagcgcattgcacactacggagaaaataatattgggagagagaagggatgtgtgtacgggttatttcgattatataaagggttatattcaggatgggtttccgcaaaaacaatggaaagctaaactgaaagaggctgggcaaaaggaatacaacaaagcccagaatgataattgggagtttgtggtggatttgaataaaaaggtgttggattttgtggctgcttacccaactgaattggcagcaggacatatgcctctagcatttggagctgatgtgcaaactggaagtgatgattttgatacggagtatgcgaactttaaattgttgagagaaactggagtggcaacgaatgctaagttagatgctaataatatagtgtatgctgatatgaaaaatttacaggctgatgctcatatagtgtttaaaaaagataaggctgctttgaaggagtttatgataaaggtggtaaggagtatagtatcgcctccgggaagtgctagtttgggattgacgatacaggctgtgggcacgaacttgatgatagcgggtgcgaaggtgacgatacaaagcttgactggtgtggcgatggtgagcattagtgatgcaaatggtgaggtagactttaagagcttggaccctgatacttataaggtgttgatagaaatagttggtaaacctaatatgaactatacgaaagaagtggatacgggtgtgaatgctagaatgaaggtgatggtgccgtagagagatatgagatttgagatgtgagatatgagatttgagatatgagaaaagccctgagcagcaatgttcggggctttttttatcacctctcccctgcccctctccacaagagagggggagaaaggtgacgattgggactagagggacgaaaaaacaacggcacaatataaaacaataattaccaattaaagcttgttggtgaaaacaccaagaagggcaaaaaaaccgtggctaccagctgacgcacgaactcgctcaaacagccacggactgtttgccgccctaaaggggttttgaggatggtggggaatttgatttaccacgggttaaaacccgtggctacaaacattacacccctgacggggctgaagcacctctcccccggcctctctccacaagagagggggagatacgtgacggttggggtatttttaagagtatacttaaaggttattagaagaaatgcggtgactaactgcgcctgacccgcgcgaagtatccttttttttatccattgccccgcagggataaaaacaaataaaaaaaagataccgtgtgagggcaggtggacaggtgatgacgaagagggcacttgctcgcccagattagttgttggttgttggttgttagttgttagttgttggttgttggaagtgagatatgggttgttcgaaaaggtgattttggtcaggtataaaggtgggtgacaatactgtgacagcggtaaagcgaataagcatgaagtttgtggtcggaaatgaaagtactatggaacggataaaattaatagcttttacacataagaccactccactgagtgagatagggaaattgcacatagaggaaacggcttggcaagaccgattgaactacttgaaggcgcaagctggggtggacgaattgttatacctatcgacttgcaaccgtgtggagtttgtgttggtgggaagcatgaggttgaacgctgagtttttgagaagatttttttgggcttttgatagtaaatggactgaggaagatgtggcttgggcggtaacgaatgcaaaggtgtatgagggtgacgaagcggtgggtcatttgttcagggtggcatcatcggtagattcgctagtggtgggtgagcgcgaaataataacccaagtgaggacaggatatgaaaaatgcaatgccttgggcttgtgtggcgatgtgatacggttggtggtaaaaaaaacgatagaagtagccaaggaagtgtatacgcataccaatatagcgaagaacccggtatcggtggtttcgctagcttaccgaaagctgaaggagctgaatgtgaaaaaggatgcacgctttattatcataggttcgggggtgacaaatacgaccatgggcaagtacttgaagaaacatgagtttgctaacttcacggtgtttaaccgcacgttggcaaatgccgaaacactggcaaaggaactacatggcagagcttatggaatagaggagttgaaaaactacaaagagggtttcgacatcatagtgacctgcacgggtgctaccggaagtgtgataagtgccgaattgtacaagagtttggtgggcgatgataaatcgagaaaggtggtgattgacctagccatacccaacgatttggatgctgaaatattgaaaacctatgatgtgaatttgatagccataaataatttgcaagagatagcgaaagaaaatttggaatcgagagagatggaattggaagcatgcgatagcattgtggaacgaaacctggtggaatttggacaggtgctgaaagcacgcaaagtggaacaagccatgagccatgtgccaaaaaagataaaagaaatacgcgaagcagcaaacgatgtatttgcaaatgaattggcatcgttggatgcacaatcgaaagaagtgttggataaaatacttgggtacattgaaaaaaaatacatcagtgtgccaatgaaattggctaaagaaatattgcttgatgatgcactagcgaaataataaaaaagatgagcccataagggcttttctttttttaatacatttgcaatcctaaaacaaaacatggaacgaaaaataataattggaagcagaggtagtgacttggcattgtggcaagcaaaccatgtattgagaaaagtacagaagcttggcttggatgctgaactaaaaataataactacgcaaggcgatgcgatacaaaacttaagttttgataagctagaggggaaaggattttttaccaaagagattgaagatgcattgctgaacaaagaaatagatttggcagtacactcgcataaagacttacctaccacatcgcccgcggggcttaaaatagctgctgtgtcggaacgcgaagatgcagccgaactgatagtgataagaagggaatgtgtagagaatggtcagaagttttcgataaaactaaatggtgtagtgggcacctcatcggcacgaagaaaatcgcaattgcttgcgtttagaaatgatgtgagcattgaagatttgcgaggcaatgtacctacccgcatacaaaaactaagagataaaaagtacgatgccattatgctggcagctgccggtgtggagcgtttgcgaatagacttaagcgaatttaaagtggtgagggtagacccaaaagagtttatcccttcgccagcgcaaggtgtattgggtttgcaaatacgcgaggatgaccacgaattgtttgagcaaataaataagttgaactcggaaaaggtagaagacatcataggcattgaacgaaaggttttgaatctgtttgacggaggatgtcaattgccacttggtgtatactgcatcaaagaggaaaacaaatttaaagtttggacatcaaaagcagaagcatggaataccatgcccaaacgattgtactttgaatcgttcagcgatgcaggttttgccgaacgaattgtggataaattgaattcgataaaagggtgctcggtattaataacaagagacttgaaagacaattcgtttttcaaaaacgtgttggaaggcaatggctatagtgtaaatggaatttcgtttatagaaataaaaaccattagttttaccgaagtcactcctaccgactgggtgttttttgcaagtggaaatgcagttgacaatttcttcaaacaatcacctgaactaaaacctaaaaccaagtttggagtgattggcaaatcgacagaacttgaattgaaaaagcataatagaaatgctgcatttgtaggaaacataagtgatacaaaagtggtaggcaagaaattcgcaaaggctgtgggagaagaaacggtactatttccgcaagcaaaaggcgggttaagaaccattcaacagcaatttgcagatgctaccaaactgcacgatttggtggtttacgaaacagtgaaaaaagaaaatgcaagtatgccagaggtggacattttggtgtttactagtccatcgaatgtggaatcttatttcgagaaaggaatcattaaagaaaatcagaaagtaatagcgattggaaaatcgacagagaaaaagctgagagaaaaaggggtagaaaattgtgtgcttcctatttcgtttgacgaggctggcttagctgaagctgtgtttggaatataattactagaataatttagaaaaaaagaatactaacaaaaataaaagtttacaaaaatgatacaaagaccaagaagacttagaaaaaacccaatcgttcgcgaaatggttgcagaaacaagactttcgaaagacatgtttatctatccttattttgtggtagatggcaccaacatagttcatccaatagatgcaatgccaggagtaaatcattactcggtagatgagttgttgaaagatgttgagaaaggactaaaattgggtatcaacaaaatattattgtttggagttggagagcaaaaatcggaagatgctagctcttcttacagcacgaattcgatagtagtgaaagctgtatcggctctaaaagcgaagtttggagacagcctatatgtaatcactgatatctgtgtatgtgcttacaccacacatggacattgcggaataatacatgatgattatgtacacaacgattcatcagtggaggtacttgctaaaatggctttggctcatgcaaaagctggagcagatatggtggcaccatcagatatgatggatggacggatatcggccatgcgcacgttgctcgataaaaatggatatgagaacacagccatcatgtcgtattcaattaaatatgcatcggcttattatggtccatttcgcgaagcagccgactcagcaccacaaaaaggagacaggaaatcgtatcagatggattatagaaacggaaacgaatcgatgaccgaagggatacttgacgaagccgaaggagcagatattttgatggtgaaaccagcattggcctatatggatgtaattttcaatttgcgtcaaaacacattgttgccaatagcttgttataatgtatctggagaatattcgatggtgaaagctgccgctgccaatggatggatagatgaacaaaaaatagtaatggaaaacatgtattcatttgttcgtgcaggagctaatatcatcattacctaccacaccaaagacatttttgagaaagggtggttgtaaaccagctttaaagcaggcaattttttgttaaacgtttaagtactttcagttgacatagcccaacgggaaagagtaaaaaacaagtaaacaaagaattaagttttatattcgattcaaatacttaaatttgcaaccatgcgaataaaaaaagtatttcaattatctctattcagtgttttcattacgttacactcattagcacaaaccgctattgaaaataaagtttggacacttgaacaatgcattgattacgcattaaagaataatatctccgtgaaac

SEQ ID NO: 1597 - DNA, 18530 bp, synthetic construct
  source 1..18530: mol_type = other DNA
  misc_feature 1..18530: note = Synthetic
atttgtcaatggtttctctatctcgtatttcaaccattccttttaattcagcactcattaagagtttaagtatttcgtcaagtgctgcagcggaagtttcattcattacttagtcttcttgtggcaaaatccagcttgtttggcagcaacaataaaatcattaagcatatttaaaaaatttattgcatctgctttattattgaaaaacataccatacataccatcagaataatttgagtcacctgctataagcatacattttgaacaaaggaaatttaagcagtctcctcctccttttacataactatagcctatcgaaatatctgtgagattcatttctacaccaatcatatgcaatttgcaattatatttatcaaataatatatatacagttgtatcatgtttgccttcttataaaattcgtctaaacgctttatcttttggtcaagcgaatcttgcgcatgtaattgattttgctgtatgctcgttaacagtaagatggtaaaaacaatttttaaaattagtttcatatcggaagtgtgtatttgttgtttaaaagttctctcattcaattacttttactttcagccgccaaacgattactgataacattgaaattaacgaaacaaacctacaaaacattcgctaatcctacacccgcatggcggattaacgcaacccgcgcatgtgggattacttatcatgccgagtgggatagagggagcgcactgaatgtggcgggttgtaacgctttttgctttgcaaggcgtaaagaattatctttggggaaaaaattatatgagagtattgcttgatattaaagatgcgaaagcaccgtatttgatggaagtgttaaaaaacctttcgttcgtgaaaaccacaacgcttaccccggccaaagcgcaatttctggaagaactgaaagatgcggtggatgaagtgaatttgataaaagcagggaaattaaaaggtcgttctgcaagaaaactcattgatgagctttagtgttatctccattaaaagctttgacagcaggcaaagcggttgtcaaaaaaatttccctctttcaaaaaagagcttcttgatttgatttcttctcttgaagagaacccttttcaaggcgccgctatcggacattattgttacaaaatccgtttagcaattagcagcaaaagaaaaggaaaaagcggaggcgcaagaattattacacatatacatataaaggcaaattctgtttttctgctttccgtttatgacaaatcggaattaggaaccattgcttctgttgaagtgattaaattgctacaggaaatttcttcttaacttttgttcagatgcaactctcaggccggtttcgtaatattcatataaagtataacgaatatgaagcaattttaaaaataaaaaagaaacattgaaattaacgaaacaaacctacaaacattcgctaatccaacacctgatattatttaaatgcttttacaattgtctaaacaaaaacagcttctttcgagaatttcaccttcatcaaattaacaattatctatctcttctgcgaactattttttgcaattttcattcattttacactatttcatccaaaaacgctctaacaccacgccgaaatgctctgacgtttcatcgaagtgtgattgcaccatgccgaaatgctctaacgcttcgtgaaaacgctctgacaccaccatgaaatgttctgacactctcgcgaaatgctctaacgcctcagcgaagcgctctcacgttttatcgaaacgttatcacgccatggcaaaatgctctgacgctttatcgaaacgctttgacgtttcatcaaaacgctctaacaccttgacgagttgctctaacctttcattaaaaaggtcgctgaatttttgtgcatttaggaattccttattcactgcatttaacaagattgaaaaccgtgtggtttgaaaagatgactaaataccgctctgatttaaccagtccgttttgttaatgagctattaagaattacctttggaaaaataattaatgttatgactacagtcaaattgaaatccgatctctttcgatttattgaagaaataaatgacaagaacgttttatctgctctgcgtaagttcctttcttcgaaaagaaaaaggaaaaaagatttttgggacgatctttcagaagaagaatgcaatgaaatcctaaaagccatgcgggacctggataaaggatatgctcattcatttgagggagttatttccaggcataaaaagaaataatgaaagaggttgtactctcgccggttgccaaaaagaaactggagatgcttttagactatctcgaagaagaattttctgaaagaacaaaacaaaattttatttcaaccttagaaaagattgttgatcgaattataaaatatccagaaagctttcccgagtcttcaaaagttaaatctgttcgccggtgcattgtcagccgctacaccgttatgtattaccgcgttcggaaaaataagattgagatactaaccttttttgataatcgtcagaatccgttgaaatcaccgtattaaattcttctatcctgtgaaagataaatatttcctcaatttcctgatcttttgtttcctgatttcaaattcctcctttgctcaaacaaaagcggacactgattctgcaatcattattaccaaagaccagcggcttgatgagctggtgcagaagcagaaggaaattaatatgcagaaacaaagcattcccggttaccgcatacaggtttattttggaggagaccgccagaaggcaaatgatttgaagcaggaatttgtagtaaagcatcctgatatgagcgcctacgtgacctatcaacagccaaattttaaagtgagagtcggggattttcgtactcgcctcgaagcaggcaggtttttaaaacagatcgggggtgagtacacttcgagctttattgtgccggaggagattagtataaagcaactgaaatgaaaaaagttcaatgttcaatgttgagcgaatattgaactgaacaactttgaactttgaacttcttaggcggtagccaaagttcgtttcaccgcaacctgttcatacccttccacaatatctcccactttgatgtcgttgaagttggcaatgtttaaaccgcactcatatcctgcagcaacttcttttacgtcgtctttaaatcttcgcagcgaagcaagctcaccggagaatacgacaatgccatcgcgcacaatgcgcaccttcgtgtttcgctgaatctttccgtccaacaccatgcaaccggcaatggttcccaccttcggtattttgaatacttcacgaatctcgatattgcctgttattttctccacaaactcaggagcaagcatgccttccatagctgccttcacttcgttgatggcatcatatataatagagtaaagccggatgtcaatttcttcctgctctgccagcttgcgcgcatttaatgaagggcgaacctggaaacctattacgatagcgttagatgcagatgcaagcaatacatcggactccgtgatctgtccgactgatttgtgaataacatttacctgtatctccggattagaaagtttgagcaatgaatcagcaagtgcttcaatggatccgtccacgtcacccttaacgattacgttcaactctttgaagttaccgatggcaagacgtcttctgatttcatcaagcgtaatatgcttgtgagtacgaataccttgctcgcgttgcaatgcaaggcgcttcgttgcaatctctcttgcttcgcgttcgtcatccattacgttgaaatgatcgcctgcctgcggagcgcccgtcatgccaagcatcaacgcgggggctgagggaccggcttctttaatgcggccgccgcgttcattgaataatgctttcactcttccgctatgtctgcctgccagcataatgtcaccaacttttaatgtacctgcctgcacaagcacggtggtcacatatccgcgtcctttatcaagggaagattctattactgtaccaacagcttttttatttgggttagctttcagatcaagcaactctgcttcaagcaaaaccttatcaagcaatgcatccacattggttcctttcttggctgatatttcctgactttggaatttgccaccccattcctctacaagaatattcatcttgctgagctgttcctttaaacgttcagggtttgcatccggcttatccactttattaaaagcaaaaacgatgggcacacccgctgcctgtgcatggttgatggcttcaacggtctgaggcattacgctgtcgtccgcggcaataacaataattgcaacgtcggtaaccttggcgccacgtgcacgcatagcagtaaatgcttcgtgaccgggtgtatctaaaaaggaaatatttttaccgttctccaacgtcacttcataagcgccgatatgctgagtgattcctccggcttcgccggcaattacattcgcttttcgtatataatcaagcagggacgtttttccatgatctacgtgtcccataacagtgacaatgggtgcacgtggaaccaagtcttccggcttgtcttcttccacaccgattgtttcctgcacatcggcagctacgaattcaacctggtatccgaattcctcggcaacaacggttaatgtttctgcatccaaccgctggttaatggaaacgaaaagtccgagcgacatgcaggtggagataatttcagttacctgcacatccattaattttgcaagctcgttggcgcttacaaattccgttactttaataattttctttcctgcctcctgcgcttccattgcatcacgctcatcaacgaatgcatcgcgttttgctttgcgcagtttggaagatttcgattttcctgctccgcttaagcgcgcaagggtggctttgatctgatcctgtatctgcttatccgtaacctcagcgcgctgtgcaggaacaatcggacggttgttgcctcttcctcttcccggtgccggtctaaacttactgcgcgggtcattatccgtaatccttacaccctgtgatccggcagccggtggagcgcccggaggaccgaattttttatcgctgcgttttcttcttttctttcttcttgaacctgcttcaccaacaccggaagaagaagcaacaggctttttctttggcgggtccacgggcaattcgatttttccaagaatagtaggaccggaaatattcttaaagcttacacggtgtatttcatcttttggcgattccgttttttcttcgggtgcaggcgcaacaggtttttcttcaatagcttcttgcgctgccgttacttcttcaacttcctcagcagcatcttcgcctttcttcttcttagctggttttttagcgcctttctttttcgcttccttctcttctttttctttctccgccttggttttcttcgtggccggtttttcttttactgccttcttctttgtgtctttcttttcttcaagctcaatctttccaaccacctttgggctttccggctctgctgctttggatctgaaaagttcaggttctttctttgcaactacaggctctgcttttttcgctttcggtttttcctctttagtaactcccacggaagaagaaatgttcttgatgagaattccatcatcctccacttcttttctttgagggtgcttcatgctcgatgcatccatgattacaggagcctcttttttcagcttcgtgtcggtaatatgttttgcatcttcttttgcctgcctgtccgattgaaattctttaacaagcaaagtataggcatctcccggaagctttgaattgggattgctgtcaatcttaatgcctttggtagaaaggaatccaacgatatggtccagactaaggttgaattccttaatggctttacttaggcgtatggtcttttctgtttcggacatttattttaattagatatgagatatgagtattgagaatctcacgtctcaatactcacatctgttattattcaaactctgacttcaatattctcatcacctctttgatagtttcttcttccaggtcggtgcgcttcacaaggtcttcaacggttaagtcaagcacactctttgcggtatcacatcctatcgcttttaacgcatcaatgatccatccttcaatttcatctgaaaattcatccagatcaacgtcttcagtttcgtcttcgctgtcgcggtaaacatcaatctcatagccggtaagcttgcctgccagcttaatgttgtagccgcctttgccgatagccaatgaaacctggtcgggtttaagaaatacagaagcgcgtttagtttcctcgtctaatttaatggaagtgatttttgcaggactgagtgaacgcgaaataaacaacggaatgttactcgtgtaattaataacatctatattttcatttcttagttcacgaacaatgccgtgaatacgtgaacctttcatacccacacaggcgccgaccggatcaatacgatcatcatacgattcaacggcgaccttggcacgttcacccggctcgcgtacaattttcttgagcgtaatcaagccgtcaaacacttcaggcacttctaattcaaacaatctttcaagaaacatagatgatgttcttgataaaataatttttggattgccgttcagcatttctacacgcaaaatcacggcacgaatagtatcaccctttttgaaaaagtctgaaccaatctgctcactcttaggaagaagtaattcattgccatcatcatccatgacgagcgtttcctttttccatgtctggtacacctcacctgttactatttcaccaacgcggtctttgtattttttaaataaggcatctttctctaattcaagaatacgtgcaacgagattctgacgtgcagaaagaacggcacgcctgccgaagtcagagaactttacttcatccgatacatcttcaccaatttcaaaatcaggctcaatctttattgcttccgaataagcaatttgagtagatggatcagtcacttcatcgtcagcaacgatgaggcgggtgcggaaagcatccagatcgcctttatcggtattgataacgatgtcgaagttatcggcagtgccgaattttttctttagcatgttgcgaaaaacatcttccagtatgctcatcatgctggcacggtcaatgttctttagctctttaaattccgaaaacgcttctactagttctgttgcttccattttatattgagatttgatcccgcacatgcgggatgatttaacgaaatgagaatattactcttgtttcctttatctgattaaatggtatttgtaaataatttgtttctattgtttttttcttgtcaatttttctttcaattcgttcttccaattccacaccttcagggtttgcggcttttaatactcctgtcttcaccatgccattgcttgtcagcactctcacttcacgccctatgcgcttttcatattgcctgagcaccttcaaaggctcttccattccgggagatgaaacttccaattcatgcttttcaaagataccggaaccttctaacacctcatgcaaatgcctcgtgagcgcaatacattcgctaatcgttattcccgcaggcttgtcaatcagcacaatgatctttgaagggcttgctttaatatccaccaggaatatctcagtccctgcaatcttctgctcaatagcctgcccaactttctctttcagctgatccgtcatctaaacttattattcgcaaaaatggggacttattggtccccacgttctttcaaatatcgatgcaaagatacagttaattcatttaacaaacaagagccgttcctgccaaaaaacaaaccccgccccgatattcatcaggacagggtttgagcaacaacctctttgcattttaaatgctaaacaggctcacattcacaacctccgagatagcgccgctaccttcgttgttcacaggaatgatccagtaaaaccatgtctgaggagcaccggtatggttggtgtcaacaaactttgttttcgtgctggtaccaatctgcacggctgcagagaacaccgccgttgtgcccttcatgatcaggtaatttttaacattacccttcgtgatcacattgagcggcttcttccacaacagcttcacctggtttggattgtaccttggtgaaacagcagcgtgaaagttctgcactgcctccaggatgccttgcggcgaccggtgattggttacatcaaagccactggtgccgagaatggcagccatgagcgcataatcactgcctgctgcagtttgtgcggtgttctgcacatactgagtcaacgacttgagcgtttgcgcaagcgtgatcgccttttgacgtaaatccagcaggtcagcgtgactgccacggttacctttaggcccccacactcctattgctgctacaactgatgcaatatcagactgcaaagacagcactgtgggtaaaggtgttaaaaaattgaggttaccagatagactggaagccacgcgattgccaagattgacaagccctgcgtaatttttgggacttaatttaattgaagcaatgggcttcataactttgttggcagagtttaacgagctgccgccgctctttttaattgtttttaatttttgccccgttagtttggcgttcgactgagctctcgccgaagtccgaagaaaaaggagcttattcttctgttaattaacggcacaaagatatgggggtgcaaagcccggttacaacttttttgatgttcatttcagttcatttcggttcatttgcgttcatttcagattctgccctatctttgactgctttttaaggcatgaaatatgaaaatagacacactacatctggaacgttgcattgccaccttagacaaagctcatgctttactgaaaaaagcagaccccgaaaacattgattacgatatgtatcgttctgcatgtattaatagagtttgaaataattatagagcaaagcggtaagctgcttcgcaaagcgttgaagccatactttcattcgtcacaagcagtggacaagcttgtttttaaagatgtattccgccacgccctgcaacgcgctattattacaacggatgcatgcgaacgatggctgcaataccgcgacaaccgcaacaacacggctcatgactacggaataaattttgccgaagaaacattagttcttctgccacagtttattaaggatgctgctgaccttgccactgccatcaaaaatttaaaagaaagctgacatgctgctgcgccaaaaggataaacaaaacctgctcaaattcttttccgaactgaacattcccgttgaagtgtgggcttacggaagccgtgtgaatgaaacggcacatgaaggcagcgacttagacctggtaataagaaacctgtcccgtacccacgggatttcaccgctgccctcagatatatacatgaccttgtgcgaaaaaataaaagacagcaacatacccgttttggttgagctgcgagattgggcaatgctgcccgaaagttttcaccatactatagaacagcatcacgaagtgctctttgataaccgcaacttatttaccccggcaaaccaacaaaacacagtgaacgaacctccggctgaatacaaaaaaaggaaaaacgattcgggcgatgtggagaataaatgactaaccagccctcatgatttgggagaaacgtgaaggggttgtctcgtcctgaaaaatgtttacactttttttaaaaaattaatgaggtacagtaaataacgtgccacacaacaaaaataagccccacggagtacgcgaggctcaaggttttcaccttcggcatatagccttattgtgataagattactaaatttgaacgtcaaaggtaaaattcttttttgataatccaaaataaaatatagcttgcactttctttaacctctaaaacataattatcatgggcaaaattcttggacttgatcttggaactaattctattggctgggctgtcgttgaaaacgactcaactgaatttgagctattgaataaaggagttcacattttcagtgaaggagttaaaattgaaaaaggtattgaaagttcaaaggcctctgaacgaacaaaattcagaagtgccagaagaataaagttcaggcgcaaactcagaaaaattgaaacattaagggttcttattaataatggcatgtgtcctttgtcaatagatgaattaaatgaatggaagagaaataaaaaagactatcctaataatccggaatttctaaaatggcttgcaacggatgaagatgcaggcattaatccttacttcttcagaagcaaggcggcaagtgaaaaaataaaactgtttgatttaggccgtgcattctatcacatgtcgcaacgaaggggctttttaagcaaccggctcgatcagggaagcgatgaagcaattgatgatactagaaaggagctaattaacttaatagaatttgaggaaaataaagaagaactgacggcttcattgaaactgctgattgaaaactacaagagtgaagattcagaagataaggcagtaaagaatttcgccaataagttttcaaagcatttatcaaagtttagtgaaaagccttttgaagaactaaaaaaggaattacttatttttttaaatcggaaagaaaatttaggattagtaaaattaaagatttcagaattaaatgaactgataaaagaaagcggctgtgagactttaggacagtatttttatgaggtatataaaagaaaaggcaaaatcaggaaacactatactgcacgcgaagaacattatcgtgcagagtttcaaaagatttgcacgatgcaaagattatctgaattactttgtaaagatttagaagatgccattttctttcagcgcaaactaaaatcacaaaagggattaattggcaaatgttcctttgaaaaaaccaaatcccgatgtcctgtttcacaacctgcttttgaggagtttcgcgccttgcagtttataaatagtattaaagtaggggaaactgaaaatgggaaaaaagaacctttaactgcggaggagagaaaacaaatctggtcaaagtttattcgtaaaagcaaacccactttcgatttcgaggaaatagcaaaagaacttaccccaaaaggtaaatcaaggttttttaattataaaaataacgcaaccgttagcggttgtcctaccattgcgcaattttcaaatatttggggcacagattggaaaaataatatttatgaaaagtatagcaacaaggccaaaaagaatggcacaaaaacacaagatgaagtaattaatgatatatggcacgtgctattcactttcgacaaagaagaaaagctgcaagagtttgcaactactaagttgggacttgattcaaagcaatcaaggaaatttgccaaaataattctaaaaaaggattatgctgctttaagtttaaaagccattcataaaatactcccttatttgcacgaaggcttgatttatccgtatgctgtttttttatccaatctcgaagaagtaatcggcaaagagatatggaataacaaagaaaatcaacaatacatacgtaaagaaattaaattgctaattgacaaccataatgaaataaaaaaacgtgaagggatcgtaaacgatttagttagcaattttaaaaaagaatttaacaattcaagcaaagattatgtgcttgatgaaaccgataaaaaagaagttagaaaaaaaataattgatgtgtatggaaaaacttattttgaagcatttgattcaaacacacaagctgaaatcattatatggattcaaaacaaatatactgaacagctaagaaaataccgcggtgagtttatcaaaagcaaacgcattgatgaacagattgcagactttttaatcggtaatttcaatgctgatgcaaaagcattatcaaaactttatcacccctccaacattgagaagtttagaactcctgaacgaaataaagaagatgataagctttatttgcttagccctgcaattccatccatcaaaaatccgatggccatgcgcaccatgcaccgcttgcgcaagctcgtaaataccttaatcagggaagatattgttgatgaagaaacaaaaattcacattgagcttgcccgtgaattaaatgatgccaacaaaagaaaagccatacaggattaccaaaaagaaaggcaaactgaaagagaaaaatatatcggtgaaataaaaacattgtatatggagcaatgtcataaagacattgaaccgacagatgacgatgtattaaaataccaattatggacagagcaggaacacatttgcctttatacaggcaagagcattggcatttgcgacttcatcggagcaaatccaaatttcgacatcgaacacaccattcctcgcagtataagtagtgacaactcacaggaaaacaaaactctttgcgatgttaattttaacagacaaacaaaaggaaataaaatcccttctgagttggcaaatcatttagaaatattaccgcgccttgccaagtggaaaaaaacaattgctgaattagacagcaaagtacaggcgcgtaaaaaagcaagaggcattgaaaccaaagagcaaaaagacaagcgaatacggcaaaaacattatttcaaattgcaatatgattattggaacgggaagtataagcgttttgaaattatagatgtaacaaaaggatttaaaaacagccagatcgttgacacgggcatcatcaccaaatatgccaaagaatatctgaaatccatcttcgataaagtctattccgtaaaaggtgaaatgactgccgagttccgtaaactatggggtttgcaggatgaatacaagaagaaagaacgcattaaccacattcatcactgcatagatgctattaccgttgcctgcatgacaaaggacaaatacgatatgcttgcctcagtttaccgtgctgacgaagaaaaccacaaagatgaagtgaaaaagctgctgcgcaccatgaaaccctgggaaacatttacagaagatttaaaaaccatcgaacaggaagttttggtttcgcatcatacgcctgacaatatgcacaagcaaagccggaagaaaataagagtgcgtggaaaaataaaaagagataaaagcggaaaaccaatatatcagcaaggagatacagccaggggttctttgcatcttgacacattttacggcgctatattgcaagagcaaacaaataaaaaaacaggagaaaaggttttagatgaaaatggcaatggattactggcaataaagtatgtggttagaaaagaattaagtaaactaaaagaaactgaacttgaaaacatagttgatcctgttgtaaaagaaaaaataaagatggccgctgctactgaaggatttaaaaaagcgatggaaggctctgtttggatgaataaagaaaagggaattgaaataaaaaaagtaagagtattcatgccttccgttacagagccattgaaacttaaagcgcatcgtaatcaatctaagcatgagcataaacaaagctattacgctttaaacgacagcaactatataatagctctatacgaaacaaccaacgacaaaggaaaaataatttgcgattttgaaataataaataacattgatgcagctgcggctttaaaattatctaacaaaacagatcatccaggatcatctcttgtaccactaaataaagaaattacaaacggtaaaaaaaaatacatagctcctttaaaaacaataattaaaaaaggattgcatgttttgttttacaaaaactcacctgaagagttaaagtcattaagtaagaatgaacttactttgcgattgtatagaatcgtaaaattcgataaatcaggacgagtttatttcagacctcataatgaagcaagaccagcaagcgaattaaaagaaagctatgaattgcaatatgataaattagttgagcaaatccctgtttcaatcagaaatttaaacgctttaattgaggataaagattttaaaatttcaatcactggtgaaataactcctgtttatgctaaagcgatccctctacttcagtaatccttttcatctcagcacccgccttcagcaattagttatcactcaaaaagaaactaagcaggagactactgtgcctattgaagatattggttttattattttagatcatcgcgaaatcagcattagtacgacacttattaatcatcttaccgaaaacaatgtggctgttgttttttgtgatacaacacatcatccttcgtccatgattctttctttagacgggcatcatgtgcaatcggagagattcaagcagcagcttgagacggcggagccgttaaaaaaacaactgtgggcacaaacaattaaatcaaaaataaaaaaccagcagcaactatttgagctgcttggactggaaacgcagccattctcctattttatttcgcaagtaaaaagcggggacacaaccaatgaagaagcccaggcagcccgccactattggcagtatctttttgccccggtaacgttcagacgggatcgttttggagaataccctaataattatctaaacttcggctataccattcttcgttcggctgtggcccgctcattggtgggttcaggattattgcccacccttggcatacatcacaggaataaatacaacgcttatcaattggctgatgacatcatggagccatatcgtccgtttgttgataaaacagttgtaagcatcatgaaagaatatcctcatgaaaaagaactcactaaagaaataaaagcgcaactaattggcgtgattgcaaatgatacccaaatggacgattgcacaagccctatgatggttgctctttcaacaactactgcatcgcttgtaaagtgttttgcaggagaagagaagcaaattaaatatccggcgcttatttaactatgtatgctgatgacactgctaataggctaaatgcttaccgcattatgtggttgtttgttttttttgatcttcctactgaaacggccaaagacagaaagaattatgcacggttcaggaaagacatacagtcagacggcttcacaatgatgcagttttctgtttacagaagacattgtgcaagcggtgaaagcgcagacacgcatgttaaaagagtagaaaacaagttgccacccaaggggcaagtaagcattcttcaaatcaccgataagcagtacggaagcatagtcaacttttggggaaagcatagtgaccctttgccgcctgctcctagtcagttagaacttttctaaaaaaaaattaaggattagccaaaccttttttggctaatccttaattttttttctgattctccgccctaatcgcttcattacaagaagctcacagcagcttggattatggcgcatcaaatttagtaatcaaaccacaactgcaatttgttgtgtttgaattacatctaaattatggcgcatcaaatttagtaatcaaaccacaacaacatattcaatacatgtttctcacttgtaattatggcgcatcaaatttagtaatcaaaccacaacaagaactgcaacaaatgtataattgttacaattatggcgcatcaaatttagtaatcaaaccacaacaaggaagtgtcgggctatatagaagtttacattatggcgcatcaaatttagtaatcaaaccacaaccaggcgtgagttggttcaagcactccccccattatggcgcatcaaatttagtaatcaaaccacaactgcactaattccattgcctcgcgatgtaacattatggcgcatcaaatttagtaatcaaaccacaacttcaaatcaatagtagtccatctgtttaatattatggcgcatcaaatttagtaatcaaaccacaactaacggattgttggtttggcttgttagtttattatggcgcatcaaatttagtaatcaaaccacaacgccttaacgaaggctgcttcggttgaagttattatggcgcatcaaatttagtaatcaaaccacaacgtaatctcatcctatcacgccggacttgtcattatggcgcatcaaatttagtaatcaaaccacaacaagacttcatatatcttcttcagaaagtccattatggcgcatcaaatttagtaatcaaaccacaacttatctgttagctatctaaagagataggttattatggcgcatcaaatttagtaatcaaaccacaacttacttaaactattcagtctccggcatttaattatggcgcatcaaatttagtaatcaaaccacaactatttttgccttgtaattacaacgtagtaaattatggcgcatcaaatttagtaatcaaaccacaacatgatgatgatgttatgcttaccatttgctattatggcgcatcaaatttagtaatcaaaccacaacaccagccttacattagggtttcctctgtagattatggcgcatcaaatttagtaatcaaaccacaaccgtataacctgttgcacccgcaactgaagaattatggcgcatcaaatttagtaatcaaaccacaaccgattgcactaaaggaaagtgatattatttattatggcgcatcaaatttagtaatcaaaccacaacacaatgcgatggtggaacatgtcagggttaattatggcgcatcaaatttagtaatcaaaccacaactaagtgctctgtcaagtgctttatactgtgattatggcgcatcaaatttagtaatcaaaccacaactaagttagacggtgtattatctgaagaagaattatggcgcatcaaatttagtaatcaaaccacaaccaggcatttgtagctttgacggtgatacttattatggcgcatcaaatttagtaatcaaaccacaaccctgcaccgccttgtgtaccctttgtttttattatggcgcatcaaatttagtaatcaaaccacaaccatgaaagcgtttgcatctacatttctcacattatggcgcatcaaatttagtaatcaaaccacaacatatatactactttgaaacgacagtcctgtattatggcgcatcaaatttagtaatcaaaccacaacgcctgaataaaaggagcatagctttgcgtgattatggcgcatcaaatttagtaatcaaaccacaacacggaagtgtctctttcgatttacgttcgcattatggcgcatcaaatttagtaatcaaaccacaacaggcaaggggtagttcacacacttagtccaattatggcgcatcaaatttagtaatcaaaccacaacgctttgactttagcgcgcgcctgatcaatgattatggcgcatcaaatttagtaatcaaaccacaactaacggattgttggtttggcttgttagtttattatggcgcatcaaatttagtaatcaaaccacaactaatatgctttgtgtaaccattctttccgaattatggcgcatcaaatttagtaatcaaaccacaactaacgtcactgtagtgtctaatatttgaaaattatggcgcatcaaatttagtaatcaaaccacaacggacaggggttgcgaagttgatgttacctgattatggcgcatcaaatttagtaatcaaaccacaacgttcaagtgtctttggctcatcaggtagttattatggcgcatcaaatttagtaatcaaaccacaacggtcagtcaaggattttgatttctcttggtattatggcgcatcaaatttagtaatcaaaccacaacgttatacttaacggaagctaacgcgccaatattatggcgcatcaaatttagtaatcaaaccacaactgtgactgtttgtaggaatgtgggagcagcattatggcgcatcaaatttagtaatcaaaccacaactgcccgtctttggataattcgggatattcctattatggcgcatcaaatttagtaatcaaaccacaacattacaccatgatgtatttttgcgccttttattatggcgcatcaaatttagtaatcaaaccacaactacctatatatccttttgaataattttgagattatggcgcatcaaatttagtaatcaaaccacaactcaaagcatgaccatttgccgttggatgcaattatggcgcatcaaatttagtaatcaaaccacaacgcccgcaatcatacaagagaaccaattgagattatggcgcatcaaatttagtaatcaaaccacaacaggcaaggggtagtttaccttctcaagcagcattatggcgcatcaaatttagtaatcaaaccacaacaagttgaaccaaatgaagtttcaccgcctgattatggcgcatcaaatttagtaatcaaaccacaactcaacaaagattctgtaatattgcagaatcattatggcgcatcaaatttagtaatcaaaccacaactagcaagccacaccacccccgttgtgcggaatttgtaattccgtgcttta

SEQ ID NO: 1598 - DNA, 13857 bp, synthetic construct
  misc_feature 1..13857: note = Synthetic
  source 1..13857: mol_type = other DNA
atccggccctcgctgaccaccagcacccggtctgccatgcccagcacctcgggcagctcggaggagatcatcagcacggccaggccctccccggccagttcggagagcaggcggtggacctcggacttggtcccgacgtcgattccccgggtgggttcgtcgatgatcagcagtttgggatcggtggccagccatttcgcgatggcgaccttctgctgattgcctccgctcatggtggccgcgttcatggacattgccgctgtcttgacctgcagtcgcccggcccagggttcggcagcgcggttctcggttgaccgcgtgatcaggcccagcttctgcagacggctgcgaatggcagctccaatgttgtgccccaccgaggactccaggatcaggccctgttgccggcgatcctcaggaaccagcgccatcccggcgttgatagccgcagtgggccggttcttggggatcgtcctgccgttgagccgcactgtgccggagtcgtaggggtccacaccgaagactgcgcgggcgatctcactgcggcctgccccgaccaggccggccaggcccactatctctcctgcccgaacggtgaagctgacgttgtggaaggtgcctgtacggttgaggtcctcgacctcgagcaccacatcgccgatctcagcgggagtcttggggaagagctcggtgacttcccgcccgaccatcatggtgaccaattcatcattacttgtttcctcggtcttcacggtgccgatataggtgccgtcccgcatcacagtaacggtgtcgctcaggtcaaagacttcgtcgaaccggtgggagatgaatacgatgccgcgcccctcatccctgaggctgcgggtcacggtgaagagccgttcaacctccatgccggaaagcgcagcagtgggctcgtccatgatcagcagatgtgcgtccagggagatagctttggcgatctcgatgatctgctggtctgcgatggagagcccctgtgctgggcggcgggggtccaggtctacgccgagccggtcaaaaatgcgctgggcctcatcgaccatggcctgcttgtcgatgcgccggctgcggcccaccggctgccggcccatgaagatgttctccgtgaccgataggtcagggaacagcgtaggttcctggtagatgacggcgatgccggcgtctttggcatcggcggtggaggagaactgggcctctttgccccggaaccggaaggtcccggcgtcccgcttatgcaggccggccacgattttgatcagcgtggacttccccgcgccgttctcgcccacgagcgcatgcacagaaccggggtgcacggtgagagtgccctcagctagcgctgtcacactgccgaaggttttgcgcacaccctcgagttcaaggacaggcgaggtctgctcagcgaccatgaaccctccagatacgaatgatggtggtaaccgatacttcagaggtcggcagacttccgatgtaaatcgattcaataagtgacaccgatcataggatctgagtcactgagctgtcaatgcgcccggcccgccttcccgaaaagcagcggtattgttatccactatggcgatggctcaagttcgtgatgtggcggaacgggccggggtctctcccgcaacggtctccaacgcgctgaaccatccgcagcgggtctccgaacggaccttggccaaggtccatgcggctatcgaggagctcggctatgtccgcaacgacgccgcccggcagctgcgcgccgggttcaacccggcggtagggctgatcgtgctcgacgccgccaacccctacttcaccgacgtcgccggtggggccgaacaacatcttcgggatctgggcaggccgctgctgctgggcaactcctcccaggagagtgatcgggaagtcacgtatttgaacctgttcgagcagcagcgggtagccgggatcctgatcgcccccgtgggcaatgtgctgccgcggctgcggaagctgaagagcaacgggatcccggtggtgatcattgaccgtaaggcgggggccgatgaactgtcctcggtctcagtggatgatgagcgcggcggctggctcgctgcagaccacctcatctcccagggcgcgacccggattgccgtggtgggagggccggaggggctgcgccaggtccggaaccggctgcgcggagctcaacagcgggtgcgccagtgcgctgaggctgcggtggagtacatcgccacttcagccatggacgccgcggcgggacgcactgccacggaggctctgctgagccgggaggccaagcaacggccggatgcggtcttcgccaccaacgacctggtggccctgggcgtactgcaggtgctggtgcgttccggaatctcggtgccccaggacatcctgctggccggttatgacgatattgagttcgccgccaatgccacgattccgatcacctcgatccgccagcccgcagccgagatgggagagcacgccgcccagctgctgcagcgcgccatcgaggaccctgcctctccggtccagcacaccgtcttccagcccgagctgatcatccgagagtcgactcaggcctaagatctcctaccacctgggggtgtgctccaggttgttatgaacctgaaagcggtttcatttcagacagctatcaccgcggcagcaaggatcgtcacgggcagggccagaatggagctggcgaagattgtgtccttggctactgtctgaggcatccggtagtgcatgccgaacagcagcacgttctgtgcggtcggcagcgcggccatagctaccaacccgagcaggtctgtgccttccagccccgccaccggtccgcccaagagtagtgcgatcgcgggcatgaggaccaccttgccgagagtggccagcacactgtcgggtatccggctgcgctgcgcgaaaggatggctgcgcaccagcaccatcccgaagatcatcagcatcagcgggatagaggcttcaccgaccatcgtcaccggctcccagaggacagcagggagattcactccgatcagtgagatcaccgctccgaggattactcccacagtagtagggttcagcaccgaggagaggatcatcttcagccgagagccgcctggctcgtccttcgcagctcgacgggagatgaccccaaagatgagtaggtacatcggcgccaggaccagcagttgtgccagcaggaaagccaccacgggcgctgtggtgcccacggcatagatcgccacgggtacaccgatgttccctacattggcgtaggaggaggccatagcccctaccgcggtgtcggcggcagaacgcttcatcactagacagatgagggcaaagactagtgccgtcagcagcgcaatcgcgagagctaatggggtgtagagcccggcaaccacgcgaacgtccgtgccggccactaccaccaccatcagacagggattggtgacgtagtacaccagcggcaccaagcctttgtggatggccaccgctttgtctcgggcaactacggcgataaccaccccgatcagaacgatcaccgccacgatgctgaagccgagaactaccccacccaccgagtcaatggtcctctctccaggtcagcgggacttcctcctggtgaggaaacgcggcagatccggcccgccggcggcgtcgtgctcggctgaccctcagcgggctgatacgaactcggtgaaggcgtcaatgtacttcctcgcccgcgcagtggtctgctcatcggcggtgccatcctcgtggaatgtctcgccggtgacctgcacggccagcaccggggagcccatcagcttcaccccttggggcggtaggaactgccgcatctgcgcttgaccgttgatggtcccgaagcgccccggcgaggcgccggcaatgcccagcttcagaccagccagctgcccctccttgggcgggcgggagagcacgtcgatcgcgttcttcaccggtgccgggaatgactggttgtgctccggggagacgatcagcagcccatccaccgcagctacctgctccttgaactcgcgcagcacctgtgggaaatcggcatccatatgccggtcatagagcggcagctcagtgatgttgatctccaccagctccgcctgctgcggtgcctggtccacgatcacctgcgccaacttccggttgatggagttctgcgcaaggcttcctacgatgtacccgattttcaccatattcctaccgtaacgtcccgaaccatgcaccggctgagtacgctgggtccatgacgggacttgacgaccataccgagcagatcatcatgctggcctggtcgcggatcctggggcttcaggacggtgccctcgccgccgccacccccggtgagcggatcgaggcaggaaacgacgacgccgcggcagtcagtttggttcagctcttcggccgcactgccctctacgggccaccggaggttctcgccgccgcgcgccgagtccctgatgaggaactggccctggagtcacggctgctgggaatcatcagcgagcatcaccgtggggcccgcatgctgggtgaggcccatctgctctattgcgaggagccgccggagatccagggttcggagaaggtctccgtctccttcgaggcggagcatatccgtcagctgagcagtcgctgccctgcagatgacgtggctctctccgggattcagcaggctgagtggaccgcggcggtggtggcagaggccaccggtgaggtgatggccgcagccggccgagacacctggcaggatgtgctggggcacatcggggtgctcacccaaccggaccaccgcggcctgggcctgggccggttcgccgcagcggtcgccgtggaggaggcattcgtggaggggctggtcccgcagtggcgggccgccgccgaatcaccaggatccttgcggatggccatcagcctgggcttcacccaagccggccaccaaaccactgtcaccctggactgacaggtcgcgctgaacctctatgatcagccgcggggcttcatccgggtattgggcagcgcaggggcgggcagcggtgcggcctggccgggcgggaagtcgccgaactgcgggaagggccggccgtcccggtactggctgccggtcagcgcatcgcgcagcgccccaccgatgggttcgcccaaggcgccgggggccacctcgacctcttcctgggtgccgtcaggctgggaggcctgctcggtgagcacctcagagtacgacgacgtcccctgcagcttctctgccagcggggactcctcacccggggcctcaaagcccatctccgcctggtaggcctgccggtaggcggcaatctcctcatgcgatcgacccacgaagttccaccacatcacaatctgctcacccaggggttcgccgccgatcagcagggcgagcaccggctgctcatcagactgcaggcgcagcaccgttgccccggtgtccaccaccgccagatggtcggcaggcaccgggcagccgttgagcgccacagacccggagatcggcagcagtgcgtgctcgtggccggccggaatctcaatgtccaggacctgtccgggctccaagcggatctcagcaccggtgagcgggatataggtcttcaccggtgagcggtagcccagcagctcacccagaaacaccttggcctcccagccctgaccgcgcaccggctccgggtgatgggattccaggttgggctccacgaaccggtgctcctccgggaaggcgtaccagagctgggccccgtgcaagatcttagtgtcagcggtggagtattcggagtgactgatcccgcggccggcgttcatcagggccacctcccccgggcggacggtagcccagttcccggcggagtccaggtggtcgatccggcctgagaacagccaggagcaggtggccagcccggtgtgcgggtggcgggggacccgcatcggggtggcctcggtgaggtcatcaggtccgtagaagtccaggaagcaccaggcacccaccagcgagcgcgcccgctgcggcagggtccggcgcaccgtcatggcccgcggcccgccaagcggcacatcacgcggctccagcagctgcaccccgttgctggcccgggtgataccggggctcagctgcccctcgccgggggcagtgccaggcgggccggcggcctcatccgcacctccggagaagtcgaaggtgtaggggccgttgatgcagacctgctccttgggctgcgcctctgtattgctcatatttcattctttcaagattgaagcaagtggtacagggggcgcagccggagcccagccggctcagtcctgggctgcagtgactttgatttcggatgatgctaactcgaacagtagcgtctgcacgcagtcctagtactgaccgaggtgccggtattcccgttaactaacctcggatatctcgaagagacggcatgtggtcgcccaacccccaaaccatccactgtttggggccggtgcgcaccaaggtgacgaagactgcactgggcaccgccattggggcaaaggtccgcgatgactgtgcaacctccggaatgaacctcatatatgcaacttcctccggagcgtccacggcatagtaaaccttggacgccagggaataccctctgagcatctcatcgacccactcgtagtctccgaaggcttccggtaaccatgtcagcgagtgcagcacttctttcgccgcagcattcgtgaaccggtcagccaaggcagtccaccatacatagagcacatggtcaggtttgccgaagtcaggctcccccatcgaccccgcgtagggggactgcatcggatcagcagcttcgtaggcgggaagtgttgtagcacgctgcccccagtggttgtggagagtattggcggtcatgggagtaatcggcgcaatccctgaaaggacgccccgcacgtccatcggagggcggcgcatacgtttcgcttcgtactcaatgcccgattccacagcctgttgatgctccgcccagaggcgaagcagaaaatgatccgggtgccggaccggaacatcgccaggctggctcgactccgcgggaaagtcgctaaggttgaacgtcaccaagagatcggcagtagcccactgagccgccgcatagacatgctgatccttgggatgacaccgtgggtcaccggtgaaatcttcaagcccaacgaccgccgctcgtggaaaggcccgccgcatggcggcaagccgtcgcgctaccttgtctgcccctaagccgagtttattgaccagggtgcgttcaacctcatcgagaatccggtcagaccagcgaggctgaaaaagatcgcgctctgccagagtcagcaataagctgctcagccgctgaggcaccaaaacattggcatccagcaatacaactggagcactcaacgcgtggacacaacctcatcgggcagctcagagtcaaaggtttctgccaaatcctccaaagcctgttttctggcctgagcttctgcaaccaggtattcctctagcgcctgcttgggaatgcgacggtgtgtgccgggacgctcatagcggatgagcccttcatcaagcatcttcaccagtgttggtcgactgacccgcaggatctctgcagcctgttgcgtgctcaagtactcgggacgtgcgacaacatctacctcgtcacctgccgcaatatgacgcagcaactcacgcagcccatctttgagctcatcactgagtggaatttcgcgcccgtcgattgccagtgagcgagcagactggactaagtccgctgcctgacgagcagcatcgcgtggggtgagcgtcggtgttgccatacccctatggtaacaaacgaaagaaacgaaaatcccaaaacacgcaaaagcacctgcttctcttcaggattgcgcccagattgggccgaggcgaagagaagcaggtgctccgcggcaggaacgcgaaagctcagtcctgggcggcagtgactttaacctcgatattgccgcgggtggccttggagtaggggcagaaggcatgggccttctcggccagttcctcggctgcggcctggtccagcttaggcagcaccacctcgatctcggcggccaggccgaacccgccgtcatcatcggcgccgatgctgaccttcacgcctaccgatgcatcggtggtgtcgtagtcgtcgccggctaccttcttggtcgcgcccaggaagcaggcggcccagccggtggcaaagagctgctcgggattgattccctccccggagccgccgagctccttcggcggagccatggtcaggtccagagcaccgtcagcggtgcgggccttgccttcccggccgccgccggtggccagggcttctgcggtgtacttcacgtctacggccatagtgggctcctccttgggtagttgcggtgacgatgcctggggcggcgtcgtcgtgctttcggtactagaccatcacagtatgagctaactggctaggggtgatattcagctgtgcgcgggaaagagcagacagtggcagaattggagctcatgcgtgaaaattccgcccgctggttggctccgggggatcccgaatcgattgctgcggcactgaccacccgcttcgcccatgtctatgaacgtgatgccgcgggggtgtggttcgcccccgggcgggcgaacctcaacggcgaacacatcgacttccatggcggccgctgcctgccggtggccctgcgccatggcacctatgtggctgccgctgccaggactgacggtatgctgcggctgcgcaccctagacccggacctggacaccggagtggtggagatccccgacgccgctaactcaccgatgccggagagcgccccttcctggaccggctatgtttccggggtgctgtggtccctggcccaggtgggtgaggagcttccggacctggccctggagcctggctatggggccgatgtgctgatccgctccacgctgccgatcggcgggggcctgtcttcctcggcctccttggagtgcgcggctgttctggccttcgccggcacgggcacaccgctgggagcagagaatccagatgaggagctcaatgaggcgctgaccgatgcgctgcgcgccacccttgcccgggcctgcatccgcgctgaggtggaggtggtcggggcaggcaccggcgggctggaccagaacgcctccctgcgtgccgccaaggacaagctggtctccctggactgccgggacttctcggtgacccgcacagatctgacatttctgctgcgcgactaccagtttctggccatcgacaccggccagccgcatgagctgaccgacgggcagttcagctcccggcgggccgaggcagaggctgccgtggcggtgctggatgtggaccggctacgtgatgcgctgccggcaaggccgcgtaagactgatgtggagctgctgctggaacggttcgaccaggcggtggaggccggggcagacttcggcggcctcgagccaggggcctgccggcgtaggctcaagcacgccctgggcgagatgctgcgcagtgagaagatccatgccctgatcaccgctgaggcgcatggggtctcccatactgcgcaggtgctgggcgatattctctctgccggtcacacctcgatgaaggagcaggcggaggtcagcttccggctggctgaccaagtggtggacgccgcggtgcagttcggtgccctgggcgcccgcctgatcggcggcggcttcggcggctcggtgctgaccctggtgccccgctcacggatcaacgacgtagtgggcgtgtgcacgcgactgtctcccgatatccgcttcctggaggtcaccccctccgccgctgcacgtgcagtgtaagccggcgagcggcgtcacattctttcgagcttaactcaaaggttcccagctagctttcaggtagcgttgtcgaaaatttagacttcggccaatggggacgcaatgatcagagtcgagaagcccaaagaccgcccgtgtaagtaccgaatcggaattgacgttggccagcgaggcataggcctcgctgccattgagttggatgacgacggtttccccattcagctgctctcggccctcacccatcggatggacggcggcatcctgcctggcacggagaaatctccagagagcaggaaggccaaagctgggctggcccgccgagtgcgtcgaatgcgaaagtatcgcaagcaacgactccagaagctcgacaacaagctccgcgagctcggctaccccatcatcgacggtcccgccacctatgagccctggcaagctcgcacacggctggtggaaggccggattactgaccaggagcagctgaaggctgacctttccatggcactacgccacattgctcgacatcgcggatggcgcaacccctggctgacctggaacacattctgtgaactgccagtgccgagcaataaccacaagaagaacatcgacgccgcccgggaacgtttcgggcgggactttcctgaggatttcacggtcgggcaactcggcgccctcggcaacgatcccaccatcgtcattcgtccccgaaaatccaagaacagtcggacccagaccgccggcgagctcccgctctttgagcacaagctcctgcaagaggaccagctggctgaggtggagaagtactgggatatccaggacctcccagcggacgaccgggattcattgatccgcgtcgtgttccatcaggagaagccgcgggttccgcaggagaacgtgggcaaggacgaactgccgggcatgacgcagttctaccgggctccgcgtgcctctctggagttccaggagttccgcatccgggccgcggtggccaatctcggcatccggggaggccgaggtttccgcaaactcaccgatgaagagtacgacgccgccaccaagctcctcctcaactggcataagagtcatctgcccaccgaaactccggtgtgggctgatgttgctgaatgcctagacgtctcgccacgggcgctgaagaccaacgcactggatgacgtcgtcgggaacaaccccccgatcaaccgaaccctagacctgctggagtatgggatcgatcagctcccagccaaggccaagaaacccatcaagaagtggtttgccgaggctgacgctgagctgatccaagcattcgtctcctggctgatcgacaccactgacgggcaggatgagctgttcgcacagaccgggctcgatgacgtcgtcaccgagtgggacgagaccgccctggagaaactggctagcatcgaactggagaacggccgggctgcctactccactcaatccttgaaacggctcaatgcaaggatggctgggcaccgtgaagggctgcatgaggctcgcaaggccgtctttggtgtggatgatacgtggaaaccgactccaccttcactggacgagcgtactgaacatcccactgtggaccagaatctcaccgccatccgacggttcctcctgggttgtgttcagaactggggcttgcccgagcaggtcaatctggaacatgttcgtagcgccttcatgggcgcggctgccctggaggagtatcggcgcgaacagcgcaagatccttagcgaccgagagaaggcccgcgaggcgctgaggggtgtcctctcccacgagccgacccggcgcgacgcccggcgccacgagtacgtgcaacgccagaactcgcaatgcgcctactgcggtacaacgatcgacgcgaagtcctgcgagctcgaccacattgttccgcgggccggaggaggtgcctcgacccgggccaacctagtagcggtctgccgaggttgcaatcaggacaagggccgtgtgcctttcgctgcctgggcgtctcgaacccagcgtgaaggggtcagcgtggatgaggctatcgcgcgggtcaaaggatggctggggcggggagcgaatgcctcagagaggaagatcaaccgcgagactattcagcgtctgcgccagggcgaagaggacgagccgctggatgagcgcagcatggagtccactgcatatgcggcgcgtgccctgcgcgagcggattcagaagttcctcacggatgctgctgcgcagctgggcgttgcggcacccacagcgaatgtgtaccgcggttccgtggtgtcggcggcacggaaagcctcagggatcgactcgatgatccatttgcgcggcaaggacatcaaggatcgcggtgacttccggcatcacgcggtcgacgccgcggtggtttcactgatgaaccatgccgtgggtcaggtgctggctatccgtgacaacatgcgcaacactgccttctgggtcggtgagcaggagtgggagaaaggttggcaacgcctctacggcgaacgccaatcgttcttagagtggaagctgcgagcccagcgcctgggcgaggtgatccgtgatgcgatccgaaacgatgaaatcgccgtgatcaaccctctgcggcttggccgaaatgtcggtccggtgcacgaggacactgttcgtacactgaagtccaaatccttgcataccgagtggtcagccaaggacgtccagcgtattgtcgacccgaagatctatttactggtcaagaaggaactcgaagggaccaaagcaccccagttcctttccgaggcgctagtaggcaacctgaccaggcgggttggcggagaaattcttacgttcccaagcgattccgcccaactgcccgtacgaggtggggccgtggagctcggaagcgtccatcacgcacgcatctacgcatggaaaaacaagaaaggggccatcgaactcgggatccttcgggtttttgcaggcgaaattgcgaagatgtggcccaaccctaaggtcgaccttctaaccgccgcagtcccggaatggtcgatgtccaggcgggacgtgcaaactaaaaccgaagcggcgctcagttcgggaattgctcgacaagtcggctggattgctccaggtgatgagatagaagtcgacgtttcaatggcagcccagggcaaagacaagttcgcttcattcctgcgatcgacacccgaacatcggtggactgtctccggactgaagatgagcagaataatcagcctccgcccactctttctcagttctgagggcttggacaataattcggacccgctcctgcgggaagtagtagaacggacacttgtgaaccctggagtggtactacctctagtcaagattgtccgtcgcgatgctttaggccgaccccgccacttctcccgtcatctcccccacagcttctcccctatggaagaagccaagaggttactgggatgagctgatggcggcgtggcaggtgctcgatctcctcaactacgagggaaaggtccggactgagcgtggagcgttcagtattgacgggcgccggattccattggagtcgctctctaccgcactgatcggccccaagtgttctatctcctccggcgtcccgcaccatgccgccaaatacgacgtcgtggtcctgttctgtgactggaaaggggaaccactctctgctctgctgccgtggtcagacaacacacggaccggagcacgaatgcaggcccaggcgaccctttcggaacctcgtcgaaagaacgcctggatgcgcgtgatcaaggccaagatcacgtctcaaggcagaacactggagatggcggggaagaggagggaaggtcaagtcccgtgtagtggtgtaactggctctccgagttgctgggtgattatgcggcttcgagttcgggaaggtcgtggtggtggtcttcgtgttcggtggcgtcttggcagcgggcgaggacctc

SEQ ID NO: 1599 - DNA, 23165 bp, synthetic construct
  misc_feature 1..23165: note = Synthetic
  source 1..23165: mol_type = other DNA
aagctccaggtgcatggtatccacctccgtgaaacgaggcccctcccattcagggccaaaaaccaaaccagaaccgatagcgaatcatgaagcaaaaaccaggccagccaccaattttgccggaccccgccgcagccgtggagccccacagccaccggttcttccgcaacacggcctgccgctacttcccctgccaccagggggtggctcccgaggaattcaactgcctgttctgctattgtccgctgtatttcctgaaggattgcggcgggaccccggacatgagccgggggatcaaggactgcaccccgtgcgtgaagccccatgcggccggggggtatgaccgggtgctggcgcggttgaagcgggagtttgagaagatgcggcaagccacaaaaaaatcccctgggtcagagccccaaggggattcaagcccgcgttgatcggtccacgattccgggaagaccgaccggacgggtcacgttccgggacagacagtcccagattggcgcgcaacggagagaatgaactctttttattcctctttcttggttcctgatatcccaggaactcccccctagaacacctcggcctcgaaccacaatatctccgtgtccggctccttccagcagtgcgggccaaggcccgccttgcggcaggtgtgctccagaaaggcctggcggtcccagttccattcgatgggcacctggggcaggagcaggcccgagcggccgtgctggcgcatgatcagcccgtggcggcccacctccaccagttccgggtccgggcaggccgtgaccgggcttaagatggagatctcgatctcggcctggtcgaactcggcctgggtcaggggggggaagcgggggtcttcgaaggccgcggcctgggccatctcctggatggtccgccataccgggcggccgccgtggatgaagccgatgcacccgcgcaaacggccccggaccttcaaggtcacaaaggcccccagatgctccgtaagccgctgggtcggaggcttggcgggcaggtccacggtcccgggcgcgaggcggctcactatggcccggcgcaccaggtccttgagaaaggccttttcctcgtcggtcagggtgaagcggaattcctgggccatgagtcctccctgatctctatttgagcatccgccgccagttgtccagaatccctttttcctgaagcactcgctcgctcttggcgttgatcttctgggcctcggccacggaccttgcggcctcgtccatccagccgccctggcgcaggctctgggccgccagcacgtacatgttctcgggcttgcccttgtagatggaggcggtcaggtgctcgtactcctcgccgaacacccgccggaccagctcgttgtccgtgaagatgaagcgggccaccagggggttggccggatgcccggccagatatacgggcaggagcttgcggcactgggccatgatgaagcggatgcggtcgatctcccggcgcatgctctccttggtctgggacaggaccttgaacagctcgtcgcccacccgggtctccagttcgggcaacggagcgcgcaggagattctcgaacatgggcgcgtagttcaggagctggtaggagtcctccttgagcttcatggtctcgtggaagatgtagcccatgccccaatccaggaaacgccccacggccgtgctctcgggcttgttgcggaacacgtggtgggccgagtccttgagccgccacaagagccccttgttggtgggctggcccagaagctcgtccaggaccttgaactccacccgggtctccaggtcgaaaagccgggcctgactctccaggcactctgccgccaggcagaagcccctgaacacgtcccggatgaactccggctgtttgtccctcaaccaggcgctggacatggctctctcctatctcttgcgtcccttggtctccatgcgcagggccaggacggccagctcggccaggcgttcgtccaccagccggaacagggagttcttgggaaagcggttgttcttgcccttgcggcctgcgggcaggccggtcaaaatctccatggcctcctcgatacttttcaccggggagacgctgaaggtcccgagcgtcacggcctccagcacctcgggcttgagcatcaggttggccacgttgtccgccgggatgatgaccccctggcggccggtcaggccccggcggcggcagacctcgaaaaatccctcgatcttgcggctcactccgcccacggccatgatggtcccggactggctcacggccccggtaaaggcgtaggacaggtcgatgggcacctggcccagggccgagagcagggcggccagttccgcgcccgaggccgaatcgccctcgatgcccgcgtagctctgctcgaagcagaggttgccggtgagcacgatgggcttgttctgggcaaagcggctgaccagatagcccttgatgatcatcatgcccttggtgtggatgggaccgccgagctgggcctcgcgctccaggtccaggatgccgccatgccccacgcccacggtgcaggagatctgatgcggcagaccgaattcgtagtccccgaacagggtcacggacagcccgttggcccggcccacggcctggccgccggtggccaccttgatgacctcccggtcgtagtcggtcatgaactcggcctcgaagaggttggagcggaattcccggctctgcaccgcatggcgcaacaggtccttgtccaccatcttctgcccggccatgcgggccagggccgtggcctcgatcatgcgctcgcgcagcagggggaaatgcagggagagcttgctctggtcctcggccaggcggcaaccaagttccagcagcccggccagggcctcccggtcaaagggcagaagctcggcctccccgatgatctgggccagggcctggaggtagcgcttgacgttcaccggggtgcgctcggccgtggactggagatgggccttgagcttgaagaatttggagaaacgctcatccccgtagagcagggtctcgtacatctcgtccgtgcccaccaggatgacccgggcggagaggggcacggcgtccggctcgatggtcttggcccggacctggtccggatcgcccgggtcctcgatgcggctctttcccgtacgcagggcgcgcagcagcccttcccaggactgggggttgcccagcacgtcctccagattgaggatgagaaatccctggttggccttgtgcaaggccccggccttgatcagccggaaatccgtgtacagggctcccatctcggtctcgcgctcgatgcagcccaagagattgaaatgggtgggatggtcctcctgcaccacgggcgcgcccgtggtcttggagttgtccacgaacaggttcacctcgtaacgccagaagacctcgtcggccgcatggggatcgggcggcgggccggactgggtgggcgcggactggggctgggactccttgggcatgaacagttcgatatgctccaggatgtcctggcgcagggccttgaaataggccatgagccgcttcaccggacgaaatttggccgccagggggttcaaatggcccgaaagcacggattcggccgtgtcccggtgcagggacagctcgtccttcttgaaccagtcctccttgcggttcatgcgccgcaaaagggtggtcatgcgcgagagcaggttgtcgccctggagtttgagcttcttgcgcacggccggggccaggcggtcgaaatcatcctggctgatggtcttgccctcgagcaccggggtcaggatgagcgcgccctgctcgtccatctccaggttgaagcccttgcgcccggccatgtcctccatgcgattcaagagcttgtcccgctcgctctggtagcgccggatcaggttctcgtgcttttttatgtgcgcttcctgggccaggcgggccggaatctgcttcttgatctcggacacggacttggccagaagcgttttcagctcccgcccctgcccggccggaagggacagggccgtgggccgatccgggtcctcgaaattgtgcagaaagacccagtccgggggctggggcagcttggccacgatgggttccaggaaattcttgacgaaataggtccggcccaggttggcctccccagccacaaagacgttgtactccccgccttttatggtcagggccaggcgcagggcctgcaaggcccggggctggaagggcagggggccggagttccgggggattgacctggagtccggaaagggtatcttcgcggggtcgaacaccccccggagcttgtgagcgggcagggtcttgattttgggcatggacagggcactccgaaaaaaaaattggggcatgtccccaggtccgagagtacggagtttgcgccaaaatgtcactaggaagcggcccctttcattccggcggtccgcgccctggcctgggccgggaaattcccggacgggaaatcccggggaaatctccatgcttcggctttttcccgttgacggggactggcccttgtggtagttgccgcgacttgtgaaggatggcgcaaagcccctcgggcacggggaaagtcctggaggatttgagccatggccttcaagatcttcaaggaaaaagccgcgtgggacatgatcggcacggccagcaccatgggaatgcacatggtgtccgggaccctggtcggattgaccatggggtatttcctggatcgctggctggggaccgaaccctggcttttgctgagtttcttgctggtcggcatcgtggctgggttcaagatggttatcgaagactcccagcgcatcctgcgcaagcagaaggacgaagacgatgataaaggcgtttgagggcataaaccggagcgtggagaccttcctgttccggcatgggttccagaggcgggaagtacgcgaactggtgcggaaccaggtgtacctgtcggttctggccagcctggccctggcccttctcaccggattctccctgtggagcgcgggctttgccgccggagcggccctggtgacgctcaatttctgggcgctggcccgcgtcgccccggaacttgtcaagatggagaagggcgctgtccttcccctcttggtgcagttctatggacgattgattgtgaccggcgcctgcctgttcgtgctcatcgtctgggtcaaggtatcggtctcggccctgcttgtggggatggccacagtgctggtcaacgccctgtcctggggtctcatgtctcgcatcgggcaaaaagtgaaggaggcgtaagggtatggctgctggtggattgcctcatccgttgatttatttcaacgaactcaaccacgctttggggctgaacgtgcccattcatgtctggtacacctgggccgtcatggccattttgttcaccctgtccctggctgtgcggggcaagctggccatggttccggccgggctccagaacttcttcgaagtggtcatcggggggctcgaggacttcgtcgtcgccaacatcggcgagaaaggccggacggttttcccgatcatggccgtgatcttcatcttcattctgggcatgaacctgaccgggctcgttcccggctgcgacgcgcccacggccaacgtgaacaccaacgcggccatggccgtgtgcgtgttcctctactacaactatatcggcttgaagacccacggcgcgggctacatccaccacttcatgggtccggtgaaggcgctctccccgctcatgctcgtcctggagaccgtgtcccacctggcccggccgctctcgctcacccttcgactcttcggcaacatccggggtgaggaaatcgtgctcatcctgctgttcaccctggcgccggtggtgggcaccctgcccatgtacttcctgttcatcctggccaaggtgatccaggccttcatcttcttcatgctgaccatgatctacttgaagggttccctggaacacgcccattaatcctgggggaaatggtctttcgaccacaacactatacactgtaaggagtttttattatgcgcaaatccatgaagaccgttctgagcaccgtggccatggtcctgttcgcctctgtcgctttcgccgctgacggcggcgccgtgggcccggtctccgcttgggccactgcttgtggcatggctttcgccgccggcctgtgcggcctcggccagggcatgggcctgaaggccgcctgtgaaggcaccgcccgcaaccccgaagccggtggcaagctcaccgtgaccctgatcctgggcctggccttcatcgagtccctggccatttacgccctggtcgtgaacctgatcctcctgttcgtgaagcccctgggcgcctagtccgaagccttacgtgatcgcaagagggaggcccccggggcctcccttttttccactttgattttgttacttttttcacaaatcagccgccctgcagcaggtccaaaacaccccttccaaccaggacgcgagacgtgaagagcgaacacatccccaaggccaccatcgaacggctggcggtctatctccagattctgggcaacctcggccgggacggggtgaacatcatctcctcggacaagctggcccaggcctgcaaggtgaatccgtcgcaaatcagaaaggacttggcctacttcggcgagttcggagtgcgcggggtgggctactacatccaggaactcatcacggccatcaagcagtccctgggcatcgaccggcactggtactgcgccctggtgggcgtgggcaacctgggccgggcgcttttgcgccacaacgagttcgcccgccgggggttcatcatccggggggcctttgactgcgaccaggacaagatcggcaaggtcgagtccggcctggaagtcatctgctccaagcggctgaaaaccaaggtccgggacttgggcctggagatcggcatcatcaccaccccgcccgagcgcgcccagcgggccgccgactatctggtggagtcgggcatcaagggaatcatcaacttcgccccggcccgcatcgcggttcccgagcccattcccgtggaatacgtggactatttccaccagttctacgccctggcctttcatatcaccttgagccagcaccgcgcctagggtcgttcgcaacaaacgatgccccaagactgaagaataagaataataatttcttattcttgcgcgcccgtgcaggctgccgcccagtgcggagcacaacacgggtggcccctgccaaggccgggtcatgcacttgcaccgcgcccggcatggggctatcctctcttcccgttgatcctgccccgtgcggccggatcgtttcttcaccccttgatccacggattgcttatggctgtgtccccttttcagcagtggttccgcaaattcagctattccgtgccctggaatgtgggcctgatcacggccggcgctgccctggtggccgtggccatcaagtccgtgatcatcccccacggatttctggccggaggcatctcgggcctgggcgtcctggcctactacgtgttcggcgggctttccccgggcgtgtggtttttggtcctgaacatcccggtctttctcatgggctgggtctttgtcagccgccgcttctttttctacagcgtgtacgggaccctggccgtgaccctgctcatggagctcatcacctttcagatgcccattgcggacaagtggctggccgtgctggccgggggggtgctcctgggctccggagtgggcctggccctgcgctcgctcgggtccacgggcggggtggacatcctcatggtcatcttcttccagaaatacaacctgcgcatgggccagttcgaatttttgttcaatctcctggtctttgccgggggcctcatctggctgaacctggagagcgtgctctattccctggcccttatcgcggtcatgtccgcggtcatcgagcatttcctgtccatgttcaacgagcgcaagatggccctggtcatctcggacaagcccgaggaactggcccaggagatcatcgcctccctcggccggggcgtgaccttcatcgacgccgtgggcgcgtacaccggccagccccgcagggtgatcctgaccgtggtgcacaaccaccagctcaaacggctggaggagctggtctacgacttcgacccggcggccttcaccatcatcggctccaccttcaatgtcctgggcgaaggcttcgccacgcgcaaaatttattgagaccaggagaccacccatgccccgcttcctgaacgccctgggctttctgacccggcttggccccagccgaggcctggacccgaaccaggcggccggaagcctggccgcctttcccctggtgggcctggttctgggcctgatcctgaccgctgttccggccctggggcttttttccggccattcccaggtccaggcctggatcatggtcctggccggggtctggctgacccggggcctgcacctggacggggtggccgacctgtgcgacgccgtgggcgcggtcctcgaccccgcacgcttctggaccatcctcaaggacagccgcaccggggccttcggggccttgggcctcatcctggccctgaccggacagatggcggccttaagcggtctgatcgaaggccgggcctatggcgcgctcatctttgccccgatcctgggccgcactgcggccgtgctcctggggaccttcagccgggacctgctgcggccgggcctgggccagttcttcatgcagatcgtccccgaacaaaccctggccctggtcctgggccagaccgtgctcctgggcctcttcctggtcccggtgaaggcccagatcacggcctgggcccttatggccgccgggctggccgttctcctgcgcctgggccgcagggtgaacgggatcaacggcgatttcctgggcgcggccattgtctggggggagatggccgcggccctggcctgcctggcctggctttgattctgccccggcccattttccgggccaggggggttttcctttcacactgaattctgctattatattttttgtaatgccggagcggtgcttccgctgggaacgagccttcatccagggcgaggaaatctgtgcagcagaccaaatcagccgggtatctggtcaagaccttcctcaagcacaacgtgatcttcaccgagggttcgcgcggggagcacgcctttgtgctcacccagggccgggtggagatctccggcatggtttcgggccggaagaaggtctttgccgtgctcaagcccatctccatcttcggggagatggccctgttcctggacaaccagcagcgcacggccacggccatggccctggaagactgcaaggtggtggtcatcaacaaatacgacctggaccagttcatcgccagctccccgcccatcgtggccacgctcatgaacgtcctggtgcaccgtttgaagaccgccacccagaaggccctgctctgccccaacgtgcccctgggcatctgccgcatcctggacctcttcgccctgaacggggtcatggacctggtctacgaaccggccatccggcacatgtccgacgtgttcgtggccaccccggcccagatcgagacctatctctccaatctggaggccaagaagctcctgtccgttgaggagcgcgagggcgggacccgccacatcgtgctcaagcaggccaagttcatggaatccgtgctgaagcagatgcgcgaagacgaatagcgccctcgctgacctgaacatccccgcctttcgcccctgccccctgccctggcctgaaacccggccccccagccccatgaaaaaaaggacgccccactgggaggcgtccaggccgtcccctcggggaacgttgcctacgggaccatggtcccttgttgtgacgtgacatctgatacgtatccaggcacatatatattgtcaatacatattttatattgtaacatgtatcgttttgtcttatgatggtttggtccttgggacatacggcggtcaccccccccatgagcaaagaccatatcaccctgctgggcctggacatcgggtcgaattccgtgggctgggccctggtccgggccggtttcgtcttgggcgcgctccggcccctggggctcctggccctgggcgtgcgggtctttcccgagaactgcgacggggaccgctccctgggccaggacgcgccccgcaaccggcagcgccgcgaggcccggaaacggcggcgcatgctggatcaccgcgcccgccgcctggccgtggtggccagcctgctccagggccaggggctcctgccctcgggaccctcgtccaatggcccggatcgccaccgcctgctcaaggacctggacgcccggctctggacccggcagacccaggaccggaccatcaccccggatcggtccctgcgcccggccttgctgccctgcctcctgcgccaccaggccctcaagcggcccctggagccctttgaaatcggccgcgccctgttccacctggcccggcggcggggcagccaggatctggaccaggcccgggcttgggccatgggtgcgggccaggtcatggccgccctggacgaggcgaccctggcccgggaggggaggggcgagacgccggggagttatctctcccggctggcccgggatggccaccctgcgcggggccatgtgttcagccgttgttccctgcgccaggagttcgaggccatctgggccatgcaggctgtccaccatccccggctcctggacgaacccttccgcctgcgcctggctgcggccatcttcgcccagcgcccccagaagaaatccaggaccggggctggcccctgctccctggaaaaggaccagcgccgcgcgccctggtcccatcccctggcccaacgcttccgcctgcttctgggcctcaatgacctgcgcctcctggacccggcccgcctgactcatcaagcccggcccctggacccggaccagcgcgcccgcctcctgcttcgcctggagaccgccggggacgccagttggacggaaatccgcagcctgctgggcctgtccccggacacgctcttcaacccggaggccaccggcagccgaggactgcccggagaccgcctggcccaggccctgctcccggtctttggcccggcctggcttgattttgatttggcccaacagtcccgggtggccgaggacctgcgcggcatggtcaagcccgaggccctggccgcccggggccgcctggtctggagcctgaccccggacgcggcccaggccttgtcccgggtggtcctggagcccgggtgctgcgccctgtcccgcaaggccctggcccggattctcccgcacctggaagcaggcctgcccctggcccgggccgtggccctggaatacccggaccagaatcgggaagagccccgcgaccgcctaccccccctgttcctggccctggacacggccgccaacccggtggtgtcccgggccttgggcgagatgcgcaaggtggtcaacgccctgatccgggagcacggcaagcccgggctcatccgggtggagctggcccgggacctgggccagggccgaggccagcgccgccgggagttcgagcaaaaccagaaggcccaggccgcccgcgaaacagccgcccgagacatcctggcctttcggggacatatggaccccccccgggcggaggtgaaacgggtggcccgggccgaggtggagcggctgctcctggcccgggaatgtcgctgggcctgcccctacaccggccaggccctggacatggccgccctgtttggcccggagccgggctttgatctggagcacatcatccccctgtcccggcgctgggacacctccctggccaacaagaccctgtgcgcggccacggagaaccgcctgcgcaaggcggcccggacccctcgcgaggcttacgctcacgatcccgagcgctatgcccggattctggcgcgggtggagggattcgacgcggacccggcccttaaggccgccaagctgcgccggttcctggcccaggacccggccgaccttccccccccggccgggcggctcctgtccgacgcggcccaggccgggcgcaaggcccgggaatacctgggcctgttgtacgggagtcaggcccaggcccgggtccaggccctgcccggccgggccacggcccggatgcgcgccgcctggaacttgaacgcgctcctcggtcccgggggcaagaaccgccaggaccaccggcaccacgccctggacgccctggccgtggccctgtgcggaccagccgagttggccgaattggccgagccctggcccggattccgtggccaggcccgggagatgctccaggcctgtctgccctcccaccgggtctgccgcaaggcccggggggagctgcatcaggagaccctctatggtctgcgggccgaaggaccccacgggccggaagtggtcctgcgcaagcccctgacggccctgcgacccggggacatcctctcggatcgggccatgcccgaccgggccgtgcgccaggccgtgcgcgaacagtgggaggacggcggacgcaaggccccggcccgttttttcgccgatccggccaatctgcctccccggcccggggacccggaggcctccctgcgccgggtgcgtgtgccccagtccgtgcgggtggtgtccgtgggccaggccccgcacgcacgcctggtgcatacggccgccaaccatcacttggccgtgttcgagggtcgggtcggggacaagtcggtctggcgcggccaggtggtcaccctcctggaggccatggcccgcaagcgtgacggccgggccatcgtggaccgccaggccgggccagaagagcgcttcctcttctccctggccaggtccgaggtgctggagatccgcctgaacgggatcacggaatatttgcggctgcgcaccttctacccggacccggccggaggggccaggctggagctggtgcgtctcaccgacgcccgcaggcaacgggacatggagaaaaagacccgggacaacggctggttcaagttcagcgtcaagcagctcgggggcctgccctgccgcaaggtgcgcatcacgccgctgggccgggtggtcccggccaatgactaaagttgtgttcctcgaataagacccgacaggaaagaagcatatgaatcattctttctcattcttgcgctcctctgccagagattgccaactccagaacgcaacacaaagaatatattattatttttctctgggtcctctttcgcagacgcaacgctagaacagcccctcctggaccaggtcccggaccatgggggccatgctgaccaccaggagcagggccatgctcacgttgaacacccggagccgggtgcggtcctgcaacaatccgcgcagggccgtgcccagggcggcccaggcccccacgcaggggaagttcaccaccagatacaccccgcagataatcaggacccccagggtgggatgatccttgggagtgaacgtgctggctgcggtgatgcacatcatgagcgccttgggattcacccactggaaggccgtggcctgaaggaaagtcatgggccgcgcgccgacggacctggaccctggcctttgggccgcgcgctccgggacggccgggggcgtggaggccgcgatgcgccaggccagatagaggagatagcccgccccggccacgcgcaggatggtgtacagcgagggaaaggcctcgaaggccaggcccacgcccaggcccagggccagttgcatgaaggtgaagccgatgctcacgcccaggatgtggggcagggtgcgcctgagcccgaaattcacgcccgaggcaaaaagcatggcgttgttcggcccaggggtgatggaggtcacaaaggcaaaggcgatgagtgagacaagggtttccggggtcatggtcttctcctgatgcggtcctgatcgcggatggatacaatatataattgcctccatccgtgctccggccatattccatttacattcagccatgctggccaattccgaacagcccaagcctatgccttgacggaatcgcacggtcaatgtatttattgtcaccatgacaatatggacgccgcaattgaccggagaccgccccatctccctgggcctggccgaggccattgccgctgaagtggagcgcgggggcctcaagccaggcgaccgcctgcccacccaccgggatctggccgatctcctgggcgtgtccgtgggcgcggtgacccggggctatgccgaggccgcccggcggggactggtgcgtggagaggtgggccggggcaccgtggtctgcggggtccagaagcccggcctgccctggtggggccaggccgactccgagcccgggctggtggacctgggcctggtcaccggcatgtacggcctggacccggacctgggcgaggccttgcgtcgcctggcggattccggcaacgcgcaggacctcctgcgctatcagccgcccctcggcatgccccgccaccgcgaggccggggcggcctggctctcccgcttcgggctgcgcgtggagcccgagcgcgtgctggtcaccagcggcggccagcacgccctggtggtcctcttctcctccctgttccggcccggggaccgcatcgcggccgccagcctgaactatcccggcctcatgtccgcagccggaatcctgggcctgaaactcgtgcccctggagtccgaccaccagggcctcctgcccgaggccctggctgcggcctgcgaccgggagcccttgcgcggcctgtatttcatgtccgggatgcacaacccgaccacggccagcgccgggtcggagcgggtggcccgcctggccgaggtggcccgcaaacacgggctgctcgtggtcgaggacggggcctatgccttgagcgcggacgagccctgccagaccctggccgggcttgcgccggaacggacctttttcgtggccagcgtgtccaagatgctggccgggggcttgcgcgtggcctatgtggccagcccggccgaacacctggagcgcctggccctgggcgtcaccagcaccacctggatggcctcgcccctatgcgtggagatcgccagccgatggatcatggacggcacggccgatgcggtgctcgggcgcaagcgggccgaggcccggaagcgggctaccctggcccgggagattttcgccgggcaacgcgcgagcctcggccgccagggctattttttgtggcttcaactgcccgagccgtggcgggccgctgatttcgagcgggcggcggccaagcgcggggtgctggtcattagcggggacgcctttgccctgggccagacgccagcgcccatggccgtgcgggtgtccttgagcgcggcccgcagccgggacgaactggcccgaggactcaccatcctggccgccctgctggaagaatcgccccggcccggccgcgccattgtctagggtggccttccagagccatgatcaaccagaaataaaaataagaataattatttattgttgttgcgcagtctcgaaagaaccagcctcttgcggagcacgacaggaggtccgaagccgcaccagtcaaggttcaaatattacccgggcaaaatccttgacaggatgattatacccgggtaatatcatcctccagatcacttcaggaggaagaccccatgaacgcatccgagcaccccttttgcacggcctttcaggaggccgtggccattgcctcgggccatctggcccaggtggccgtgcaggccaaggcggccatggaggccgaaccccaggccaccatcctggtctttgacgaccagaccggcgaacaggtggaagtggattttcggggcacggcggaggatgtccgggccagggtcgaggcgcggacatttcccgagcccgatccggctcccgtccccggggaccagaaggctgggcgcggcccgggccgccccaaactgggcgtggtctcccgggaagtgaccctgctcccccgccactgggagtggctgaacgaccgcccgggcggggcctccgtggccctgcgcaagctggtggaagaggccaagcgggcctctgttgaaaaggaccaggtgcgtaagtcccgggaggtctgctacaccttcatttcggccatggccgggaacctgcccggggtcgaggaggccacgcgggcgctgtttgccgggaacagggccggttttgaggaacacacccgggcctggcccgtggatgtccgggaatacgccttgaaaatctcggtcgcggcctttgaggacccctcccccgaaaaggccggatagaccggccccggactgaccccggatcggtcccgggcagacccctaccgcccgggaatcttctcctcgcccaaggcccgcatgacgtattccgggatgggcacgcccgccccgcgcaggttgtgcatggccgtacgggccatgttctcgggcaccccgtgctcggcccagtagcgggccgggtcctggatgaaggcctcgatgatggccaggccctcggcgtaggtgcgcaccaggtggcagcagttcaccacccaggccggacccaggggctcgatggtcagtcccccgacctgcttctcggccacgatggtgtggaactggccgatggcctgctcccagatgtgcccgccgttcacccccaggcccagggggtccacgaagaggtagggcgcgggcagacagtggcagatcttcatgaaggtcagggccatgttgatctcgtagcaggtcccgtatccgcccacgttgaagaccttgaagatggagtgccggtccaggatgtcctggcgggtgttcaaggccaggttggtgaactggaccagggcctcgggggagaaattcgagcgctggccgatggtttccgcgtcaatgcccacgccgatgcggaagatgcccagctcggccgccacctcatccaccacgcgcatgattcccggcccgctcccgtgggccacggccaggccctcgcccagactggggttgcgttgaagcccggccaggaactcccgcagctccacgcgcaaaggctcctgcatgctctccacggccgagccgaacatggccaccgtggtgtgcatgcggccctggcgttccttgccctcggccgtgacccaggtgccgttgcggaactcgcgcacatggggcttgtccgcgctctccagggggatgtagaagcgcatgccctcgcgctccaggcgcaccagctcctcgtaggcggtctggtccaggcggaaggagggcttggtcccgttgcccagccgggggtttaacgagcgcaccaccaccacgcccacccggttgcgcttgagcacccgcagggtgtccacgggcggcagccagtcggccacaaagacctggcgcaggttctgctccccgcccacataggtcagatcgtcctgaaaggcgcggaagcgcaggggaatctccccggccgtcaaggacccgtcagacagattgccccgggcgtattcatagaccagtcgccactggaattccggcatccagcggccgtgctcctcctcccaggggatgttgatcatccggtcgggcatgaggatgcggccgtagtagccgccgtgcttgggcgagaccgtgatctcgtcgaacagcccggcgcaggtctccacggtgaacacgtcggtcaaatccgcgaaatctaccccgcgctccaggatggtggcggcccgggccggggtcaggatgcgcttggccaaccgggccacccggtcgtcggccgggtaaagccgcatgcgcacccagaggtcggccgggtccacggggctctcgccctggttgtagagttcgagctggcgcagggtgcccatgcccgtggtgcggattccgtccaggagccgggaggccaggtggaagacgtccgggtggctcatctggcgctcgatgaaggccgtgtacggccccagcgagatgcgcatggcgctgaccaggaattccttgggacccacgggctcggacaggcgcaagggcgagacgttctggcacaggcttaacccgtgcttgcccttgacgatcatctccgcgaaattgttggccacgcccaggagccggggggagaggatgtagcggacgttctccaggggcagttcgatgatcccgtcctcggtgatccggtggcgttcgggcagaaggagccactgcttggccatggcctcctcgatctcggcccgggacagggcctcgctcaaggggatgaacacccgggcgatgtccacccgttcgctggcggccaggcggcgcaggtcggccagggactcggccaacatgggattcaaggccgtgaccaggatgggcaggtcgatggttttgtccaggtccgcgatccggggcatcccgtcttccaggctgacatcgatgcccacctgggaatgcccgctgcggccgctcacgtccaagaaggcggacacgggacgtttttcccgctcggcccgttcgcagatgtcccgcaccagaccccgcatggagtcgccggtgttgtggaagcgcatggtcccgcgcacctggggcgcggccagggtctggttgtagtgcacgtcgccgacgtccaggagttggccgtcgccgctgatgaaaggcgctttcttcatggtggtgtcgtccgctggaggcccgtaaggcccccggttgattcatccccgctgaaaaccctcgggttcaggcccacttgtcccaatccccgccttgcgtcaagacgggtattggagccagggacgccgaaatcccgtcatgttcaggaatgatgcaattcaggggccgggtggaaaaaccacccatgggcgcgggtcaggaggacgagggcgaggaggtccccttgcgggcgtagtccgtgacgtaccagcccgtgcccttgagcacaaaggcgctgccggaaatgaccttcttcaggcggcccgagcagtccgggcagggctcggcagcgtcttcgcagcgcttctgccatttttccaccacgattccgcactgctgacattcgtattcatagatgggcatgtgttcctcctggcctcctggcgcggtcacagagataatcccccggccaggcatgtcaaggggaagcgcgccgggccaggacccgggccatggcctggcgcagccggtccaggtccaggggcttggacacatagtcgtccatgcccccggccagaaaccgttcccggtccccctgcacggcgtgggccgtgagcgcgatgatcggcagggccgggtcaatgcccggggccgcccgatcccggatcagccgggtggcttccagcccgtccatgaccggcatctgcacgtccatgagcaccaggtcgtggggcgcctgggccaggagattcacggcctccaggccggtagaggcctgggtcacaaagtgtccgtccaactccagcaggcgggcggtggtcacgcggttgatgtggtcgtcctcggccagaagaatccgcaaccccggcctgggtttcaggggttgaggaacagcggccgcatccggcgagggtccggtccccggccgaccctctccggccgccttgaacagggcctcgaaactgaccgtggtgccctggcccagggcgctctggatggacacgctcccgcccaaaagcccgaccaggcggttgacgatggacaggcccaggcccaggccctgatagcgccgggaataggtgccgtccacctgggtgaaggggtcgaacagggtctcgatcttctccggcggaatgcccaccccggtgtcgctcacggacacggccagacgcagcatgcctgggccgtccccaggccgggccccggcagggcgcagggagatgcgcacctcgccctggctggtgaacttgaccgcattgcccaccagattgaagaggatctggcgcaaacggccctcgtccccgatcaggacctggggcaggccggggtctgtgtccaggatcagggccaggcctttttcccgggctggcttggcaaaggtggcttgcacggagtgcaacaggtccgccgggatgaaatcgtactccctgagcgccacctggcccgtgtccatgcgggaaaagtccaggatgtcattgatgaccgtgagcaggccctgtcccgagagaaaggccgtgtccacatactccttctggtccccggccaggggggtggtggacgtaagaaggtgcagcgcgcccaggattccgttcaagggggtgcgcacctcatggctcatgttggccagaaattcgctcttggcctggttggcctgctcggccaccagccgggcctgatggagttcgctctccatgcgcatgcgggcgtcgatgtccagatgggtcccggtgatgcgcaccaccgagccgtcctcggcccgctccaccacccgcccccgggccagggtccacttgtagcgcccatccttgccgcgctgcctgtattcggcctcgtacatgggggtcttgccctggaaatgctccagacgcagggccaggacccggggcaggtcctcggggtggatgaggctgtcccagaaggccagatcgttcccgatctcggccgggtcgtatccggccatttccgccatccggggcgaacccaccatcttgcccgtgcgggcgtcccagtcccaggcggcctggtccgctccggccagggccagctccaggcgctccccgctctcgcgcagggaggcctccacctgcttgcgggccgtgatgtcaaaaaagaaccagaccacgcttggcctctcgcccccggggaccagggacacggcggacagctcgctccagagccaggtcccgtttgtgcgcagcaactgccgttcggcccgcacccgctgccctggcccggccgccgcctgaaagtcccggccgtccgctggatggagaaagatgcggtgcagggattggccgatcagctcccggcccgggcagccgagcatctcgcccaggcggccattggcctcggcaatggtcagatctgccccggtcacggcgatgcccgcggaactggcgtccaggatggcctctttccaggacagggcctcctgcatgcgggcctggctctgctccaggtccgtgcgggtcttgcgggcctggtcttcccgggtctgcaccagctcggccatggcgttgaaaccctgggccaggtcccggagctcccggcagacgccggtcggggccacccgggccgagaggcctccctggcccaggtcccggaaggccaggaccagggactccagcccctggacaatggcccgctcccccacccaccgagccgagaacagggccaggagcgtggccccggccaggaagagcaggaagcgcagggccagggcgtcggcgtctttgaaggcctcggcttcggccagggacatgagcacggtcaggtagggctccggagctccggccagacgcaggcgtccataagtccgcagcatatttccctgggacggggtctcgtccaggaaccagccctcgtccttgccctctgtattcaggcggtcccagatgcgatccgcgatccgctctcccggcgcccggtccctggtttcaggatagccgaaaatccgaaccccgtccgcgtccagaaaatccacccacgcgcccgggggcagatcggcctgggccagaaaccgccggtaggcgtccaggcggaaggcggccatgagcacggcccggggggtctggtccggcccgaaaaccggcagggcgaagggcagggcagggacggtggcatggcggcccaggatgtagcccccggccgcaaagccgcccacggacagggcctggctgaactggcggcggtcggccaggctgaccggcccctccgaagccagggacgagggcacggccgtgaccgtcaccagcccggacagatcggtcatgaggatgttggcgtaggctggattttcccgcaactgggcctggaagatgggggtcagggccgcccggtcctggttctgggcctcgggcaacagggcgatgaccccgagcatctggcgcagcccctcggtggccgaggcctgctgggcggccaggctgcggaccagggccagaccctggtccagggcctccccggtttcatggtggcgacgctccaggctgacggccacgaccaggatcagggctggcaggagggccgccagggccagcaggctcaatatcctgcgtatgggccaggacacgtcatttttcatggccactcgcctggttgcgtcccggatgcgccggatcgctcattgctgcacacccaagcccccctgcctggcgaagggccgggggctatctggccccgcagcacttcttgtatttcttgccgctgccgcaggggcaggggtcgttgcggcccaccttgggttcggcccggcgggtgggctgcttcttcttggcctcggcgtcggcctcaggcccggaataatccaggttcttctcttccttgtgctggaactcctcctcggacagctccttgcggatctggaggtgggaggcggcccgcaccgtgccctccttgatggtgtagagcatctcctgaaaaagttcaaacccttcgcgcttgtactcctgcttggggtccttctgtccgtacccgcgcaggccgatgccgtcgcgcaaatggtccatgctcaaaaggtggtctttccagcaacggtccagggcctccagcaggaaatagcgcaggatttcctggtaatggtccggggcgtcggcctgaagccgggccaggatcttgcgcacccaatccaggcactggtccacgtccggcagcccctcggcgaattccgggaactgctcgaaattgaaggtctcctccagccgggacttcagggcctcgacgatttccgggtccggatcgcccttgacccggtcggccccttccaggatgtcctccagcaggtcctgggcgaagctctccaccatctcgtccacccgttcggccttcatggcctcccggcgctgggtgtagatgacctcgcgctgctggttcatgacgtcgtcgtattccaggagctgcttgcggatttcgaagttgtgcccctccacccgcttctgggagttctcgatggccttggagaccatgcggttctcgatgggcacgtcctcttccatgcccaggcgctcca

SEQ ID NO: 1600 - DNA, 23834 bp, synthetic construct
  source 1..23834: mol_type = other DNA
  misc_feature 1..23834: note = Synthetic
tcttcggcagtagtgtgtctagttctagtgtagtataggctcttcaatcctttgcgatgtgcataaattgagtatttggcaatttctttggtagaaatatcagattttacaaatagtgttgtacttatgccttggtctatatgtgcttgcattgttgatattaagtctataagcttgtattgatctatattgaatgctgacttatagtatagtgctgtgtcttttcctaaaaatggcatagggtaatatgttgtagaatctgcatatgttctaatttctatttggtctactactggcataacactagctgtagaattttgaacataagatatagattgagtaggtgctattgctaagcgatatgcatggtatagcccgtgttctagtacttgttcttttaatgtagtccagtcatgtgtagttggtacatgtataccatcaaataattttattacatgagtagagcgggggataaagctagtgttgatgtatttttcaaagtaagtacctttggcatattctgatttttcaaaccctaaaaatttactatttgtgtctttggctatttcacaactagcctgtatactatagtagtttagcatcataaagaatgtatctacaaattctaaagcttcagcactatcatagtctattttattcttagccaaatatccatgcaagttcatagctcctagtcctacagagtgaagttcttcatttgctttttgtatagtaggggcattgcgtaacttggtcatttgtacaacacttgtcaatgctctcatgcctatatggactgcttgctttatttctttattttgcattacattggcaatattgagagaacctaatatacaactaacatctctattaatagtgtcagggtcttcgtagtcaccaatttggctagtttcttgaagttgaaaaatttcagtacacaggtttgacattttgatttgtcccaaatcttttaatgcatgtacacgatttgcattggatttatacattatatacggatagccagactctaattgtatcattgctatttttaccaacaagtctcttgcagacaactctagtactgtcttttttacattaggattggataagagttcatcatacattatatctatatccatatcatctaagtgttgattgtatgcttcatatacactatgaggggcaaaaacaaacattggcttgttatccttaactagttcataaaacttacttggtacaatgagtcctatagctagggttgctatacgagatttttcgtcagcatttattttttttgtgtccaaaaattctatgatatcatgatgaaaaatattgagatatgcagcccctgctcccttcctttgtccaagttgatttgcatatgcaaatgtgtcttctaatagtttcattacaggtactacaccactacatgcattagcaaagcccttgatactatctccacgagaacgcaatttagacaagttgagagcaacagcacctcccatcttgcttagataaagtgaagtggatacattaaatgatatagaatttagactatcatcaacctctaacaaataacaacttaccatttcaccacggcgttgtctaccagcattgagaaaagttggtgtggctggttgatagttttgtttcatcatttgtagtacaaaatcaacagctcttgcaaaacttccttgtcctaaatacaatgcaactactacaactctatcaatatatgtctccaaatactcttttccatcatttgtctttaatgcatagttggtataaaatttgctagctgccatgtacgaagcaaattcaaattttacatctacagctatgtcatatagttgttgtatttgtgcaatgctataattttgaaaaacatcttcatagtatttattgtctattaaaaatctaaatctttctaataaattttcaaacttctttgttttgttgtatgcatacttcaaaaactcatctagagcaagtttatctttttttaaatcaaaaaaaccatcaggagttttttgcatgatttcgttgttaagttcaatgtgtttcaaaatttgattccctttaaaagtgatatggattatattaaaacatactatatatagtgctttaaatttaaaaagcactatataaggtaatttatttgaagataatacatttttaaaaaatttttgtcaaatggttttaaactttagattgttatttaaaattttaattttggttttattaagttaaaaatagaatatttatttttacaaaaaataaatattctatttttttataagcttgctaaaagcattgaaaatttaataagtttaaataaatatgaatattttattttgccacttaatatttcttttcaatgtaaataaatattaaaattatatttgtattaaaatataattgtgtaaaaacacaaaatcaataagtatataaaataaaaataaattattaatataaatacttccacatactatttttgaaatgtcaaaaataaaaaaaattttttgtggagcgggcatgcttgcaatatgctctgttgtggcaaagttgattggagcgttttttaggattccgcttaccaatattcttggtgcagagggtatgggtatgtaccaaatggttttccctatatatacagttgtactcactctatcaagtgggggattgcctattgctatttctaaagttgtggctaacaaaacagcaatagatgatatagatggtgcaaaaaaggttcttaaggtgtctttgtttttgcttagttgtataggtattgttgcaacaataggcattgtgtgtatgcataagtggatttcatcattgcaaggaaactctagagcaagtatagcttatttggggattgcaccttctatattttttgtatgtataatttgtgtattaaaagggtattttcagggtaggcaaaacatgttgccatctagcataatgcaaattgtagaacaaatcattaagttagtagttgggatttctcttagtatgtattttatgagatggggaattgagtatgcagtgcttggtgcaatgattggtattagtgtatccgaatgtgtcgcaatgttgactttgattgggttttatatattgggaaatattgtagcaagacgcaaaaatatttttttgaaaacgaatttacaattccaaacagaagtagctttggattggaatttgacaaatgatattataaaaaataattctactagtatcaacactagtagtagtgcaaagagtatacttaaagctgtctacaaagttgcaatgccagttactttaggtgctatgatacttccattgacacaagttatagatagtataatagttatcaattttttgattagtgcaggattgagcaaggcagatgctacagggcaatatggtatactcaatggtccagtatcaagtttgataaacttgccagtattaatcacattggccatatccatagccttgcttcccaaggttgctagatgttttgctacacaacaagatagtactaatgaagttaataatgccatgaaatattcattattgttggcttttcctagctttgtaggagtgttgttgtttgctaaagatataatgtattttatgtatggtaggggactaagtgcacaagaattggacttgggaataaaaatactacagttgtcatctagcattattgtttatgccggaattatgcaaatttgcacggccacacttcaaggaatggataaggcatctagacctgcttttatattagctataagtgctgtaataaaaattgtatttacaataattttgttaaatttattgggaatttatggtgtaactttagcaagtgtgttgttttatttggttgcatgtttatttaatttgatactatgtcgtaagagaatagatttgcatcacacttctaaatattcaataaaaataatattagcaagtattgttagttttggtattagctttgctttgagagagttgttgttgggtggtattagttttactattagattattgttgtgtggtggcatgtcagttgtattgtatggtattgtttgttggttgttgggcctgataggcaataaactcaaaaatgtagatgtcaatatttgatttgagaatacagtttctaatatgagtatacaaatagggtatattaagattgaaaaaagtaagatataaataaaatcaacataaggcgttaggggggaatcccctcaaaaaaaagcttttttgcttcttttttggcgtcaaaaaagaataactcctattttgttgattgtttatattttattgtaattaaccgctcgttgtacactctctttttaattttctatagtattctttatctcaaaaatattgacaaattagacaaattgtagtaacatatcatcactatgtcaaagaatttgtttgaaggtataagaaaacttatggacactatagctaagggtgtatctaaggttttggttgtaggttggttgtggattccattttcttattctctcatattttttttaattttgcttgttaatggacaagaatttccaccttattctgaaatatttttgattggattttttatatgtttggctacaagtgtgcttttgtttgtaattaaaggacctaatatcaagaaagctccaaaacaagaatttagtccacaaccactaatttcacaacaaatagctccaactcctgcacctcaatacaacaatacaatcaacaacaatcagtatactatagcacaagaagctaagtcacaattgctaccgcagtatcaacctgccccactagtatttgcaagtagagtagaccccaacttatatatacatgagtacaatgataagctgattttttataaaagggaaaatggtggaatgttgtatctaggtactgaatacaaaaaaaatgctagctagcatatcaagattatctttgtaataagttgatagtatacaatttttatatttttaatattttgttatttatttaaattattttatttaaattttttatagacttatagtgctattcaaaaatttaagttgttagaacaatgcttgttcttattataattgcatttcacttgtctatttgccattctatttgatagaccatattaccatgtgctttagtttaagaaatagttgacgactatatatttatgtgttattattagataatttatttcaattgctttataacaaccatggtgattgtatcaaaatatggtaactggaggtttgtatgaaatttaaaggttatagtggggtagaggttgctctcggtgtacaacatttgtttgcaatgtttggagctactatacttgtccctattttgacgggaatgaacgcatctgttgcattattgacagctggactaggcactcttatttttcactttgtgactaaaatgagagtgcctatttttttgggttctagctttgcatttttgccaggaattgccgcagtagttgcaagtgaaggtgctaactatgcgggtggggcaataattgtggcaggtggaatttatttgatattttctattctagtttattttgtaggtgctagcaatatcaaaaagctttttccacccgtagtagtcggtcctatagttattttaataggattgagtttggttggaaatggtataaatgatgcaagtgctataaatcaacaaggcaactcgtgggctgaatatccttggttgtcttggttggtggctgcttttacgcttattgtaatattattatttatgcttagaggaaaaggtatctttaaacttgtacctattttgattggcatagttgcaggatatgttgtttgtttgattttgtcagcttttggattgaatgtactcaactttgatgctattagtgcggcagattggataaatataccctatgttacagatggatttatgcaattgccaaaatttagcttgtcatcaatattggttatagcccctattgcaatagttacttttatggaacatataggtgatatgactacacttggagcagtgacaagcaaagatatataccaagagccaggattgcatagaactgtattgggtgacggtatagctactatggcggcgggattctttggtggtcctgccaatacaagttatggcgaaaatatagcagtgttggctacatctaagaactttgaccctcgtattattagacttgcagcatgctttgctattgtattggcgtttttgggcaagtttggagcattgcttcaaacaattcctagtcctgtattaggcggtgtatctatagttttgtttggtattattgctagttgtggtataatggtattggttgacaatagagttgattttaagaacagtcgcaatcttgttataacatctctcatactttcagtcggattgggtataactctttcagggttgggcggatatatttcaatatcagagaactttaatttgagtggattatttgtagctacagtagttggtatattggccaatatttgtctgcccaaggatttgcctaagattggtgatagtgacggaaatgatgagacaatttcaggctcagacaacgagcagtttatgaatgatggttattagttgtttgttttttgatatataattatgtttattgtatgagacaaagctttgtatttatcaatggaatactatataaaataagttcttaagatataccgcagttgcaaacaagtaactgcggtatatagatatattggatgttaaaagcattttgtatattacaatttttaaaaatataatagcagacatatgtattttaaatacatatgtctaaaataacagtacaataaaaatagtatataaatggtaatttacaaataaagtaaattaatattatttatcatttattgacaaactattaataatatgttattatattgttgatgattttttaaatatagttttggatttatagtctatggatatgtacgacaacaatttgaatatttccaataggcttacattgagagaaatgtgggacagtggttatgatatttctatcaaggctgatggtagtcgtagaccacttgtggatatgttggatatggcatatcagtctaggtttgaagatttgagagtaagtactgtatatagagaagaaaatgctagtatattgtttagtattatgagaggacgaagacatcttatgcagtgtggagattggggatttgcgtgggaagatcaaaaaggtttgccatttgctacaccgatattgcaagatgccaaaagagtatattctcaaattagggtagacaatgcttgtataactaaagatgtaataatgatggatcattttaataatgtgttagcagtatatagatatgtgctaagtgatagcaaaaaaaggtaaaaaagaaatggggacaccaatcaaagtagagatagtggcacaatggtttgtcaatcgtgcgatattagatgtgcaagatggtaaaggagaatatatctcattactcaagttgcaaaaactgttgtattatagtcaaggttgctatggtgtgatacaaggtaaaaagctttttgataccgaatttgttcatcagcgcagtggtcctactattcaaaaaataacagataagtacattaggtttgctatcaatggtataaatttgtggcaagatgacatagatatagagatggacaaacctgatatacattttttgcaaaatatatatttgttgtttggtcaatattcaacttggcgactaagtgaaatgacagtcaacgaattgccttggtctactacaaaacaagatgagaaaataacatttgaaagcatggtaaagtattttaaaatttatcatgatgatagacttaatacaatgagaataagagacccaaaagtcatagagagagcggtgagtttgagagataggggtatattagacgatgactttattataaaaaatttctataaatatttttagaatgataattaatgttgagattttattgatatttttgcaaagatattagtatgtataagtagatttgactaatgaaaaatttgaaacaaacatatcaaaattttaggacagtgtttttttatttattagctgttgctatcattttttcatttatagctgtaggtgctaaaaatgagtttatggcactagtatcagttattgccaacattgttgcaggggtatgtttcttcatttggatagcactttatatttcacattgtattataaaagctgtatttgaagaacgagatgagagacaaataggcggcattgctacaataaagaatcacaagatagcaataatattgttaaagaagtactaaataccaaaaatactgtagaatatgattctttcgtatttaaagtaaatagtgatagttttaatttttgcaaaaagtgtggtagcattgttgcaaaagatataaatggcaattggacaacttgtcgtaattgtaaaaacaatcaagattaattgtatttttgtaattggcaacaattgtagtttgccaattttttgtttatatgataaaataactgtattgatgttaggagtagtattgtgttgcagttatttgtacaaaagcatggggcaagtagtcacccaataagagcattttattcggctggtcgtgtcaatctcataggtgagcatattgattataatggtggatttgtattgcctgccgctattggcttgggttgtacaatatattgtcgtctaaatgacaagaattgtctcaatgtagcgtatactacaactgattttgagggtagtatagactatacaaaattggatagctacagagacaaaaattatctcaactatattgcgggtgtgtgtattcagttgcaagatattggtatacaacttgtaggaatagatgtgttgtatgacataaccgtgccatttggtagtggattgagtagtagtgcggcgatagaagttgcaacggcttatatgttgcaatcaatttataataacaagcatggtattgcaaaaccaatagattgtatacaacttgctgtgatttgtcaaaaggcagaaaacaattttgtaggagtcaattgtggcattatggatcagtttgcatctgcaatgggtaaagacaacaacgctatattgctaaattgttctacattagaatacaagtatattagcggcaatatggacggattggagttgtgcataatcaatacaaacaagccacatgatttgactacaagtaagtacaacgaaagaagacaagaatgcgaatctgccttgaattggttgaatacaaaatctgacaaaccaataaaagatttgtgcagtctaacacctacacaatttgagtctcttgcacaaggaatgaattctgtattatacaatagagccaaacattgtgtatacgagaatgatagagttgtaaatgcagtagatgcatttggcaaaggtgatatacaactctttggaaatctaatgttgcagtcacatgattcactcaaagatttgtatgaggtgagttgcgttgagctagatactattgtggacatactcaaagctcagtcatactgcaaaggtgtaagaatgacgggtggtggctttgggggttgttgtgtagctattgtagctaaagataacagagacaaaattcaacaacttttggatatagaatatcctaaaaaaacaggattgaattgtagtatatattatacgaatatgagtgatggtgcaaaagaaatttttgtatcatagtgacataaaatagatgaacaaccttacgatagtgggttgttttttttgtatgttttagtatgatttgttatgtaataaacactcgttgtacactcgttagttttagtgggtatacatatttacgctctaactgtatagtattttataaaaattttgaaataattaagatattttgtcattatttgtttacaaaatcttgattatatgctataattgaagtgttagtaaaaacactatggaaagtaaaaacactatggaaagtaaaaacactatggaaagtaaaaacactaaggaaagtaaaaacactaaagtacggtttggattagatattggtatagctagtgttggttggtctgtgatagagtgcgatgagtctggttatgctgtggatattgttgcggcaggttctagagtgtttacagctgccgaagtgccaggtagtgatgaggggcttggagaagctaggcgaagtgcaaggggtgctaggcgaagtgcaaggggtgctaggcgaagaaatcgtagacacaaatttagattacatagagctaagagattgattgttgaaagtggtatgctttctcaacaacagttggacaacttgtatgacaatagtcaacccaagcaggatatatatgagattaggtatagagcgttggatagtgttttgaccaatcaagagtttgccaaactgcttatacatttgttgcaacgccgtggttataagtccaatgccaaagatacaaaagtactagacagtcaaacagatgaaagcaaaaaagctaaggcaaaagcaacagaaagtgaaaaaacagatgatgaagcagcactaaaaagtatagccaacaacaaaatcattttgtctcaataccgttctgtaggagagatgatatacaatgactccaagtttagactcaatgtgggtggcaatcaagtttctgtaaaaggaaattatgtattcaaagcacgcaactctacaggagattacaaatttgtaatgttgagagcgtggattgtagatgagattaagcttatatttgaaagacaatttgctttgggtaatcatcagtatgctaatccacaattgaaagacaagtatcttgagatatttgaaagtcaacgccattacagtgaaggtccaggaggaattgaaagcaagtacggtattgagggtatcaattatcatagacaaaagcaaggactgcaaccattgatttctttgatagaaaaaatgacaggcaagtgtacttttgaaccacaagaagaacgagcggtcaaagctagttatagttttgaaaaatttcggttgtatcaagatttcaatcacattagtattgttgatggtagaaaaaacagcagacaacatttgactcaagagcagtttgatgctctagtcaaacatgcacatgataaagaaaaaataacatacaaagatattagaaaagtcttgaatttgtctcaagattgcaagtttagcaatgttgactacaaacctaaagtcaaaaaagacaaagatggcaatcctatacaagatgaccagtcaaaagatccagaatcagatgcaaagattttgggattgccaaaatatcacgctataaaaagagtcctaaagggcgtgtcaattgatatcacaactctcactacggctcaactcaattgtatagctacagtagtctctaagtacaaagatgataatgatttggttgaaaaactagagactgagttggtcaaaaatgggcttgacagtgtggttgcacacaatatatcacaagcaagtttggaattgtcatttagtggcgttggtcatttgtcaattaaggctgtagataaaattcttgatgtgtggcaagttggtgatacttatgaccaagctgttactcgtgcggggtatgactttaagagtgagtggacgggagaaaggttcaaaaaattgagcctattagaacatgccgaaaatggtgggactaagcctatcaacaaccctgttgtgagacgcagtgtaggacaagtgataaaggtagtcaattctttggtagagacatatggtagtcctataggtatcaatatagagttagctagagatatggcaaagtccaaaaaagagagacaggatattgaaaaggctaataagcaaaatagagaacgcaacgaaagagccaagcaagaagctgtagaactaagaaaatccaattctaaactagattccaatcctacagggctagatatagtcaaaataaatctctataggcaacaaaactgtatatgtatgtatagtggaaaatctatagacaacactcgtttgctagaagatggctatgttgaagttgaccatatagttccttacagtatttcttttaatgacagttatcaaaataaggtattagtatttggtgaagaaaatcaacaaaaaggcaatagattgcctttgcaatatctcacgggagaaaaaagagaaagatatattgccaatgttgagagaatatttggcaaaaatttgggcaaaaggtcaagactactcaagactgttatcacagatgaagatagaaacaagtttatagaacgcaatctcaatgacactagatatgcaaccaaggtaatagctaatacactaaaaaattatctcttgtttgacgaagttgttcataccaaagatactcaaaaaaagagagttattactgtcaatggtactatgactagttatattagagctagatttggtctcaacaaggtacgcaacaacggagatactcaccatgcactagatgctatagtagttgcgtgtactacagatagctatatacagcaaataagcaaatacaataagttgatagaaaacaaatatagaaagccagatattaccaatcaaatagatttagaaactggagaaattattgccactattgaagaatgggtagattatgagacgggtgaagtgttgacaaaagaagagtactttaaaagagggttgcacaccaagcaaaccaatagtcatgtcaaaaaagagctagaaaggcagttgtttgacaatgaaatgtctccactaagcaattataaagctactcagtttagaaatctagttactcaacttatagaacaatcacaaggattgcatgatggcaatcctgtgcatgtagatggcaaagatacacacatcaataaaatatttgtatcacgcaaattaaatcgcaaagctacaggacaagggcatcaagagactacatttggaaaagttgcaaaaatcaagtctagtgaagtaggtgtatgcaaggatagagtacaagagaatgagcagttagaccctacacttatggtaaaacgcacggaattgaaaaatttaaagttggacaaagatggagagatagataattattataagcctgatagtgacaagttgttgtaccaagctttgaaacaatacctaaaagaacaaagcaagttgccagaaaaagacaaatttaaagaacctttttataaaccaatccgcaatcaagacgggacaatgacttttgggaatgtagtccttaaagtaaacacaatagaaaaaaagtcatcatttgttactctcaagaacaacggtgcagcagccaatggtggaatgataagaatagatgtctttaaggttgaaaatgctccaaagaaaggtgacaatgggtattattgggtgcctgtatatgtcaatgattttgtcaaacatactttgcctaatttagctagaccatctttaaaagagatgaaagatgaagattttatattttcgctctaccccaatgattgcatttatgtaaagcataaagataatatggaatttactagagaagacgaagttgtagaaggtgataaagttgtaaaaaatattagcaaaactacttgcaatgatgtgtatatttattatgtcaaagcgggaatatctggcggcgcaataacagtaaagtcgcatgatagtttgtacaatctttctagtctaggagtaaaaggtttgaaagaaatatccaaatgctcagtagatactctaggcaatattaccaaaatcactactaagcaagttagagaaaaatttcctaatcaaaaatagtttataaaagatttttaaaaataatattgtaattgtcgttataatattatactaatcgaacacttaaaaagcacatgccgtttagaaatatattcatatccaagccatcatatttgagtatagatagagggcaacttgttataagacaaggtgtaaacaactatacagcaaatttagaagatttgagtactttggttatagaaaatagagagagtactatcacggcttacacaatttctcaactagccgaaaatcaaatagctacctatgtttgtgatgcacgccatatacccaatggcgtattgcttccattttgttgccatagtagacatctaaaagctctatctagtcaaatatctatgtcttgcaatctcaaacaacaattgtggcagacaataataaaaaacaaaattgacaatcaagcttttgtacttcatgcttataaaaaagaaaatattgagatgctacaacactatgtcaatcaagtagagataggagactgtaccaatatagaagctagagcagctatgtgttattttgattcactgtttgacaaaaatacttttggtgttgcatttagccgaaaagatgattgttttgtcaatgatgcactcaactatggatatgctattgtgagaggtatgatagctcgtactcttgtagcttttggatacgaacctagtttgggtttgtttcatagttcagagttgaatgcattcaacttggctgatgatattatagaaccttttagaccatttgtagatttgtacatttttaaattgttaaaaaaatacacacagttggatagtgattgcaagcaaaaaatttttagtttagtggagtatgagataaaaatagacaacgaaaagtttaatttatctactgcaattgagagatatattgtgggatttaatcaaagtgtagagcaaagctgtgacaaactgtctcgtgtgagattgggtgtgcttagattgcattcaattgtgtagtatagtattttcaaaatataacaaaattttccatctaaagttatgagatttatgagaatgatgataatgtttgacttgcctaccaatactaaggaccaaaggagagcagcaactcaatttagaaacaaccttatcaagcaaggtttttatatgatacagtattctgtatatggtagattgtgcaatggacatgatagcgtaaaaaaatacaaaaaacgcttgcagtcagttttgccattgtatggaagtataaggctaattacaattaccgaaaaacaatttaccaatgcggatatattgttgggtactaaaataccatcagacaaagacgcacagtggcatcaactaacattcttataaagatgtagttaataacaaatactaatattaacaaaaatggatttgatacaaaatccatttttttgtctttaaattatgcaatatttgttcaattatgctctttattcaattataagaagtatataaatagagtgcattaagatgtaaaggaagtaacaaaataaataaaaacaaccttaaggcgttcgtggggattcgcccccccccccaaaaaaaaagcttttttgattcttttttggcgtcaaaaaagaataacgatggttttgttgataatttgtattttattgtaataaaaccgctcattgtaatcttattaaattactttaaatcatttacaaattttttaaaattacaaacattgtctaaattgattgtcaagaatatattgaatatagtataatataaatatacagtaaaattgtatatttatgcatttgcaagcaagcacataatatttgatgttgtattagttgattcaaccttgttgattattgggagatttttatgcaagagctaaaaaaaaaatatggtttgtttacatgtattgccatggttgcaggtattgtaattggtagtggtgtattctttaaagctgatgatgtattaaatgctactggtggcaacatgtggttgagtatctctgcttggcttgtaggtggacttgtcatgttgtgcttatgttatactttttgtgttattgccgcaaaacaccccaattctccagggttgatggggtacgccgatgacttgattggtagcaaatttagttattttattggttggttttggacaactatatatgctccttgcatggtcgctgtagtatgttggatatcagctatgtatactacaactttgttagacttgcctgatggtggttatattggtgctgcaacatggacaattgctattggctatatggtactgttgtatgctatcaatactctagcacccaaagttgcaggcaaatttcaagtatccgctctagttgtcaagcttgtgccattgttgttgatggctattattgggactatagtaggcttagccaagggtactactatggacaattttggtacagtgacagcagaagttgacggaaatcctttttttaaggctattattgcatgtttgtttgcatatgatggttggataatagtcactagtatagttccagaaatcaagaatgcaaaacgaaatgtacctttgggattgttgattgccgctataattgtagttggtgtatatattttgtactttgtaggtatgactagctctctcaatgttggtgttttgatggaagcaggtgatgtaggtactcaaaatgcattttcacaaatatttagcagcatgggtggtactctcttgtttgtgtttgttgttgtgtcttgcttgggtactgccaatggtatgatgatgtcatctactcgcagtatgtactctttggcacaaaagagaatgtgtgtaggacaaggtacatttggacatatttctccgcataccaatgtacctaccaattcttctgtcattggcttggttatgtcagctatgtggtttgtagtatggtactttagtatgactagatgggatggcgaatttgatatatcagagcttcctattgtatttttgtatgttatgtttttgcctatttttgtggcaatgatgataaagtataaagatgtacattggtttaataggtttgtagctccaatagtgtctataggttgtgtgatattcttggttatagcactcatatccaaacaccaaatgtatgtattgtggtttacagtagtatttgtgggtatgcagttgattggttggttgttgttgtactatggcaaaaagattcatggttcttactgtgtagaggaatcaacggatcaaattagagatttgaacgatgaaattgcaaatgatggtggaaagtggatagttgattgatatattattaaaaatttttacaacttgttgcactgtatttaaagtacttttatatataccaaaacactactttatatagtagtgttttttggctttgtaagtgtcccatatgctttaaaatttaaatatatgaataaattaataataaaatttaactaaatatacaataaagcaacatattgacaaagatgtattgtattatatatatagacaaatagtgtcaaatattatataattggtgtataaggttgcatggagaattatatatgagcaagaagagaagtatctatctatctataataatatctatcatagtattgtttagttgttttgcattgggggtattgactgttgcaaatagcaataatattgcaagtcataatccaaataccgctgatgagtattcttttatgcaaatgccgaatacagcttttgccgaatatccaccatcaaaaataagtataactgttggtgatagttttgttttgagagtagtattgaatcaaggaaatgatcctaattcacctactcaagatttgtatactaggtttaaaattggttggtataaaaataaaggagatactcttgatttaaatactgctgagaaatatcgcacacaaacagaatatttttatgtagattcaagcaatgttggaaaacaatattattttgctgtctatatcaattggatgctaaatgatggtacgcctttttattatgaagtgtgggatctcattgaagtatcggtagaaccacgcaaaccagataccgtcttgctaaatttgaatgggggtagtggtggaacaacaagtgtggtggcaacatatggcgagaatatgccacaagctacagcccctagtagagatggatatatttttagtggatatgtctcatcttattataaagacagatattattatgacaaaaatatgaactcagtgagagtatgggataggattgacaattctccaacagattacaaattggttgcacagtgggaaatgataccaattttcattgttacaataacgctagattataatggtggaaatggtggaacaagtcaagtaagagcaacatatggcgagagtatgccgcaagctatagctcccgctagagatggatatgtatttaatggatatacagataaagtggacggtggcaagcgatattatgatggcaatatgaactcaatgactcaatgggacaaaaaagaagatgatacactgtatgcacaatgggagatagcacagccagaagaatatacaataacactagactttaatgatggaagtagtagaacagaacaagtggtagcaatatatggcgatagcatgccaccagctacagctcctagtagagatggatacatctttaatggatatgcagatagtgtagatggtggaacgctttattatgatgaagatatgtattctttgcgtttatggaataaaaaagaagatactacattatacgcacaatggcaagaaaatggcgggacgcaacaagaaaagtacacagtaacattagactttaatggtggaaacggtggaacaaatcaagtagttgcagtatttggtgagagtatgccaccagctacagctcctagtagagatggatacatctttaatggatatgcagatagtgtagatggtggaaaattttattatggtgctaaaatgaattcggtcagtgtgtgggataaaaaagaagatactacattatacgcacaatggaaagaagatgacggaacttcgcaacaagataaatacacaataactctagactttaatggtggaagcaatggaacagagcaagtggtagcaatatatggtggtagtatgccacaagctacagcccctagtagagatggatatatttttattggatatacagatggtttaaatggtggtaagatttattatggtgatgatatgacgcccgcagttagtgtgtgggacaaggaagaagattatatactatatgcacagtgggaaacgaaagataccgaattgccattaactccatcaccaaccaacccaacaacacctaccaattcattttcaggagattttggagaattattggggtggagtgttggaggagcatttgtgctagcagtggtattgagtggtataattataatgttgaaacgcaagaagaatgtgagagtagcacagtatggttatcgtagaagcagtaatagaaatgactcatacaataacaaccaatacaacagttattatagtcaatacaacaacacatacaacaatgacccatatgccaactatagaaacaatcaatctcaaaacaataatagaaataacaacaacaatagttggtattaattatcatcaataatacacgcaaaaacaaatggatagaaaatttaaattctatccatttgttgtattttataggtagtgtataaaagtacattaagattgtagcttggatataatgaaaattttggctctttgttaaatgttgtggtatagcaaattttagtataacaaaaagagagtgtacaaatagaggcattaagatgggaaagaagtaatatataaataaaaataaccttaaagcgtttgggagttttgtggtacttccccaagagcttttttggttctttttggcgtcaaaaaagaataatgcttgttttgttgaaagtttgttttttattgttaataatctttcgttgtacggtcatctagttgtacactactaataaaagtgtattataatttagtatcgccaaatttgttgcaagcatataatagtctaaataatatcaaatttcaactaattttgtaatttaatatatttataatatcttagtcatatatgttgagaatacaataaatattgtaaattaattatgaattatgtaaatattcatgtttgtatgactagatattgacaagatagagattgtatgattgagttaacaaaagtatttttctatgatataattttattattatgagattaaataatattaaaaaagcatgtatagcattgtctattattcttgtgttgagtttgtcggtagcattgtgtagcgtcctattgacaaacaaaacatttcaatcaatagacaaaagtttaggcgaaagctctgtatttaaccaatatccatctcaaaacaattctgggtttgttggtgatgatatttctttaagagtgtcattaaaagatggatatgatgaagggttagtttattggtacaataatgacaatggtaatgagataaattttgaaactgttaaaacagtaggaaaaggactcgtatatcaagtacctacagacaaagagattaaaacatattattttgctatatatgtcttcatgtctattggtgatacggctatattttgggatcagggtgatataatacaagtagaagtagcaccaaaaaaagtagagactatagttactctagactttaatggtggaagtggtggcacaggtcaagtagatacaatccttggagaagctatgccacaagctacagcacctactagagaaggttatatctttggaggatatactgacagtgtagatggtggaaagagatattatgatagagatatgaactcagttagtgtatgggataaagaagaagatagtagtacactatacgcacaatgggaaagagacttatctgtagagtatgtagtaacactagactttaacggtggaagtggtggtaccaatcaagtaacagtaaaaattgatgaagctatgccacaagctacagcacctactagagaaggttatatctttggaggatatactgacagtgtagatggtggaaagagatattatgatgacaatatgaactcagtgagcttgtgggataaagatacaagttctacattatatgcacagtgggaattagaaccaattgtaaagtatatagtaacattagactttaatggtggaagtggtggcacaagcagagtagaagtaatcattggagaagctatgccacaagctacagcccctactagagaaggatatatctttaaaggatatactgacagtgcaaatggtggaaaggcttattatgatgaaaatatgaaatcagcgagcttgtgggataaagagaaaaattctacactatatgcacagtgggaattagaaccaattgtaaagtttgtagtaacgctagactttaacggtggaatcggtggtgtaaataaagtagaagcaactttgggagacaaattgcctacagtcaaagcacctactaaagaaggatatatctttaaaggatacactgacaaattagaaggtggaaaggcttattatgacgagtatatggattgtgtgaatgtgtgggacaaagataaagattctactctatatgcacaatggcaaaaaagtgagttgattcttccaccacctacaactccagcaaatccatcaggttttgataattttggagagatatttggttggagtttgttgggagtatttgtggcagcattgatagctagtggtatttttattatcctaaagcgaagaaacaatccaagctcatcttcatcatattcaacacaatacgatagttatggtagtcaaaatacatttgctaacaataattactatagtcaatacaataacaacccgtatagccaatacgacaatcaaaatcaaagccagtctaaaaagaaaaataaaaagagcaatagagacaacagcaactattatgacgatggatatggcaactattaataattattagaaataatagttattaactacaaaagagatatcatactaaataaaatactcaagtgactttgacacttgagtattttatttagtatgatacaaatagagtgattaagatgaaaagaaataatatcaataacctaaataaaaacaaccataaagcgttaggtgggatttctcaatagcttttttggttctttttttgcttcaaaaaagaataactatgcttttgttgatgtttgtatcttattgttaataatcacttgttatacactctattttatttttaagatagacttttgtacaaatttttttatattacttatttttgtattatagattgattgacactacagtgtttttatgatacactacgagtacaagtggattatcccaccaaatgatttgtgttgtttggtttacgcattttataatagatttatttcaactattgcattattggtatagttgtattgctattgcgtcgggagtttttgcttggcgtgatagtttttattttagtataagtcaatttgtagctttcaacaaatagtgtagttgcaagggggaattagttattaaaggtcaaagagtagaattaaactttagaattagagatccacaagttagagtattggatgaaaatggtgaccaacttggtgtaatgtcaggacaagatgccaatagacttgctcaaagcaagggattggatttggtaaaaatcaatgctactacaaagccacctgtgtgcaaaattatggactatggcaagttcaagtttgatgcagttaagcgtgaaaaggaattgagaaagacccaaaaaagtagtgagcttagggaaatgagattgtctatgaatatagacaagcatgatctagaaacaaaagctagacaaaccgtcaagcttttgcaagctggggacaaggttaaagttagtattagaatgaaggggcgtgagcaagctcattctaaattgggtgtaggagtaatggacgacttttttgctatgtgtgaagaagtgagtgaagtagatgtcaaacctcatacagagggacgaaatatctttatgatgcttaagcccaaaaaaatagaaaagccaacaaaaggtggtggaaaaagttcgcaacctaaagttcaaaaagttcaagatacaaccaacaatagtagtcaaaatttgggagctaaactaaaatcagtagtaaatcaagaagaatcaaataaagataaagaacaaataaaagcagatgcacagtcacaacaataaaagacaatggagggcaatatgccaaagtttaagagtaatagcggagctaaaaaaagatttagggcaagcgctagcggaaaagtaaagtatcgcaaaatgaatagagctcatattttgacaaaaagagaaaagaaacgcaaggtaggtttgagaacagatggatatttatctaacaaaaaggaagcagctacagtgcgtataatgatacaaaaaaggcactaatcaattgatttgtattgtatacaagagtttgggttttaaaacattgattgagattgtttttttggacaaattttattatagttttgtcctattaatatttgaggtttaaataaaatgagaataaaaagagcggtaaacgcagttaaaaaaagaagaaaaatattgagattggctaagggctattgggggctaaaatccaagacttatcgcatagctagagaagctgtgatgaagtctcaaatgtattcatatattggtagacgacacaaaaagagagagtttaggcaattgtggatagctcgtatcaatgcggcagctagacaaaatggtttgtcatatagcaagcttattcatggtctcaagactgccaatgtgcagttggatcgaaaagtattggcagatatagctgttagtgatccacaaggttttgccgctcttgctgaacaagctaaggcttctttgaattaataatgcaaataataaataa

SEQ ID NO: 1601 - DNA, 14071 bp, synthetic construct
  misc_feature 1..14071: note = Synthetic
  source 1..14071: mol_type = other DNA
ggcgctccacaatttcccccgtgggtaccaaaacagaaaaagggtttacggcattcaccgtaaaccctgtgcttcctggtcgggatgaaaggatttgaaccttcgaccccttgaaccccattcaagtgcgctcccagactgcgctacatcccgacgcggagagatatctacgcagatatcgaacaggagtcaacaaaaatccgtgcttgcccgaatataattgttcgggcctttgttggcgcgatgggcgggccaccctctgtcctcaaaaggcttcctctcaatccgctccggtatggcgcgcgtaaggaatgcgcacggcaatgccgctggcgtcccaggtatagggcaggccgctcagaaaatctttgttttcaatcgcgttcatcagcattgcggccacggcctcgcccatggccttgccgtcttgctccacggtgccgctcatgctgccttgccgaatggcctccacggccctgggcacggcatccacgcccaccacagggataaacttaccaccgccttcctgattatagccgtattcgcgcagcgcccgtatcgcgcccaaggccatggaatcattattggcgataatcagctcaatgccgggcaaggatgcggcagagcggctcagagcctcataggccctttcttcgtcccagtcgcaaagcagcgagcttcccacctgccgcatgttgaggccaagctcccgggcctgccggacgctgtactcggtacgggccaaagcttcaggattgtccagggtgccctgaagcataaggtactggcatgtgccgtctccatttttgtcatagtttggatgcgtacgccacaaatccacgattatctcgccctgcaaaaggcctgcctcctcggctctggtacccacaaaacgggccttggcataggctttcaggctgttcagctccggctcgcgattaaaaaaaaccacaggaatgtcggcctttttaatatgatccacagccctggccgctgcctgggtttccacaatattcacagccagcccggcaaggcctttttgcagcaggcttttgatctgctcattctgggtcagttgatcgctttcggcaaaaagcagctccacagaggcccggtccttcagggcctcctgcatggctttgctgacaagttccacatagatgtcgttcttccggtatgccagtatgccaatggcaggcctgcccccggaaagggaggcttccttttttccggacccgggctcgcaagcgccaaggcagagaacgaaaaggagcgagagcaaaaaaaagcactgatgaatacaccttgccttcataaatccttccccccttccgccttggccacagtgccccaaagagccagcgtgctgcgcaattcattaaggtcaagcggtttggtaatatggtcgttcataccggcagccaggcttttttctctgtcgccgctcatggcattggcggtcatggctataatgggcacgcttttggagcggggggactcgctcccgcgtatctggcgcgcagccgtaaggccatccataagcggcatctggatatccatgagaatcagatcgtaaaaatccgactcccatttttccacggcctgggccccgttttcggccagatccgcctccacacccatgtcctgtaaaatttccagggcgatctcctggttgatggcattatcctcggccaaaagcaccttgagttcgggcaggggcgtttgttcctgtaaggcgggtgcgctttcttcgtccgcaaggtcctcttccgccccgaccctggccctaagggtaaagaaaaaggtactgctccgccccggctcgctcgcaagccagatttctccgcccatcatctgcaccaggctcttgcttatggccaggcccagcccggtgccgccgtacttgcgcgtagtggagccgtccgcctgggaaaaggaatcgaaaatgcgcccctgctcctcctcgttcatgcctatgcccgtatccttcactgtgaacaaaagcagcagttcctccccgtccctcgcctgtagggaaacatgcaggctaacgctcccggcttccgtaaacttgatggcattggagcagagattgatgcatatctgggccaggcgcagggagtcgctttctataatgtccggcaccgcgtcagacacgcttatgtcaaaaacgaggcccttttcctcgctttttacgccgagtatgtcgtagagagaccagagtatccgggataggcggaagctggcatggtgaatttccatcttttccgcttccactttggaaaaatcgagaatatcgttaataagtccgagcagggtcttggccgcattatcaatgcggcgcaaatattccatctgccttgcatccgggtccgcccgcattgcaagataggtcataccgataatgccattcatcggcgtgcgtatttcatggctcatacgggccagaaattcgcttttggccttggtggccgcctcagagcgaaataccatctcggtcaggctttccaccatcttgtccaggctctccgcaagcttgccaagctcatcgcggcggcgcactcctgtggagagtttcgacctgcccgcggtcacctctccggcaaaaaaactcaagcgcctgatatctctggtaaccggaaaaataaagaagcagacgcaggcaacaacaaagaatccggccaaaagaccggccagaatggtggccttgcgaataacggactcgtacgactgcatatagctttcgtcagccacaacgacagcatgcaggtctgtttggggaatgtgataaaagccgagagttttcatctcttcgtccacaggaatctgcatgctgcccgcaacctgggaacggatcttctcaagccaggccccctcggagagcatacggctgtcttcggcgtcagcgcctacgaaaaagctctcccgcccattggtaaacaccataaaaggcctgagttccggtcttgccacatccctgagcgactcctgaactattttgtccagttgcaaggttccgaccagagcacctgatcggccgtcatgcaccagtttgagaattgtcggcaggaacattttcccggtgccacctccatgtatgggtgccagtaccgagaagctgttcttcaatacgtccgcatgcaaaaagccaacaccctcccctgcaaagagagagagcgcatgcgcgtattgcccggccacgggccgccccttatcgtccaccagaaaaaaagagtcgtaatagccataggcccgctgggccctgctcaaaagatcgcttaaaaaagctctgctttccccctgcacggaaagctcccgccttgctggagaaagcttcacgccttccggtacgcccggcagggccgcaatcatcagcatgtcgcgcccggcctgctggatttgcatggaaatgccgtggcccatagtctgggccgcatcttgaatgcggctggacttgacataggaaataacggatcgggatgtgtgcagcacaaaaaggctggaaagagagaaggtcagcagcaccgccgtcagtatgcaaagcgggagcttgacgctgaggctcaggggctgtgtcataaagggctctctgctctgggtgcagcgtcttttacaatcaaccggccatctcattagcgataaaaaacagtatagctcattctcccacctaattcaatacagtatactttttttaaatcatggacctttacgcaaaagcagcatgccgcactcattctgcgccttcagatcccgcacttggcaagggctcctgcttggtgtaaaaagccctcttgacgtaaatattctttttaagaccaaataccgccctttccagccgcgcggcgcactatgcagaccgcgcgcctgaaccggagttgcagcatgagcaccgcccttctctttcccggccaaggttcccaggagcccggcatgggccgcgatctggccgaagcggaccgcgaggttatggatttgtggaaaaaggccgagcatatcagcggccttgcactgcgtgaaatttactgggatggcgatgaaagcgccatggcggaaacgcgctgcctgcagcccgcgcttaccgtggtcaacctggccctgtggcgcacgcttgcgcccaaaatctccccgaccgcagtggccgggcacagccttggcgaatactccgccctggccgcagcaggcgcgctgcctgtcgataccgttctggaactggtcagcctgcgcggacgcctgatgagcgaggccgacccgcaaggcgcaggcgctatggttgctgtgctcaaactctccctggaacaggtggaggcctgtgtggccgaaagcaaggcggccaggaacgagcttatccttgtggctaactacaataccccgggccagttcgtagtcagcggcctcaaaacagctatcgccgatctgcaagacagggttaaagccgccaaaggacgggccatagccctgcccgtgtccggggcctttcacagcccgctcatggaagacgccgccaaagaactctccgccgctatcgagggcctgggcaaaagctgctggaaacgggcgagattccccctttactgcaacgccgcccccaaagcggaaacagagccggagatcctcaaaagcctgctcaaaaagcagatgacctccccggtctactggatagacagcattacccggcagtgggacgatggctgccgcctctttgtggaatgcggccccaagggagtgctcgccaaaatggtcggccccatcctgcaaggctatgctcccgcaaaggccgcgcacagcgaggaatcccccgcctggcgcacgctcgcagccgggaacatgcagcaggtgcaggccatatgattttccggggaggctctgcctccccaactcttagcatacaaagcaacatttcaggagatatacatggcgcttagtataggcatcgttggcctgcccaatgtgggcaagtcaacgcttttcaatgcgctgaccaaggcccagaacgccgaggcggccaactaccccttttgcaccattgagccgaataaggccacggtgcccgtgccggacacgcgtctggccgcacttacaaatctcgccaagccgcagaaagttctgcatgccacggttgattttatcgatatcgccggtctggtgcggggggccagcaagggcgagggattgggcaatcagtttctggccaccattcgcgaatgcgcggccattcttgaagtggtgcgctgttttgaagacgaaaacattacccatgtggacggcgctgtcagccctttgcgcgatattgaaaccatagagacggaacttctgctcgcggacatgcagagcgttgaaaagcgcctggaaaaggctacgaaagcggccaagggtgacaaggccatgcaggccctggcaaaagatttggaagccctgttcgcccatatgaatgaaggaaagcccgttgccgccttttccgcgccggattcggagatctggcggcagaccatgcacgagcttggcctgctgacggctaaaaccgttatttattgcgccaatgtggatgaagcctccctgagcgagccgcaggcgaacgctgcgttacgcgaactggcggcctttgccgccgcacggggccgcacgctggtgacggtttgcgccaagattgaagaagaactgcaaggcctctccgaggcggaacaggccgaaatcctttcctcctacggcattgaggaaagcagtctggtgcgggtcattcgcgccgggtacgcggccctcggtctggccagctatttcacggtcggccccaaagaggtcagggcctggaccattccggtgggcagcaaggcccctcaggcagccggggtcattcacagtgatttcgaacgcggctttatccgggctgaagtggtcggctttgacgattatctgcgcctcggctccgaagctgcggcccgctccgccgggctgctgcgggtggagggcaaggagtacgcggtcaaggacggcgacatcatgcattttctctttaacgtgtgaccgggatacggtgcggccatgttcgatcagcctcattacgcggccctcggccttggagagatatacgccaaggtcatggacggggagcgcctctcccctgccgagggcgagaccctgttcgcctgcccggacattttcgccgtgggcgcgctggcccaccacgcgcgagtgcagcggcatggccacaacaccttttacgtacgcaaccggcatatcaactacagcaacgtctgcgtgaaccactgccgtttctgcgcctttcgccgggacgatgaaacacagcccggtgccttcaccctggacaaagaggccgtgctcgcccgcgccctggacgatgatggccacccctttgcggaaatccatgtggttggcggctgccaccccacactccgccttgcctggtttgaagatctctttcgcagcctgaaggcactgcggccaaaggccgtgcttaaagccttcactgtggccgaaatccaccattttgcccgccaggagggctgtacggaaaaggcggtgctggagcggctgaaacatgcgggtctggccatgctgaccgggggcggggcggaaatcttcgctcctgccgtgcgggagcgcatctgcccggaaaaaatcagcggcgcggactatctgcgtattgccggagaggcgcacagactcgggcttgcctccaactgctccatgctcttcgggcatgtggaatccttccgggatcgggccgaacacctctgcgccctgcgcgagcagcaggacaagagcggaggctttgtctgtttcatccctctggcttttcaagcccggcataaccaattggccgaggctctgagcttgggcggcgaagataagagcgctccgcagatgctttcagacgccgcagcaggcttggaccgtctgcgggtcatagccgtggcccgcctgcttctggacaatatcccgcatatcaaggcttactgggtcatgctcggcgtcaagaccgcccaggccgcgctctcctttggcgcggacgatctggatggcactatcatggaagagcatatcggccatatggccggggctgacgcggcccaggccatgagccgggcggaactcgaagccatgatcacaggctgcggctttacgccggtcaaccgcgatgccctgttcaacacgctgcccgcaacagggccgggggagtcggcatgaacaaaaactataatgaaagccgtaattttgacgccctcgggcgcgatgccctgaccgcccttgacccggatgcggcgcgtatcctccggcgtttgcaaaaggcctatgccgcgcatgcggctgcgtgcaaggcaggacaaaaggacggtccggcaccaacttacggctacaccggcccggctgccgaagcacgcctgagcagggaggaggcggacattctttaccgcagggccgaccttttcaacctatgcgcgctcgcccatcaggcccgtcaggccctgcaccccggcaatatcgtcacctatgtggcagaccgcaatatcaattactccaacatctgcgtttgcgcctgccgcttctgcgccttcttccgcccgccggggcaccccgagggctatgttctgagccgtgaggaactggaccgcaaaatccgcgaaaccatcgcccttggcggcacgcaaattctcatgcagggcgggcatcatcctgatttgtcgctctccttttacgaagaaaccctcacctggattcgaaatgcccaccccggcatccatattcacgccttttccccgcccgaaatcatgttcttcgcggaaaaggaaggcctgtccgtggaagaggtcatcacccgcctgatgcgcgccgggctgcattccatccctggcggcggcgcggaaatcctgaccgaccgcgcccgttcccaggtttcgcccaacaagtgctccagcggagcatggctcggcgttatgaaaacggcccaccaactcggtctgaaaaccacggccaccatgatgttcggccatgaggaagaagaaggggagcgcctggaccatctttttgccctgcgcgctttgcaggatgacactctgggcttcacggcctttattccctggacctttcagtccgcgcacaccaatatcgtctgcgccccggaaacggcccagggctacctgcgcgtgctggcgctctcccgcctggttctggacaatctgccctccatccaggcctcctgggtcaccatgggaccgcaagtggcacaactggccctgctggccggagccaatgacttcggctccctgatgatcgaagaaaacgtggtggccgccgccggggtctccttccggctctcgcgcgaagagattcacgccgttatcggcaaggcgggcttcatgccccgccagcggagcatgggctatcgcttgctggactgaaaaactttggaggcgcaccatgatcgattccgcttcatcgcaagacaaagcgcgcatggggcgcatcggctatctcaacgtgctgcctatttaccatgccttggaatccggcctgattccccacaattatgaactcctttacgggcctccggcggaattgaaccggcgcatggccaagggggagatgctggcctcctccacctcctgcattgaatatgcccgccgccccgagcgctacctgctcctgccggatctcgccatcggcagcgacggcccggtgcagagcgtgctgctgctctcgcgccgcccggtgcgggaattaagcgggcagcgcattctggtcagcgcggaaacccacacctctgccgccctgctccgcctcttgctggaccagcgctatgcgcttacggacatccgctattataccggttcggccacggaactcgcggcctcgggcaatcctccggaagcctttcttgccataggggatgaagccctacgtttgcgcaggcatccgctttacccctgctgcacggacttgggcggagcctggaaggaatggacaggactgccctttatcttcggggtctgggtggcggatcgcgccgcctataagggcacaagccgcccggactgcgaaaacccggcctccctgctctgtcgctcccgtgactggggcctcgcccacctggaacgcattctggatatcgcagaacaaaactaccccggcatgacccggcaggaacatgccgactactttgccgggcttggcgcatacgcccttggcacgcgggaaaaggaaggacttcgcctcttctggaagaaactcgcggcagccggggagattccgtgtgaaccggaaatgcattttttggatgtggattgactgcgcttgggatatattgcgggaagcagtttttgggggaaagagaagaaagcaaaggctataaaaaaggcggccaaaggcaccgcctctactgatgtacttcagtgttaactgtgtcttgttaacggctgaagaccccattttgtcttctgctacaaagacagtctacttatattttatttcgctttaggagtcaagctcgtaattttcagcacaaggagaagccatgtacagacttgcgttggatatcggcacaaattccattggctggtgcctgttttccctggatgaagcgcttgttccccaaagtattctccgcgccggagtgcgtatttttcccgatggtcgggaggcgaaaagcggcaaatccctggctgaagaccggcgcttggcccgtcaggacagacgccgtcgggatcgctttatcagacgccggaacaaacttctgcaaacgctgatcgcatacgggctgatgccagaatccgaagccgcccgcaaagacctcgaaggcgaagatccctattgtctgcgggcacgggcgctggaccataagcttacctctcccgaactgggccgggcgctcttccatatcaaccagcgccggggcttcaaaagtaaccgtaaaaccgacaacacggctaacgaaaaaggcgtggtgaagtccggcatcaaggcgctgcacgagcgccttgccatggacagcgcgcgtagcctgggcgaatatctgcacaagcaaaagcaatctggagagcccacgcgagcccgccctgagagagaacgcgcgaagctggagtatcccttttatcccgaacgctcattgctcgaacaggagttcgacctgatccgaaacgcccagaagcagtatcatacgcaacttacacaggagcagtgggcagagctgcgcagcattatttttacccagcgcccgctcaaagaggtactgcctggtcgctgctccttagagccctctttacgccgcgctccgcttgccctgcctctggcgcaaaaagtccgtattttgctggacttgaaccacctgcgtattctggggccggacatgaaagaggaaaaacttacgctggcccagcgcgataccgcgctcaaaaccctcctaaccggcaacgatctcacgttcaacgccctgcgcaagctgaccggactgggagcggaatacagcttcaacctggagcgctccacgcaggaaaagctcatgggagacctgagcgcaaaaaaactgaaggacaaaaaggtgctgggctctggctgggccgcgcttgattcaaaggcacaaaaccgccttgtggagttgctgctggaggaagaagatggcaaacgcttaaaggcgcttcttacccaagagctcggcctttcggatgaacaggccgacaaggcggctgagactaacctgcccgcaggctatgcgtcccatagtgaaaaggtgttacacaaattggcgcgtgagttggaaaagggtgtgttcagctatgccgaagcccgcgaagcggcaggctacccctacaaagatactacgggagaagttttgccctatctgccctactacggcgtggtgcttgagcgctatgtgggcaacacgggggatgccggagatgctctggaaaaacggtatggccgcatcgccaatcctactgtacatgtggccctgaatcaggtgcgccgtgtggtaaatgaaattattaaggaatacggcctgccagcacaagtgtttctggaagtgggcagagatctgaaaaacggcctgaaagcgaagcaggaaatagcccaaagacaaaaagatgaaaaaaagcgcaatgacgcatggagggcaaagcttgaggaaaacggtattgccataagcgcggagagcatgcttcgtatgcgcctgtggacagagctggcagcagggcaggccaccgcctgctgcccctataccggtgaagtgatctccttcagccgcctttttggggacgacatcgagatagaacatattttacccgtagcacgcaccctggacaactcccccgcaaacaaaaccctgtgtttgcgcagggccaaccgcgacaaaggcaatcggagcccttatgaagcctttcatagcatgcccggctacaactgggcggaaattttgagccgggccgccaccttgccgggcaataaaaaatggcgcttcgcagaagacgccatgcaacgctttgaggaaaaaggtggctttctggcccgccaactgacggatacgcagtatatcgccagggtagccagggagtatctttgcgcggtctgcccttcaaacttggtatgggtcactcccggcagactgacgggtcttttgaggaaagtatggggattccccaaaaaagaccgggatacgcactaccaccatgcgcttgacgccgccttgattggcgtggcggaccgcagcttgttgcaacgggccgccacctatagcgccagggctgaaggacagggagaacggcgctttctggccgggtttgccccgccctggccgagcttcaaaaacgaggttctagaaaaaataacgagcatcattgtctcccataaagcggatcacggcatcgaggccgccctgcacaacgaaacggcttacggcattctagccccgaacggggctccccgaaatgcccaacaccgcaagcctgtaagctcgtttacaaagctggaacatatcctggctattaaggaaatcaaactgcgggccgaactcttgcgggatgtaacgcaaaaaccgcttgccgagtgtttggagtttctgcgccgggcggaagaactgcaagataaaaaggccaaagcggccctgctggaatttatagacatgacggaaaagtcctttactgaaaaatttcagtgctttgcccacaagcgcggcatacgcggcatacgtattgtggagacgctaacgctggttcccatttgtaataagaagggcaaagaatacaaggggcttttgagctcaagcaacgcctggtatgatatttatgagaatgacaagggaaaatggatacatgacgctgtttcaacatttgatgcaaataataaacgaaaaaacaaagaattcatcccggaatatgccgagaaaggattcaggcacgtcatgcgcctgttcaaaaatgatatggtcgagcaggaaattgacggagtaaaacgttactactatgtgctaaagattgagacaaaggggccgatatatcttgtagaacatatgcaggcaaacgtaaacaaacgccatgacgataaaaacgaatcagatggtttcaagctcaaagccatcagcgccggacctttgcaaaaaatgaaagccaaggctatattcgttactccggcagggcgaatcatttataaggagaggccctgtcatgctgccccaccttctggaaataaacggaaatgaacgctatttgtgcaaggagcgcggctttctttgtatcatgaatgaaggcaagcggctgggccgcctgcctttggatgatttgagcatggtgctggtggcggggcatggaaccgtcatcagcgccaacctgctttcagcgctggcagaacgctgtgtgccggtagtgctttgcaacgctgccatgctgcctgtttctctgactttgccgctctcggggcatcacctgcaaagcctgcgtatgaaacagcaggcagcggcctccctgcccctgcaaaagcgcctctggcaaagtttggttatggcaaaaatcaacaatcaggcccaggttgccgaaggactcggcaaaaaatccggtcatctgcgagagctggccaaggcagtacgttccggtgattctgataaccgcgaagcggcggcagcggctgtttactggcccttatgctttgggaaaggctttcgacgtgacaggaacgagtccggcgcaaacgccctgctcaattacgcctataccatactgcgctcggcaacggcccgggctatccttctctccggcctgcacccggcttttggcctctttcatcacaacagccgcaacagcatgcctctcgctgatgatctgatggagcccttcaggccggttgcggacttgctggtgctgactctgttgagcaggggaaaaaaagatctggtcccggaaaacaaacagtttctggcctccctgaccaacagggatatgtcgctgaagggcgagacatcacccctgtcaagctgtttgcagcgtcttgcgctttcccttgccgaagtctatgccggagaaaaaaagagcctgctcctgccggaaaaaatactcctgcccgttgaaatgcaggcaattcccgcatgagtgtattgaacgggtatagaatcatgtgggttctggttatgttcgatctgcctgtgctcacagcgcctgagcgcaaagaagcaaatgcctttagagagtttctgcaagacttgggatttgaacgctgtcagctttccgtttatatgcgctgctgccccggcaaagaaaaaatggaacgctatgtgcgccagataaaaggcagtctgccgtgcggcgggaaggtagatattgtatacttcacagataagcaatatgaaaatattatttccttccgagccaatatccgccaaaaaaagaaaaaaacggaacaactcgcgcttttttaacgcatatcgctccgttttttacgcccatctgtagaaaaatatcaataaatacaagatattatttctgatagactgtagcagaagagaaaatggggtcaagccgtaactatacgctacgactctcttccaccaaatgaactgtagcagaagagaaaatgg

SEQ ID NO: 1602 - DNA, 7486 bp, synthetic construct
  source 1..7486: mol_type = other DNA
  misc_feature 1..7486: note = Synthetic
acaggtgtgcttaggtctactgcggttatagctcccttccattttccgagatgttagaatcaagtaaagcagggcggagcgagggaatagttatagctcccttccattttccgagatgttagaatccttcaacacacctaacggctgatacaaagttatagctcccttccattttccgagatgttagaatggaacgggctctcgagactcaagccgtccagttatagctcccttccattttccgagatgttagaatcggcctacggccggggctgacgcgccgcttgttatagctcccttccattttccgagatgttagaattgacgatatgcagcgagttggcgaggccgcgttatagctcccttccattttccgagatgttagaattcacgcccttcgggcgcgcgtggactaaaagttatagctcccttccattttccgagatgttagaatatgcgactcctgaaatgctgtaaatactcattcgataaccttaaagacgcacaaaaaacgagtttttcgaatcttgacaaacggctttgcctgcagatttttttaatctgagtggcagcgtaattaaaatttagacaggcttgcgagtgtttcagattcaaagcgtttcctcacggacttcgtttcacttctcacaatgatttacgctagaacttcgggataatacttgtaaaaaaacatactctttactttttagttgaacatggtataataattatgtcgatttccgctttagcgattctaccatctcggaaaatggaacgttgctataataagagaaatcgcagggttctacccctaggcggctatccgtctaggggtatccttttttatttagaggaggcagagaaatggcgcagattcttggtctcgatatcggcatcacttcagtcggctggtgtgtccttgatgatgaaaagcacaagatcacagggcttggcgtcagagttttcacaaaggcagaaaatcccaaagatggagcctcgctagcactgccacgacgcttggcaagatctgcacgccgtcgcctgaagcgtcgccgtaaacgtttggatgaaattcgttccatgatgataagcgacgggctggccgattctgaaagtgagattgatgcgattttcacccatgtgaccgagaaacagggttcaccctaccaactgcgtgccgaaggactcgaccgactcctcgcgaacaaagaatggattcgcgtgctgttgcacatcgcaaaacaccggggcttccaatcgaaccgcaaaagcgccgaaagaaacgacaaggaaactggccagcttcttgaaggtattcaagacaacgaggcacgtctaagagaaaaaaaatatcgcactgtcggtgaaatgctctggcgcgacgaaaaattcgcgctctgcaaacgcaatcacggaggcagctattcacatacgctgtcgcgctcgcttctggatcaggaagccgccgcactgtttgcagcgcagcggaaactgggcaatcattttgcgtctgaagattttgaaaaaagatttcgccaagccttcaaataccagcttccattcgcttcaagcggcgatattctcgaaaaggttggtttctgtacttttgagaaagataaaaagcgcgcgccgaaaatgagctatacggctggctattttgtcctgctaacgaccctgaatcatcttcggatttttgactgctcggcagacgggaattttatcgaacgcggcctgagcaatgatgagcgacgtgcattgattcagctggctcataaaaaagaagccattaaatacagcgacatgcgcaaggcactgaaactcgatgattcatcgcgttttgtcggcctttcttatcaaggctcgcaacccgaggaaatcagcgcggccgaaaagaaaaccgtcaaagtaatgcagggctatcatcagatgcgcaaagcttttggcaaagaagggcaagccctttgggaaagtctttgcggcgacacaaaactacttgatgcggtcgcctggattttaacttgtgaaaaatctgacgatgccatcaaaagcgctttagaaaaacttttcctaaaaaaacaagtcaatcttaaagcgatcgaatatctgctgccgttgtcattccaaaaatttcagcatctttccatcgaggccatgcaaaagatcattcccgggctggaaaaggggcttacttacgacgcagcctgccaggaagctggctacaatcacgccgacgtcaatatctccgtaaaaaagcagccattcctgccgccattggacgaatatatgcgcgactgcggcgaagaaatccgtaatccagtggtcactcgggctctcggccaggttcgcaaagtggtcaatgccgtcatcagaaaatacggaccgctcagtgaaattcacgtagagttggcgcgcgacctcgccaggccttttgacgaacggaataagatcaaaaaacaacaggaagagaaccacgcagaacgcgagcgtctggtcaaagatatcacgacgaccttctctaatgttttttcgtcccaaaatcttccctgcggcggcgacgttctcaagtatcgcttgttccgagagcagaacggtgtatgtgcctacagtcagattccatttgacaggcaccgtctttttgaagaaaactatgccgagatcgaccatgttatcccgtacagccgcagtttcaacgacggcatgtccaataaagttctcgtgctttgttcccaaaaccgcaacaaaggcaaccgcacgccgtgggaatttttcggcagcgacgtcaaccgctgggacagtttctgcggctgggttcgcactacaatcaaaaactcgcagaagcagcgcaacctcctccgcgcggatttacaggacagcgccagccatgacatgaaagagcgcaatctgaacgacacgcgctacattacgcgttttgcggccaactggctgcgcagcagccttatttttgcccctgacgctccacgaaatcccgtccgcactgtgccagggcgctttacggccatgcttcgcggtcgctgggggctagcgaatatgaaagaccgagagaaaaacaatctgcaccacgcgcttgacgccgcggtcattgccgcatcctcccccggtatggtcgcagccattgaaaattacgcaaaaaaacgcgaactgaaccatttcagaaccaattcgtcgggagagcgtcaccgcgaaccttttccagaaccatgggcagggttccattttgagctgaaggttcttctcagcagcgatccgctggaagccctgaaagaaactcgacttcctgacaattacagcgaggaagaaagaaagaatctgaggccgatttttgtttcccgtatgcccgaacgcggaacaaccgggcaagcgcacgacgacaccgtacgcagcgtcaagcgacgtacgcctgaacaacgtggctgcgtcagcagaatcgacctgcagaaactgacgctgaaagaccttgagaacatggtcggcaaagagcgcgactggaagctttacgaagctctcaaaaagcagctggaagattttggcgacgaccccaaaaaagcttttgccaagccgttctacaagcctgtcaatggcgatggagcagctccgctcgtcagaaaaattcgcgtgtacgacacggtcaattcgggagtaaaggtgcgcggcggtttggctgccaacagtccaggcagtcaggtccgtgtagatgtctaccgcaagaatcaaaaatattacctcgtcccgcactacatcaacgacatctcccgtggcgttttgcgcacaagagcgattaccagaggcaaaaacgaagaaaactggacggtcatggatgagagttttgaatttattttttcactgtttaaaaacgatctgatcaagattacagaaaaaagcggggaagaaataaaaggatactatatcacgacagacatcaacacagagcgtatcaccctagaaactcctcaagagaaactaagttggcgcaatggtgttaaaacggcttccctgttcgagaagtataccgtcacgccgctaggcgaatattataaagtcaagaaagaaaagcaccccgaaggaaagcccctgtcatgagctggcgcaacatcgtgatcagcagccctgcgcatctgtcgctggatcagtgttcgctcaaaattgaacgtcccgaacaggaagcgatcaccgtaccgcttgaggacatcgccagcatagtactcgatcaccggcagatcaccgtcaccttgccgctgctgtctgccctgtctcagcagggggccgccctgatctcctgcgactccgcccacacgccctgcggcgtgcagctcccctttcatcagcacagccgcacgctgcgggcttttcaactgcagctcgacgtcagtgtcccgtttctcaagaactgctggaaacgaatcattcagcagaagatcagaaatcaggcgcgttgccttgagttggtcagattgcctcaaaaatcaacgcttcgcggcatgacaacatgcgtcaaaagcggcgacagcgataaccgggaatcagccgcggccgtgcagtatttcgccgcgctctttccagggctgaaacggcgcgaagactgcattatcaacgcagcattaaattatggctattcaattttgcgcagctgtgtggcgcgctgcctcacggcttatggctttcagcccgcgctgggaatccaccactgcaacgagttgaactcctttaacctggcagacgacttcctcgaacccttccgacctgttgtcgatctctggacatttctgcacatgcgtgaaagccaaagtttcgataaagaacatcgcgtcgcgcttgtcaggcttctttcctgccttgtgaaggtcggccaagaagaagtgacgcttcaacgcgcttgcgatgttctctgcgccagttatgtcacagcgtgccgcgaaaaagctccggaagctctacagctgccggaactcatggaactccagactcgtcatgagtgagccaagattcatgcgcatcatggttttcttcgatctgccggtgacgacaaaaaagaaacggcgtgattatacccgcttccggaaatttttgacaaccgatggctatgacatgcttcagttttcggtatacagccgcatcgtcaacggagaagacgccgtcgataaacatctaaaaaggctgcgcagcaatttgcctccggaaggttctgtccgctttctgcaaattaccgaaagacaatatgccgccatgaaactgctcttgggaaatcagactccccgtgaaaagttcattacgactcaaatgacactggaattctgaaaacgctctcctctttaactctctctcaaactgtacgtggagcgaaagagcgccgtacggaaacagagaggcacatgccgagtccacacaaaaaatcgtcctgaagctctcctaacgaacgagagtttcaggacgattttcgctcaggcgttggcgttccagtggacgttgcatttctccacgtagccgcagggcaggtaggccagcttggcgtggcgcaggccgggatcgcccatgtcttcctcgcggttggcgatcttgtagctgcgggcgtcgtagaacagaaaatccttgttgatgacctgatagacttcgtggaactcgggcaggcctttttcgtaatggatcatgatcagctcgggtgtgaccggttcggccagcgtgtaggcgatcagccggccgtccagttcgatggcgccgccgatcaggcccatttcccgccagtggtcgagcacgcgcaggatgccctcgccctcggcggtcagcatcttggtcatgaactcattctcgtcgtgagtccaggatctttgcagatttttgatttcctcggtcatctccggcgtcagcgtcttgtactgggcgttgaactcgcggcggaacttgttgacgcggttgcggcgcttcatatgcttgttgccggccagcgtcgccagctcttcgacgttgtagaggtactcgtagccacggccgcgattttcgcgcccaactgttcctgccagatcctgacgagcgatttgggcacgtcgatgaaatcggcttcgtcgcccgcgtgcgtccgcagctgttcgtcccagtcggcgcggtgccagttccccaccggcgccagccatttcagatcgggcttggtctggcgcatccagatcagttcgggttcccagctcatctcgtagccgaagaaatcctgccacgcccagaggaccacaaagctcatgtccgacgaatattcgtcgcatcgcaaccaaaattctctgtattttccgtattgggacacggccaaaggtttataactttcgttcactgaaaaacgcctccgaatctttattcaatatataatcggtcaaatttacaagatcattgtagcacagccgtcaaacaaacggcgaaaacagacttttcccttgccccgaaaagattcccgctacctcagaaagatcctcgccagcgccacggcgacgacgagagccggcagggcgttcatcagtttcatcttgaccatgccgaggatcgacagaccgacgccgatgagcataacgccgccggtcgccgtcatttccgccgtcgccgcttcggtcatgagcggctggatgaatcgcgcggccagcgtcagcacgccctgatagacgaacacgggcacggccgaaaaagcgacgctgagtcccagcgacgccgccagcgccaccgacatcaggccgtccatcatcgacttggtcaacagcagcgtcggatagccgcccaacccctcttcgaaagagccgagtacagccatggaaccgacgcagaaaatcaacgtggccgccataacgccctgcgaaaaattcgaatccaaactcttgaagcgattttgtattctgccggcggcgcgttcgatgcggccgtcgatgtccagcaggccgccgacgatcgaaccggcgcagaggctgaagaccacgatcagcatgttctgcgtcttcagcgccatgcccatgccgatggaaacggtaaacacgccgaggcactgcatgggcagcttcatgatctcttcgtcgacgcggcgacgcagcatgaaacctgccaaactgccggccgcgaccgccagcacgtttacgaccgatccatacaggggaatcgtctgccacaggttcaaaagaaaacctcccttaaaaacaagtacgtgcattatatcaccgcgggcgaagaaaatggctccgacaaaatataaccatttaaaatcattgggcagaaccccgctaaagatggtaaaatggttaggttaaaagcatgagagcgatttgaaaaaaagaagcgcatccagcttctgtcaatggaggttcaggcatggaagaacaggagatgggacgggtcataccgaatccgctcgtcccggaaataaaaagaagctatctcgactacgcgatgagcgtcatcgtcggccgcgcgctgcccgacgcccgcgacgggctcaagcccgtgcagc

SEQ ID NO: 1603 - DNA, 23369 bp, synthetic construct
  misc_feature 1..23369: note = Synthetic
  source 1..23369: mol_type = other DNA
ggtccctctcttggagctcgcctcgacccagcacgtcctcctctccgccacgctgggcgacacgtccttccttgcggaagacctgagcaaacgcacgggcaggaacacatccgtcgtcgaccgcgccgaacgccccgtcccccttgcgttctcctactcgcgcgaacccctcggcgaagtcgtcctcgagctcgtccacacccaccgcgcccccgtctacgtggtccacttctcacaaaaggaggccgtcagccaggcgcaggcactgcttccgatcaatctgacgacgaaggccgagcgcgagctcatagccaaggagatcggcgatttccgcttcggccccggcttcggaaaaacgctgtccaaactgctgcgatcgggcatcggcgtccaccacgcagggctgctcccccgctaccgccggctcgtcgaaaggctcacgcaagccggacggctcaaggtcgtctgcggcacggacaccctcggcgtcgggatcaacgtccccattcgaactgtcctcctgacgtcgctgtcgaagttcgacggaacccgctcacgccacctttcggcccgcgaattccaccagatcgcgggccgggcgggcagggccgggttcgacacggcgggcgacgtcgtcgtccaagcccccgagtacgagatcgagaacgcgaaagccctggaaaaagccgccggggaccccaagaaactcaagaaactcgttcgaaagaaagcccccgaaggcgtggtgctgtggggagagaagacgctcgcgcaccttcagaacgcgacgccggaaaagctggcctcgcagatgcgcgtcaaccacgccatgatcctcaaccttctgcaacgccccggggattcggtggccgccgccgtccgtctgctgacggacaaccacgagcccaaaaccgagtcgaaccccctgatcagaaaggcggtcgaaatctacgaaacgctccgttcggcgggggtcctcgtccaccacgacgtccaatggcaggctgcccaccccggcgaatccgcggtggatttcgcccgcgaggttccgagcgacttcgccctcaactcgcctctggcccccttcgcgctcgcggccctcgacctgctcgaacgcgagtcccctgactatccgctcgacgtcgtctcggtggtagaggccgtccaggaaaatccgatgcaggtgctctacgcgcaggaacgcgcggcgcgcggcgaggcgatcggaaggatgaaggccgccggaatgggctacgaggagcggatggccgaggcggactccatcacgtggccgcggcccctcgcggagcttttggagggggccttggccgtctaccgtcaaacgaatccgtgggtggacggctacgacctcaccccgaaatcgatcgtgcgggaaatggtggagcacgccgagacgttttccgagttcgtctcgcgctacgacctggcgcgcagcgagggcgtgcttttgcgctacctctcggacgtctacaaggccctgcggcagaccgtgccgctcgaggcccgcacggacgaggtcgacgagatcacacagtggctggggacgctcgttcgctcggtcgactcctcgctcctcgacgaatgggaggccctcgccgacggcagggtgacgcccgaggaggccgcccgcatgtccggcgaggccgagggcggactcgacgaggtcgccttcggggcggacgagaacggcgccgccgcctttacccgcaaccgccacgccttcaaagccgcggtccgcaatgcggcgtttcgcagggtcgaggccgttcaattcgaggacctcgactccttggaccgcctcgacggcgagcccgcgtgggcggaatccagccggttcggggacgccggcagccaagtcggggacgagggcggcgaggctgaggctgcggacggcgcggccggggccgcacgcggcgaagcacgagacgcacacagcgaggcaggggacgagggaagccgggcgacgccttcaaagcgcgaagcggggcccgtatgggacggcgacgcctggatggacgccaccgatccgtacttcgacgtctacgagagcgtcggcatcgactcccacgcccgcggaaacgagttcttccgagtgagagaacaggtcgacgccgcagacctcgccgaggcgggcgtgccccgcgaggtcgccgaggccctcgttgaaggaaaacgacccggccgtctatggatcgtcacgcaggttttcgacgacggcgaaggcgacggcggctggggcttccgcgcattcgtcgacctcgacgaatgcgacgagctgggtgcggcgaagcttcgggtcgtccacgtcggcgagctgtgatcccggccgggccaaagtgcgctgtcaggtccggacgcgcccgcggattccgcgccgacgggctctccgcagacaagggctgcaggctccgtagtcgtctggattccttgcacaatccggctctcgcccgcggacgagggctagaggctccggcccgttcgaggccttgcgcacctgccgtgcacggacgcgcccgctagaattcaaaggtcgaaagggttggcatagatgaacgaaaacggcggcaaaggcaccggcggcgtcgagacgagccgagtcgacgcaaacggcggccacgcaggcggcgtcgagacgaacggcgtcaactggtccggtcaggagaccagcttcgagggcgtctctcggccggatgtaagcgagatcggggggcgctgggagagcctgcgcgacaaagtggccgcagccgcgtcgcgcgcggggcgcgaggagaacgccgtctcgattctgctggccgccaagttccaggagcccgaacgggtcgtcgcagccttgcgcgccggaggcggcctgataggccacaactacatccagcagctggaggagggcgaaagggctctgagcgagctgggcgcgcccttccaccgcgtccacgtcatcggccacgtgcaggcgaacaaggccggcaaggcaatccgggcagccgactgcatcgaaaccctcgattcgctcaagctcgctgcgcgcctcgaccggctgcaaggcgaacgcatctcagcgggcgagctcggaaaggacggcggccccctcggccccttcgacgtcatgatccaggtcaactcggcgggctccgaatctcagcacggcgtggatccgagcggcgtcgtcgacctcgccggcgccgttgccgagctgccgaacctgcgcctcgtcgggctcatgctcatcggcgcgaacaccgacgacgtcgccgcggtggccgcctcccatgcgcgcgtgcgggagctgcgggatgacgttcgggccgccggcgtcgccagctgcaccgaattgtcgatgggcatgacgggcgacatggaaatcgccattgccgaaggatcgacggaggttcgagtgggcacggccgtgtttgggccgcgtcccgtgatgaagcaaaccagctcgcaatgaagcaagacaaacgtaatgacgcaatcccgctcgcgatgaagcaaaacaaacattatgaagccagcttgctcgccatgaagcattgccagctgccgttctaaggcactacggaatgcgcgccagccaggccgggtcggcgaatttggcgtcggcgaggctcttggcggcgatcagctcgtcggggcggtactttgcttttctcaccgtgcgcccgcgcttcagcgatcggcgaagcgcctcaatgacgtcctcgcgtgccgcgtcgacgtaggagctgattcccaccaccttcttctgggcgctcttcgtgccgcgtgcgccggtgtccggccggaagagccgggtgacggccagcagctgctcggtttcgatttcccagctcatgaccgcgtggtgaatcgtcgcgcccccggcgagcctgcgttgggctgcgccgccgatcttcccgtcgagggtggcgatgtcgttgaccggcatgtagaaggccggcactcccatttttttcagggcacgcagaacccacgaatcgcacagcgcataggattcgcgcagactcaggcccgaaagggccgcgcttggcacgatcaccgagtaggcgaccgcccgggcggggtccatgtacatcgtgcctcccccgcttgcccgccgcgccagtgcgattccgcgttctttcgcggcttcgacgtcgatctcgttgctcaacgactgcgaggagccgatcaccgccgccgtttcactccaactccagaggcgaacagctgcggggcggacgcctcctgcgacgctgtctgcgacggcgtggtcgagcgccaagttcaaagcgatcgaaagagggcgcgattcgagcaggtcgaatcgggagggtaggccggcggcgccgtcgggctccggaaggcgggcgccggactttgacgagcggccgacgccgggatccgccgctcgactaagcgagccgatagagccaaccgtggcggtcctcgacctttccaagctggattcccgtgattcgatcgtaaatcgttctcgtcacttcgcttcgggggatctccactcggaaatccttgccgcagagcgagccgatggaggtgatgaccgcagcggttccgcaggcgaacatctcggcgacggcgccgctctcgattccggccagcacatccgccaaggcaagggtctcttcgcggacgtccgcgccgtcgtcgtgcaaaagctggagaatcgacgagcgggtgcagcccgccaaaatgttgccggtgagcttcggggtgcggatcgacccgtcggacatcacgacgaagacgttcatgcctccgagctcgtcgatgttcgtgtcggtggcggcgtcgaggaacatgacctcgtcgtatccgccctcgtacgcgatcgttttgggcaggagcgatgaggcgtagttgcctccggtcttcgcgtcgcccatccctccggggccggcgcggtggaagtcgcgttccacccacacgtcgatcggctggaagccgttggcaaagtaggcgcctgaaggcgatgcgactgccaagtactcgtagcgttcggcggcgcgaacgcccaagaacgcttcggatgcgaagacgaacggcctaaggtagagggaggagccgggcgcgtcgggaacccaagcggcgtcttggcgcacgaggttgacaagcgatccgatgaaggcctcgtgttcgagctcgggtatagccaaccggcgattggagtggttgaggcgggccgcgttgtacgtgggcctaaacgtccagatcgaaccgtcctcgtggcggtaggccttcagcccctcgaacgtttcctggccgtagtgcagcaccgcgccggcggggtccatggagagcgggccgtaggcttcgatcctgaaatcatgccaccctttgtcaggcgtccacacggcgtgggccatgtgatcggagaactgctttccgaatcccggggcggcgagcactccttcgcgctcggcctcgctcgccggatgcaggttgggcctgacatcccatgtgccggcgaggtcgtcggcggcgggcaccgcctccatcgacgccagttcaagatccgtgtaactcataagatcacttctttctcggggcaatgagtcgattctagtgccagatcgggcgccggacgattccgatcgcctcggcgatccatgcgccgcacggctcgccgcgcgcccgttcccgcgtgcggcaaggcccgcgcctcagccgcggaccaaggccgcgagggcgtttccgacgtccgacgtcgaacgttccaaaggcgtgcccgcctcggctgcagcagccctcgcgaccatgtcggattcgatcgcgttctcgatcgcccgggcgtgctcggcgagcccgaggtggtcgaacatgagagccaccgaggcgacggtcgccgtggggtcggcgatctgcttgcccgcgatgtcgggggccgagccgtggatgggctcgaacatggacggaaaggccttctcggggttgatgttcccggaggcggcaagtcctatcccgccggttatcgcgccggcttcgtcggtgaggatgtctccgaacaggttgtccgtcgcgatcacgtcgaatctggcgggatcggtgaccaggaagatcgtcgcggcgtccacgtgcatgtagtcgactgcgacgtcgggatactctgcgccgacctcctcgacgacgcgccgccacagcccgccggcgttgaccagcacgttgtgcttgtgcacgtatgtgagcttcttgcgggggcgcgcttgggccttggcgaaggcgtatcgcaccacgcgttctacgccgtaggcggtgttgactgagacttcggtcgctatttcgtggggggttccctgccggacggcgccgccgttgccgcagtaaagcccctcggtcccttcgcgaaccacgaggaagtcgatgtcgcccggggcggccagcggcgtcggcactcccggatagtgcctgtttggccggaggttgacgtaatggtcgagagcaaaacgcagcttgaggaggaggccgcgctccagcacgccagaggggactcggggatcgcctatcgcccccaagaggatcgcgtcgcgccccttgatgtcttcgaggtccacgtccgtgagggtctcgcccgttgcgaggtaccggcgagcgccaaggtcgtatgtgtgggttgcgatttcgggcccgccgagggtttcgcgcacggcatcgagaaccttcaggccttccgccacaacttcggggccgattccgtcgccgggaatcactgcgaggtctatggacgtcatggatctaggatatcggctgttcaaaatacgggattctcatctcattattcggacagctttcgcgttgagccggcgtgcgttcgaagccaaggcgaacgggatgcgagcccggccttgacgagctcgggctcgcatcgacaacggggtttgggtgccgcgcgggacgctccgcagaagcgcccattccgtaggatttcgaggcttacgggatctccagggaccaattgcctcccgtggtgtcgatcaaaatcaaactttcgccggtcttcgccgggattgtgacgtccttttctacggctgctttttgttctttgatgaaagagttcgctttggagctgccgtcggtgggccacagggtgccggtgactcgccctttggaggtgttgccaacgtacttgaaggtcgccgatgcctcgcccccgcgatacaagaacgcctcatacgagtttcctgctatcgtcgcacccttcgagaccctcggaatagaagagatcggataaacgcggatcatccacgggccgggagccgtcaccctgatcttcgccgtctgtttcccgttggcgaaggcgtcgagcgggaaggtgcccgtcgtcttctcgtccttgaccattcccccgaaacgttccgtttgcgatccgccggcatcctgcgcctcgacaaggaagaatccgtagttcgacgccgggttgatttcaaagtaaagaagaacaggctgacttccctggggcttttggatgtctatcgtttgggggccgtcgccctggtactccttgaacgtgccggtgagcgcaggccgggtcggcttggagggggcgaccgtgctcgccggagtgctttcgtcgtctgtcggctcgtcggggttgggactcttgcttcgaggcgacgtcgtcgcggacgtggacggcgaggacttggcggtgggtccgtcgtccttgtcgtctttcatcagcttcggcacgaagatgatcgcggccgcgatggcgatgacagccaccaccgataggaccgctaaaccggctttgcttgtgaggaaggacttccggggcgttccgtcaagaccgaagggcatgcccgtcccgaagtccgacgaggctccgtaggtcggctggctcaacccctggccgtgggcggagtagtcgactcccgccccagggagcgcccctcccgccatctggctttcgggggccggagttccaggctccgcgggctgcccgatcccggcttgcgcggcgaatcccgattgcgggccggccgacggagtgaatcccgaccgccccgaggaaccctcgggcccctgctggcttgaagggccctggaacctgggctggcctgacgagcccgggcccgcaaaacccgatggagccgaagaagccgacggagggaaccctggctggcccgacgaaccttggaaatccggctggcccgacgaacccggctgttggaaacccggctggtcggcgaagctatatcgctcggtcggttgataaccggcactttgagcagagggcgacgacgaagccgacggcgccggcccagcctgcgaagggcccggcgcgtgcgcaccgaacggaggccgcgcgggcgctgcttgccccgcaccgggcgccgactgagccgaaccaggcgccgcccaacccacaccaggcgccgactgagccgaacgcggctccgactgacccccgccggggattggctgcccggccccgaggcccgccggtcccgaatggaacggaggccgccccgggcgaaaggcggactgccccggaggttgctcggagccaaaacccgcctgccccgaagcggacgtcggctgcgcaccgccagattcagtttgccgcgagccgggggcgggaggctccgaacttgacgccgagtaggccgacggagttgagaaggcactcggagcggagccgctctccgaagggccctggctcccggccgggacgtttcgccctccggggacgaaaggctgcccgcctccggcggggccggcgggcgcagagctcgccggggcaaacctcgggcgtgaagactctggcgcggcgccggccctgaaagcggggccgggcccggcattcgcctggtcggagcgatccggagtctgctgctgagaactcagcggctcgggcggcgcggcgtgcgcgccagagccgtttcttcttctcgaggaacgcctcggcaagcgggaaatggtctcgtcagccgagttcgagctccggtcaggctcgtcggagtctccggcggaaagcggccctcccacggcaggcgaattaaccgaggaattcgaatcgtcggggaagcgggtgtcgtcgggtgcgtgcgaagagtcgggcgcgtacggcgaatcggacgaatcggccggcgacgaggcggaaggcagaagggtggcatcgacgtcgatgtcttccacccagaagttccagccagcgggagccgggccccaagcgggatcgggcctccaaccagcaggaggggtccacccgtcgggcgccggcggccagttcggcggtgggttgaatcttttggacatgagcaacactcctgtggtgcgtgaaacgacgatgccattgtcccacgccctcccccacctgccgccacccacgtccacggtgcgaaacgcctcaagtttgctttgttcataagcgaaaaccattggcgatcaagggccctgacgacgccgaaaccgctgcgaatcgggcacttcgacgtctaaacacatcgaagcatcctgcggcgccgactgtcgcggacagcacacaactcatctcttactaaaatgcggtcttatcgccgtcgggagcctccgaaacgacgccttcgcgcggcgatcgaccacgactctttgggggccgtagaaacgccgggcgcggagaagctttgcttgccttcgctgttgcgcccaccgccttcgactttaaccatctgtaggtaatagacatcgatcttaaagcattaagactaattatctatggatttctatgtactagatccaaatttgtaactaataattacacttactactcatttgcaggtaaaatagactacttttattagtcaaacaacgaggatcgcaacccacttgacacacatgagtcataagtctaaaatctctctcataactgattcccagtaaggacctccgagtttgaggtactgaatgctcagcttatcggctgaatggcggcgcttttcagtgccgccattcgttttgtagaccacttgataaaacggttaagaagtgcaaatattctttcatgaacgcaatgaagcattatcatgcaggaattgatgtaggaaccaactcagtcggccttgcagcgatagaagtagattctaaaggtctacctttaaatattctcaacagcatggtcgtcttgcacgactccggtgtcgatcccgggaaggcgaaaaccggcgccacccgcttagccaactccggaacagcacgtcgaactcgcaaacttattgcgagacgccgtaagcggttgcagaaactagaccggtatatcgaagcgcaaggatggccgctcatcgacctctcttctctgcctgatccatacacgccatggaagatccgagctgaactaacgcagggtaggctcaaaggcgaagaacaaggccgcgcgctttcgatagctctaagacatatggcacgccaccgcggatggcgcagcccttacgaacgaatagagtctctccgttccccaaaggaggcttcgaagcaatttaaggatttgaaacagcgtgttactgaacttagtggcgtaatcttcgacgaagatgccactcccgctgaagttgtttgcgatgctggcctttctccaagtttacgcctacggtccgctccgagcacgaactacacgaaaggagctattctcgccggagagccggtgggtggaaagccaaagaaagggttgctcggaggcaaactcatgcagtcagacaacgccaatgagcttcgcaagattggcgaggttcagggacttgataccgagactgtaaatgaactaatcgaccatattttcgccgccgaaagcccaaaaggcaaagcgagtaaacgcgccaagaaggacgaccttcccggccaagatcagtatgttcgcgcgcccagagcacatttagcgtttcaacgtttccggattgttgcagcagttgcaaatctacggatacgagagaccggctcaaaacatggacgactactgtcaaaggaagagaagacaaaaactatcgagttcctgatgtcagccgatggaaccgacggggtgacttggtcggatgtcgcaaaagagttgagaattgagcgcgaaagcttgtgcgggacggccaaatgcggagccgaaggagaacggccttcatcatttcctccggtaaactcatcaaacatcagcatcactcggagcaaaattgagccacttgccaaatggtggaaagaggcgtctgacgacgagcgatctgccctgatcatcgccttgtcgaatgcagacgaattgactgatgaacagccaggcgcggaaacagttcgccagttcctttcttctctcgacgagcaagtactggagaaaatagacaagatatctctgcccaggggaagagctgcttattccgtaaactcgctagaacgccttactcgaaggatgcttgaagattccgtcgatcttttcgacgcacgaaaactggagtttggcgtggaaaacaattggagtccgaagccggatcctatcggcgagccggtcggcaatcctgccgttgacagagtcctcaaaattgtcaatagatggttgctagctgtcactaggaagtggggacccccaaatatagtcaatatagagcacgttcgagcagggtttacttctgagatacaagttcgcgagtacgaaagggaaaacaagaaaaatcgtaatagaaacttggcgatccttgaggaactccgggacaaacttggcaccagtgacaagattcgtcgcgaagatataacacggttcgccgccctaagacgccagaattgccagtgcgcctattgcggagaagcaatcacgttttccgattgcgaaatggaccatatagtgcccaggaagggacaaggatcgaccaatacccgtaacaatcttgttgcaacctgcgaaaggtgcaacaagtcgaaatccaacatgcctttctccgtatgggctcagaactgcgatatacccggtgtgagcgtcgaggcggttattggcagagtcagaacctggataaaggatccagagctaagcccaaagcaatataacaatttcaaaagggatgttattgaaaggttccgaaagactgctgaggacgatgccatcgacaatcgaagtattgaatcggtagcttggatggccacagagctagcggaccgcattggcagtcacttccgcgaggccggcgcagacacccaggtcaaagtatatcgaggttggctgacgtcagaagctcgaaaggcatcgggattcgaagggaaagtcaatctcatcggaggccgaggaaagacacggctcgaccgtcgacaccacgcaatggacgcagcaactattgcattgatgcgccaatctgtagcgcagacactggttgagcgggcgagcattcgagagtcggagcgactgcgacgagtcgtctcgagttcctggaaggactacaggggagcagaccgagataagcagttctcttacggctcgtggcttaactccatgaaagtgctcgccgagctattcaatcgtgcgatcgacgccgatgagatccctgtaactcaaaacctaagattgcgtttagggaatggcgaagcacacgatgcgactatacgaaagttcggagactcaaaaaagtgtgtgggtgctccctggaagatagaggagatagatagagcatcgacacctcagctatggcttgcacttacacgtcaggcagatttcgacaagaaagatggcttgccgaagaaccccctgcgggaaatacgtgtaaagaatcagtggtttaacgcggaagagaatgttgcgctatttcccactaagtccgctgcaattgcaatccgaggaggatacgcggagattggcaacaccattcaccacgcaagactatacaagcttccgggaaagaagccgacgtacggaatgattcgcgtctttgccatcgatcttcttaggacacaacatagcgatcttttttcgtccccgttgcttcccgagagcatcagcctgcgaacagccgaaacgaaggtgcgcagggccgtagaagacggaactgccatgtacatcggttggcttgtggacggcgacgaaatcgtcattgatcccgagaccaaagcgttcgactcaaacaatattggtgagtatctaagcgaatttcccggaacgaaacggtggagagtagacggttttcccgacaaagagaggcttcgtctccgaccacttcagctcgccggtgaagggctccctgaagatgctagcgctggcatcaaagagattttgggtcccaagggaaaaggttggcgtgtagctataaacacgcttttcaagtcaccgcagttggtagtggtgagaagaacggcattagggacagtccggaaactatcgcgcggacatctgccgctgactacaaggctccgtggttagaatgtccaataggtggcgaataatcgattgctcttcgcttaagggtaagatccaaacggcacggggagcggtcaagattcttaaagatgatcaccctccagcgtctgtaccgacagcagacgtggctgtggtgttaatcggaatgtctgcgactttctcagttgcagcgctccaccggctcctaagcgaagatatagcggtactcttttgcgattggaaaggagttcccgaaggtgctgctttctcatggagtagccacggccgggttggagccaggcaccgtgctcaagcttgtctctcaattccacggcagaagaatgcatggggaagaatcatccgagccaaagtcgaaggacaggcagcagtgcttcgagagtgcaatcgggcagacgcaacggagcttagatctctcgcaagagaagttcgttcaggagaccctgggaacatagaagcaagagctgcccgcctgtactggcaagcgctctggggcgaagaaagctttcgaaggcacccaggcctgggatcaggtgaatcctctagaaactcccatttggattatgcttacactgttctgcggggacacggtatcagagctgtgctaggagccggactatctccaacgattggtctcttccatcacggaaggtctaacaacttcgcccttgtcgacgacatcatcgaacccttcaggcccgcaatagattcaagcatctctcacttagctccaaatgccgatatgaaagaccctgaagtgcggaagcaccttgtcgccgctgcagatcaacgttttctcccagatggacgtagaatcagcgcagctcttgacgaacttgcacagcattttggtcagtatatagaaggcgagctgaacactcttcccgttccttcttggactggaccaatccggagctggtaatggcggatgaccctatgtggtgcatggtcctctttgatcttcccacaaaaaccgctgctcaacgccgcgagtatgctgctttccgaaatctcttactcgataacggttttgtgcgtacacagtacagcgtctacgcaaggtactcccctgcaggaatactggcatcgcgtattgtctcttcgataaagggagcagttccccctcaaggggaagtcagaatactgcacgtcacagacagacaatgggcagctacgctgagattctttaacgcgaccgaggaagctgtcgaaaacgaacccgagcagcttgcctttttctgacgtgaaacaagccgatagcccagtctacacaaggaaaaaccgcccccctgaagtctatcagggggacggagaactgattcccagcacccgatcgacgagacgggcaggttgtcgaagtctatcagggggacggagaactgattcccagcggccgggcggcttcggcgcctgaacacggaagtctatcagggggacggagaactgattcccagccccggcgatcgcaaccgtcaggagcacggaagtctatcagggggacggagaactgattcccagccgtgagagcctcgactttcccgttgaccgaagtctatcagggggacggagaactgattcccagcttcgaaggcgaggggcgcgccgaggcgggaagtctatcagggggacggagaactgattcccagcctcttaacgtaggagcggttggcgctgagaagtctatcagggggacggagaactgattcccagcggggatggtcgaccggtttgacgctctggaagtctatcagggggacggagaactgattcccagcatctgcccgggcggccgagctcgtcgaagaagtctatcagggggacggagaactgattcccagcttgcggcaagacggtagcgagtgcttcggaagtctatcagggggacggagaactgattcccagctgacgcgccgtcgggtgccgcgagccgtgaagtctatcagggggacggagaactgattcccagcaagaccgcggcgacgtcggcggagtccagaagtctatcagggggacggagaactgattcccagcgcctggccgccgagtgccgcgccgaagcgaagtctatcagggggacggagaactgattcccagccgtcgtaggcggcgatttcctcctcaacgaagtctatcagggggacggagaactgattcccagccggaagcgtgaacggcgatcacttgcttgaagtctatcagggggacggagaactgattcccagcagctatcggacggagagccggacggtgagaagtctatcagggggacggagaactgattcccagctcgcatgaggaggtccacgacagggtgagaagtctatcagggggacggagaactgattcccagcaagatagtgcacggcctcgacgatcacggaagtctatcagggggacggagaactgattcccagctcacttgccccgtggacttgctcttgaagaagtctatcagggggacggagaactgattcccagcggttccacttcgccgtctgcgcgtccgcgaagtctatcagggggacggagaactgattcccagccccgccaccgccccccccagcttcaaaccggaagtctatcagggggacggagaactgattcccagctcccagatcctttgtgcgttccaccccggaagtctatcagggggacggagaactgattcccagctggttgggcgagagacgggttcttcgccgaagtctatcagggggacggagaactgattcccagccctggcgcgcaagctggttgatgttgttgaagtctatcaggggggacaactgatcagcccgctttctgagcctcgcccctacacaggctgcatgtggcgttggcctatccgacccactcgaagccggcccagcctttcacgctcccggaatgccaaggtttgagtccaagaaggcggcgatggcgatggagaggcaatccttgtcagacaaggcaaaagtacggatgctgcgcacaccgacaaggttgcgcggatcagggcttttgccttgccaacgacatgacagcagcggtgctagtcgcactgcttaagcgacagtccacagatggcgactcacaaccgcttacttaacagagcaaccaatttccccctgtccttttcacgccccaacggacaagaaagtgcgaagcctcaagtctcgaaaacgcagagcctcaagcctcgaaagctgcggagggtcatgtcttcccatcggtctggcgggcttcgccgtcgggctctttgcgcggccttcccctgccccgcatcggcttcgggcgagggtcccttccagcttcgacgagagcgcgacgcagaatgatttcgatctgggcgttgaccgaccgaagatcgtcggcagcccacttggctatcgccccgtggactgccggatccagccggagaaggagctgtttgcgcttggtttcagcccctttgccggcagccgcatgcccgcccttttcaggaggcacagcgcttccggcccgctcgtcgctctcggacattgacgccctacgtgtaaagggagcccgcgttgacaacgggctgcgtccgctggtccgaacacagaacgacaagcagattcgaaaccatttgggccctgcgttcgtcatccaaggcgactatgtcggaatcctcaaggcgctggagcgcctgatccaccatggagacggcgccttccacaatctgttcgcgcgcggcgatgaccgccccggcctgctgtcgctggagcatcgcctgcgcgatctcgggggcataggcaagcgaggagatgcgaacctcgatgatttccagccccgcaagggcaacgcgcgcggcgacctcctcggccagctcggacgaaacgaggtcggtccccccgcgcagcgacgtctcccccggaccgggttcgtcgtacggatgcgtcgtggccacatggcgcagcgcagactcagcctgggccttgatgaacgcctcgtactgctccacggcgaaaaccgcccgagccgtgtccgccacctgccacacgacgatcgccgctatgttcaccggatttccgtcgaggtcgttgaccttgagctcgtacgtctcgaaattgtggaccttcacggaaaccctcctgccgtacgtaaacggagggatcaacaccagcccggtccgccggacggttccgatgtacttgccgaagaactggcgaacgcttgtttcgcccggagaaacgatgtaaaaacacgtgcctagcgagcagacgacgaccaccccgaccacgcctatcgctatcttgaccgcggcagaggccacgatgccgtcggccgaagcaatggcgccgacgacgatcaggtagacgaaccccgccagcacggcgagcaggccggcggcggcaaggaaagcggggcccgaacccgcagaccaagcagtcttctcgtcgatgtggacgcgagcgcggaactcggccgcctccgcctgccgttttgcagactcacgcagcttagccgattccgacaggttccctgattcccgcacttttgcggaccgccgatgtctcatagattcgcgcgatttcgcggattcgccagaatccgcttccggattgtcgttggcaggcacttccctctcctatctaaagtccgacgcctagaacgttcgggggcgacgccgacaacgtttgacgcccgacgtcgagaacgccgttttggccccgcgaaccttggcgatatcaatatgatatctatttttggcgaaaagcaaaatctgcccccccgcaaaaaaatgctgcccgcaaaagcaagagcgcccggcgggaaaggtgtacccaacccgcccggatgaagacatgccgaacgtcggattctccatgcggaagcagttgccgcccaatgcgcccggatgaagacatgccgctccgaaacggaccggcactcgctcctcgccggaccggaaagacccacgtcgtcgacgcgcctcgagagagcctcgcccggtgtgaagacgggctgctggtacacggatgcgccggccttaccgcagcgccccttacaaagctgtaagaaagctgcgcacaaacggacaaagcccaaaacgcgggattcctccccctttcgccaccggcaataccgtgaaagaatggctgcgcaaggccgaaagccgcttttcgcggccttcggccgcgtcggcggggcgctttgttccgccgcagcacgcagggtaagcactgggcaacatagccggttcggcgtctaccacgaagacgccgacgccgctatgggaaagtagcacaaacatgaccagcacatttggcacctctacgcagtcgtcggcggcggcatcgctcgccagcgccttcttggcgcccacgtatgaccgttcggccgtaacgtccggaatcgtgcatttcggactgggaaacttccaccgcgcccaccaggccatgtatcttgaccgcctcatgagcgagaacgaggcgctcgactggggcatctgcggagtgggcgtcatgccatccgacaagcggatgcgcgacgtcatgcagaaccaggacggcctctacactctggtcctcaagcatcccgacgggacgctcgagcccaaagtcatcggttccatccacgaatacctctacgcaccggacgacccgagcaaggtcctcgacaagatggccgacgccggcacccgcatcgtctccctgaccgtaaccgagggcggctacaacatcgacgacgcgaccggtgaattcaacaccgagaatcccgccgcgaagcatgacgccgagcatcccgacaagccgaccacgaccttcggcttcatcgtcgaggcgttgcgccgacgccgcgacgccggaatccctcccttcaccgtcatgtcctgcgacaacctcccgggcaacggctcgatcgcaaaggccgcggtcctcgcccaggcgaagctcaccgaccccgagctcgaggcctggattcggacaaacgtcgccttccccaacggcatggtcgataggatcaccccggtgacgacgccggaggacgtcgagatggtccgcgagcgctacggcatcgaggacgcctggcccgtgacggccgagccgtttgcgcagtgggtcctggaggacaagttcaccctgggccggcctccgttcgaggacgcgggggttcagctcgtcgacgacgtcgtcccatacgagctcatgaagcttcgcctcctcaacgcctcccaccagtcgctcgcgcactgggggcgtctgctcggctttgagttcgcccacgacgccgcagccgaccccgacgtcgccgcctttacgcgtgcctatctggaaaaggaggcgctggagacgcttcttcccgtgccgggcatcgaccttccgcagtacgtcaacacgctgttcgagcgtttcacgaacgcctcgatcgcggacaccctcgcgaggttggcgcaggacgcctcggatcggatgccgaagttcgttcttccgacggttcgcgacaacctcaaggagaaccgctcgatcaagctcggcgcggccatgtgcgccgcgtgggctctgggaatggaaggcaaggccgaggacggctcggagatcgtggtcgacgaccagcagggcgatcgcctggtcgccctggccgcccgcgagcgcgacggcgaagacaccgcggtgatctccgacgaggcggtcttcggcgaactcggctcggacccctgcttcgtcgaggctttcacggaggccctgaaggcgattcgggccgacggcgcacgcgcggtcatgaagcgcctggtcgaggaaggctgagccaatcgggagcggctgactcgacggagggtgtcgtcgaaaccgaggaagccgcctgtgccgagcacggctggcccgccggaaacgagctggccgggcagaaacggtcgggcgggcggtcgcggcaaaaccgtcgcgaccgcccgcggctccggcgtcgtcggatcggctccggcgtcgcacgagtcccctccggcgtcgcgcggcttctgccgcagcatgcattcgcgaagtcgcgctaaactgaggacgttatggctacaggcacagcattgatcttcgaaggcggcgggatgcgcggcacttacacggccgcattggttgctgcaatgattgaatcgggagtcgaggtcccctgggtaggcgggatttctgcgggagcgacccacacggcgaattttctggcacgcgatgcctggcgggcgcgcgcttgctttgtcgagcttgcgaaagacccgaagatcggaggcccgatcagctttataagaggaaaaggctacttcaattcggattacatctaccaccagacgacggcgcccggcgagcttctcccctacaactgggaggcgtactcggccagctccacgccgttcaagatcggctcgttcgactgcacaacggggaagaccgtctactggggtcgggaggacgtgaaggacaactcggatttcacgacgcgatgccaggcctcgtcttccataccgatcgccatgccaatggttcagcttgacgggaccgcctatctcgacggggcgataggcgagacgggaggcttcgccgtcgatgccgccagagccgacgggtacgagcgcttcctcgttgtcatgacgcgcccccgcgggtatcggaaggggccggtcaaggctcctgccgcgatttaccagaagatttttaaaaagtatcccgccgtcgtcgaggcgatattgaggcgtcccgagcgttacaacgccaccctcgatgaattggaacagctccaggccgaggggaaagcctacctttattatcccgagaccatgccggtgtccaacggcgagcgcaatgccgtgcgcatccaggcggcctacgaagagggcatgcagcaggcgcggcgagaccttcctgcgatcaaggagttcctcgccggctgattgggcctggctgattgaacctggccagtcgccgattgcgctctatccgtcggggccgggcacggcggcacgctaaccggctgagcggcggttcgctaaccggctgagcggcggttcgctaaccggctgagcggcggccgcgctctgggccgcccggttcgcggccttgcgcctgcggcgtcggcctgacaatccgcttgtccgacgtcgaaccgtcgaaccgaaggccgtgtccgtcaagcatccgatcgtcgagcatccgatcgcccttcttgagacttcggccgtccgctccagcgtcccggtcagccagcttgccgtctcgatcagccagcttgccggccgcatcgagcagcttgccggccccgtcaacaaacttgggggcattgtcatctaactcgccgtcatctagctcgccgtcatctagctcgccgtctcggacgcccagcttgccgtggctgctgctaggcctaggctcacggccgttcaatcgaacggctttggcatcggtccaatcgcccaggcgaagggcgtcgcctgaatcctgcgcatccaaggaatcgacctgctcgaagggacgcatctttcctacgccgtttccatacacgaggcatgcgcacaccgcgacgatcgcgacttcgatgacggctatggccccggcagggcgcaaaagcgcaagaaggacgcctacgccaagcatcgtcaggcaggcgaaattcaacccttctgggcgcaccttcctcttcacgaaaacgaaccacaaggcaatcaggcacagcgccggcccccatcccaagagcagaccggcggaggcggagatcctctcacgcggctggccgactgccacttccatcccgacggtgaacgccacgatgccggcggcgagcatttgctgcccctcggcgacgaggaggcccagtccgatgccgttggccgaagggccggaatcgccggagaccaaaccgtcgatgacggcggtccgccagaagtagatgtaccacaagcagacgatcgcggtcagggacaggaggccgacggcgacgctcagcggctcgtcgaggtgacgcttcatcgcattgccgacggctaggaagcccgaggccaggcagacgatgaagaaaaggcggcagcgcctgacttgatgccctagatcaaaaggcacgcgagaaagctcgctccggtcgaacctcgggaggggatgctgggtccaccgtccagccaagtcgatcagcgcggccgcaagccatagccagagccgctgctctcggctcgcgaagcatcccgcaacccacagaagcgaggagaagccaagccaaatcgccacggccgtccgctgcctgcgaagcgcctcgtagacgtccatgcgcctggcgacgaacgtcctaccgaactggaggacaagcatgggaaccacgaacatccacggggagccgccgaaagccccgccgatcgccgtgttcatgacgaggctcacgagcatggcggcgacgacgacgggatagacggcgcgcgaccggatgagaacggtggtcgaatcgtaaacggtcagggaccacacgcagaaaacggcgaggagcagaacgagggtttcaagcactccgcgccagtcgaggttcttcaaaagatgctcggacagctgcgccagcgcgaatacgtagacgagatcgaaaagcagctcgagggtggtgacctcttgttttctgcccgggtggacgtcaaggcgccgtccggtgcccgctatcgattccgacactgctgtctccctttcatcacgtgcgccagcgaagcgtggatgcctgcgccgtcgatgctacacgttggcagagggcgcgcgcgacgccgccgtcggccccgaacagcttgaacaaaacgtcgccctctcccccaacagaacgtcgccctcccctccaaaacagagaggcggcggtcagcccatcgtcgccctgccgtcgccggagatcggcaatgcgggccctaggaatctcggctcgggcttgtagatgctcttcccgaggtccttgacccgggcgacccattcgcgcatgtcgcgtttgagctggcccgagtaattgtttccgttggccgcgacaccccagactttcagccccaaggcgtcgcccgtgtata

SEQ ID NO: 1604 - DNA, 23363 bp, synthetic construct
  misc_feature 1..23363: note = Synthetic
  source 1..23363: mol_type = other DNA
cgaactcgtccacacccaccgcgcccccgtctacgtggtccacttctcacaaaaagaggccgtcagccaagcgcaggccctgcttccgatcaacctgacgacgaaggccgagcgcgagctcatagccaaggagatcggcgatttccgcttcggccccggcttcggaaaaacgctgtccaaactgctgcgatccggcatcggcgtccatcacgcggggctgctcccccgctaccgccggctcgtcgaaaggctcacgcaagccggacggctcaaggtcgtctgcggcacggacaccctcggcgtcgggatcaacgtccccattcgaaccgtgctcctgacgtcgctgtcgaagttcgacggaacccgttcacgccacctttcggcccgcgagttccaccagatcgcaggccgggcgggcagggccgggttcgacacggcgggcgacgtcgtcgtccaagcccccgagtacgagatagagaacgcgaaagccctggaaaaagccgccggggaccccaagaaactcaagaaactcgttcgaaagaaagcccccgaaggggtggtgctgtggggagagaagacgctcgcgcaccttcagaacgcgacgccggagaagctggcctcgcagatgcgcgtcaaccacgccatgatcctcaaccttctgcaacgccccggggattcggtggccgccgccgtccgtctgctgacggacaaccacgagcccaaaaccaagtcgaaccccctgatcagaagggcggttgaaatctacgaaacgctccgttcggcgggggtcgtcgtccaccacgacgtccaatggcaggcttcccaccccggggagtccgcggtggatttcgcccgcgaggttccgagcgacttcgccctcaactcgcctttggcccccttcgcgctcgcggccctcgacctgctcgaacgcgagtcccccgactatccgctcgacgtcgtctcggtggtagaggccgtccaggaaaatccgatgcaggtgctctatgcgcaggagcgtgcggcgcgcggcgaggcgatcgggcggatgaaggccgccggaatgggctacgaggagcggatggccgaggcggactccatcacgtggccgcggcccctcgcggagcttttggagggggccttggccgtctaccgtcagacgaatccgtgggtggacggctacgacctcacgccgaaatcgatcgtgcgggaaatggtggagcacgccgagacgttctccgagttcgtctcgcgctacgacctggcgcgcagcgagggcgtgcttttgcgctacctctcggacgtctacaaggccctgcggcagaccgtgccactcgaggcccgcacggacgaggtcgacgagatcacgcagtggctggggacgctcgttcgctcggtcgactcctcgctcctcgacgaatgggaggctctagcagacggcagggtgacgcccgaggaggccgcccgcatgtccggcgaggccgagggcgggctcgacgaggtcgccttcggggcggacgagaacggcgccgccgcctttacccgcaaccgccacgccttcaaggccgcggtccgcaacgcggcgtttcgcagggtcgaggccgttcaattcgaggacctcgactccttggaccgtctcgacggcgggcccgcgtgggcggaatccagccggttcggggaggccggcagccaaattggggacgagagcggcgaggccgaggctgcgtgcggcgaggccggggccacacgcagcgaagcacgagacgcacgcagtgaaacaggggacgagggaagccgggcgacgccttcaaagcgcgaagcggggcccatatgggacggcgacacctggatggacgccaccgatccgtacttcgacgtctacgagagcgtcgggatcgactcccacgcccgcggaaacgagttcttccgagtgcaagaacaagtcgacgccgcagacctcgccgaagcgggcgtgccccgcgaggtcgccgaagccctcgtcgaaggaaagcaacccggccgcctgtggatcgtcacgcaggttttcgacgacggcgaaggcgacggcggctggggcttccgcgcattcgtcgacctcgacgaatgcgacgagctgggtgcggcgaagcttcgagtcgtccacgtcggcgagctgtgacccctggtccagcccgagtgcgctgtctggtccggacgcacccgcggaactcggtgcgccgacgcgttctccgcagacgaggactgcaggggatcgaacgtcgcaaccttggcgaccgcaccacgcgctctcgcccgcagacgagggctgcatgctccgtaatcgtctggattccttgcgcaatccggctctcgcccgcagacgagtctccaggctccggcccgttcaagactctgcgcacctgccgggtatgggcgcccgcccgctagaattcaagggtcgaaagggatgatatagatgaacgaaaacgacggcaaaggcaccggcggcgtcgagacgagccgagtcgacgcaaacggcggccgggcaggcggcgtcgagacgaacggcgtcaactggtccggccaggagaccagcttcgagggcatctctcggccggacgtaagcgagatcgcggggcgctgggagagtctgcgcgacaaagtggccgcagccgcgtcgcgcgcggggcgcgaggagaacgccgtctcgattctgctggcagccaagttccaggagcccgaacgggtcgccgcagccttgcgtgccggaggcagcctgataggccacaactacatccagcagttggaggagggcgaaagggctctgaccgagctgggcgcgcccttccaccgagtccacgtcatcggccacgtgcaggcgaacaaggcaggcaaggcaatccgggcagccgactgcatcgaaaccgtcgattcgcccaagctcgctgcgcgcctcgaccggctgcaaggcgaacgcatctcagcgggcgagctccgaaaggacggcagccccctcggccccttcgacgtcatgatccaggtcaactctgcgggctccgaatctcagcacggcgtggatccgagcggcgtcgtcgacctcgccggcgccgttgcggacttgccaaacctgcgcctcgtcgggctcatgctcatcggcgcgaacaccgacgacgtcgccgcggtggccgcctcccatgcgcgcgtgcgcgagctgcgggatgccgttcaggccgccggcgtcgccagctgcacagaattgtcgatgggcatgacgggcgacatggaaatcgccattgccgaaggctcgacggaggttcgaatcggcacggccgtgttcgggccgcgtcccgtcatgaagcaaacccgatcgcgatgaaacaaacccgctcgcgatgaggcaagacaaaagtcatgaagcaaaaccgctcgcgatgaagcaaacccgctcgcggtgaagcaagacaacgccatgaaaaaagcacgcctcgccatgaagtatcgccagctgccggcctaagggcactacggaatgcgcgccagccaggccgggtcggcgaatttgaccttggcgaggctctcggcggcgatcagctcgtcggggcggtactttgctcttctcaccgtgcgcccgcgcgccagcgattggcgaagcgcgtcgatgacgtcctcgcgtgccgcgtcgacgtaggagcggattcccaccaccttcttctgcgcgcttttcgtgccgcgcgcgccggtgtccggccggaaaagccgggtgacggccagcagctgctcggtttcgatctcccagctcatgacggcgtgatggatcgtcgctcccccggcgagtctgcgttgggcggcgccgccgatctttccgtcgagggtggcgatgtcgttgatcggcatgtagaaggccggcacccccatttccttcagggcacgcagaacccacgaatcgcacagggcataggattcgcgcaggctcaggcctgaaagggccgcgcttggcacgatcaccgagtaggcgaccgcccgggcggggtccatatacatcgtccctcccccgcttgcccgccgcgccagtgcgattccgcgttttttcgcggcttcgacgtcgatctcgttgctcaacgactgcgaggagccgatcaccgccgccgtttcactccaattccagaggcgaacagctgccgggcgcacgccgcctgcgacgctctctgcgacggcgtggtcaagcgccaagttcaaagcgaccgaaagagggcgcgattcgagcaggtcgaatcgggaggggaggccggcggcgccgtcggcctccggaaggcgggcgacgccggctttcgaaaagcggtcggcgccgggccttgaaatgcgggcgacgccaggctctgccgctcgactaagcgagccgatagagccaaccgtggcggtcttcgacctttccaagctggattcccgtgattcggtcgtaaatcgttctcgtcactttgtttccggggatctccactcggaagtctttgccggagagggagccgatgggcgtgatgaccgcagccgttccgcaggcgaacatctcggcgacggcgccgctctcgattccggccagcacatcggccaaggcaagggtctcttcgcggacgtccgcgccgtcgtcgcgcagaagccggagaatcgacgagcgggtgcagcccgccaaaatgttgccggtgagctttggggtgcggatcgacccgtcggacatcacgacgaagacgttcatgccgccgagctcgtcgatgttcgtgtcggtggcggcgtcgaggaacatgacctcgtcgtatccgccctcgtgcgcgatcgtcttgggcaagagggaggaggcgtaattgcctccggtcttcgcgtcgcccattcctccagggccggcgcggtggaattcgcgttccacccacacgtcgatcggttggaagccgttggtgaagtacgcgcccgagggcgaggcgactgccaagtactcgtagcgttcggcggcgcggacgcccagaaacgcttcggaggcgaagatgaacggcctgaggtagagggaggagccgggcgcgttgggaacccacgcggcgtcttggcgcacgaggttgacgagcgatccgatgaaggcctcgtgttcgagctcgggtattgccaaccgccgattggaatggttgaggcgggccgcgttgtacgtgggcctaaacgtccagatcgaaccgtcttcgtggcggtaggccttcagcccctcgaacgtttcttggccgtagtgcagcaccgcgccggcggggtccaaggaaagcgggccgtatgcttcgatcctgaagtcgtgccaccctttgtccggcgtccacacggcgtgggccatgtgatcggagaaccgctttccgaatcccggggcggcaagcactccttcgcgctcggcgtcgctcgccggatgcgagttgggcctgacatcccacgtgccgacaaggtcgtcggcggcgggcacggcctccatcgacgccagttcaagatccgtgtaactcataagatcacttctttctcggggcaatgagtcgattctagtgccagatcggcgccgggcgattccgatcgcctcggcgatccacgtgccgcacggttcgcggcacgcccgtttcagcgtgcagcaaggctcgtacctcagccgcggaccagagccgcaacggcgtttccgacgtccgacgtcgaacgtttcaaaggtgcgcccgcctcggctgcggaagcccttgcggccatgtcggattcgatcgcgtcctcgatcgcccgggcgtgctcggcgagcccgaggtggtcgaacatgagagccaccgaggcgattgtcgccgtagggtcggcgatctgcttgcccgcgatgtcgggggccgatccgtggatcggctcgaacatggacgggaaggccttctcggggttgatgttcccggaggcggcaagccctatcccgcctgttatcgcgccggcttcgtcggtgaggatgtcgccgaacaggttgtccgtcgcgatcacgtcgaatcgggcgggatcggtgactaggaagatcgtcgcggcgtccacgtgcatgtagtcgactgcgacgtcgggatattccgcgccgacctcctcgacgacgcgccgccacagtccgccggcgttgaccagaacgttgtgcttgtgcacgtatgtgagcttcttgcggggacgcgcctgagccttggcgaaggcgtatcgcaccacgcgttctacgccgtaggcggtgttgactgacacttcggtcgctatttcgtggggggttccctgccggacgacgccgccgttgccgcagtaaagcccctcggtcccttcgcgaaccacgaggaagtcgatgccgcccgggtcggccagcggcgtcggcactcccggatagtgcctgtttggccggaggttgacgtaatggtcgagcgcaaaacgcagcttgaggaggaggccgcgctccagcacgcccgaggggactcgaggatcgcctatcgcccccaagaggatcgcatcgcgccccttgatgtcttcgaggtccgcgtccgtgagggtctcgcccgttgcgaggtaccggcgtgcgccaaggtcgtatgtgtgggttgcgatttccggcccgccgagggcttcgcacaccgcatcgagaaccttcaggccttccgccacaacttcagggccgattccgtcgccgggaatcactgcgaggtctatggacgtcatggatctaggatatcggctgttcaaaatacgggattctcatctcacgattcggacggtctgcgcgtcgggtctgcttgcgttcgaagccaaggcgaacgggatgcgagcccggccttgacgggctcgcatcgacagcgggctttaggagccacgcaggtggcccgtagaaacgccgttccgtgggctttcgaggtttgcgggatctccaggttcaggcgatccccaagcttaggggatctccagggaccaattgcctcccgtggtgtcaatcaaaatcaaactttcgctggtctttgccgggatagtgacatccttttcaacggctgccttttgttctttgatgaaagaattcgccttggagctgccgtcggtgggccacagagtgccggtgattcgccctttggaggtgttgccaacgtacttgaaggtcgccgatgcctcgcccccgcgatacaagaaggtctcatatgagtttccggctatagtcgcaccctgcgaaaccgttggaatagaagagatcggataaacgcggatcatccacgggccgggggccgtcaccttgatcttcgacgtctgtttcccgttggcgaaggcgtcgagcgggaaggtgcccgtcgccttctcgtccttgaccattccgccaaaacgctccgtttccgatccgccggcgtcctcagcctcaaaaaggaagagtccgtagttcgacgtcggattgacttcaaagtaaagaagaacaggccggcttccctggggcttttggatgtctatcgtttgaggaccgtcgccctggtactccttgaacgtgccggtgagcgcaggccgggtcggtttggagggggcgaccgtgctcgccggagtgctttcgtcgtccgtcggcttatgggggtcgggactcttgcttcggggcgacgtcgtcgtggacgtggacggcgaagacttgccggcggattcctccttgtcgtccttcatcagttttggcacgaagatgatcgcggcggcgatggcgatgacggccaccaccgatatgaccgccaaaccggctttgcttgtgaggaaggacttccgaggcgtgccgtcaaggccgaagggcataccggtaccgaagtccgacgaggctccgtaggtcggctggctcgggccctggccctgagcggagtaatcgactcccgaacttgacaacgcccctcccaccatttggctttcgggggccgaagttccaggttccgcggactgcccgatcccggcttgcgaggcaaatcccgcttgcgggccggccgacggcgtaaatgccggctgccccgaggagccctcgagcccctgctggcttgggggcccttggagcctcgactggcctgacgagcccgggcccgcaaaacccgacggagccgaagaagccgacggagggaaccccggctggcctgacgcacctgactgctggaaacccagctggcctgacgaacccggctgctggaaacccggttggcctgacgaacccggctgctggaaacccggctggtcggcgaagctgtatcgctcggtcggttgataaccggaactttgagcagaggacgacgacgaagccgacggcgccggcccagcctgtgaaggacccggcgcgggtgcgccgaacggaggccgcgcgggcgcggcttgccctacaccgggcgccgactgcgcagagccaggcaccgaccggcctaagccaggcgccgactgagccgaacgtgactccgactgaccgccaccggggattggctgcccggagcctgccggtcctggatggaacggaggccgccccgggcggaaggcggattgccccgaagactgctcggagtcagagcccgcctgccccgaagcagacgtcggctgcgcgccgccagattcgaattgccgtgagccaggcgcggaagcgggatgttccgagcttggcgccgagtaggccgacggcgtcgagaaggcacccggggcggaatcgctgtctgagggggcttggcccccggccgggacgtttcgccctccggggacgaaaggctgtccgcctccggcagagcccgcggacgcgaacctcgggcgcgaagactctggcgcggcaccggccttgaaagcggggccgggcgcggcattcgcctgcccggaatgatccggagtccgctgctgcgaactcggcggctcgggcggcgctgcgtgcgcgccagagccgttccttctcctcgaggcacgcctcggcaagcgggaaatggtttcgtcggcagagttcgtgctccggtcaaagtcgccggaatctccggcggaaagcgaacctcccctggaaggcgaattaaccgaggaattcgaatcgtcggggaagcgggtgtcgtcgggtgcctgcgaagagtcgggcgcgtacggcgaatcggacgaatcggccggcgacgaggcggaaggcagaagggtggcatcgacgtcgatgtcttccacccagaagttccagccagcgggagccgggccccaagcgggatcgggcctccaaccagcaggaggggtccacccgtcgggcgccggcggccagttcggcggtgggttgaatcttttggacatgagcaacactcctgtggtgcgtgaaacgacgatgccattgtcccacgccctcccccacctgccgccacccacgtccacggtgcgaaacgcctcaagtttgttttgctcataagcgaaaaccattgacaatcaggggtctcggcgacgccgaaaccgctgtgaatcgtgcacttcgacgtctaaacgcctcaaagcatcctgcggtgccgactgtcgcggatagcacaaactcttctcttactaaaatgcggtcctatcgtcgtcgagagcctccgaaacgacgccttcgcgcggcgatcgaccatgactctttcggggccgacgaaacgcccagcgcggagaagctctgcgctcctccacctttgcgcccaactccttccaccgctcttattgcctttaaactatagaaataaacgtaaaatattaaaaataattgtttacaatatatttacatatttcattctaatacgggagcaaatagacatattcttaatatattcatacttgtccaaaatattttcattagtcaagcaacgatgactgtggcccacttgacacatacgagccgtgagtctaaagtttctcttataactgattcccagtaagggcctccgagtttgaggacctgaatgctcagcttatcggctgaatggcggcacctttgagtgccgccattcctttatattgagcacttgataaaacggtcaagaagtgtaactattttcttatgaacgcaatgaagcagtataatgcgggaattgatgtaggaatcaactcagtcggctttgcggcgatagaagtagattctaaaggcctacctttgaatattctcaacaatatggtcgtcttgcatgactcgggcgtcgatcccgggacggcaaaaaccggtgccacccgcttagccaactccggaacagcacgtcgaactcgcaaacttattgcgagacgccgtaagcggctgcagaaactggaccgatatatcgaagtgcaaggatggccgcttgtcgatttttcttccttgcccgatccgtacacgccgtggaagatccgagccaaactaacgcaggataggctcgaaggcgaagagcaaggtcgtgggctttcaatagccttaagacacatggcgcgacatcgcggatggcgcaatccgtacgagggagtagagtctcttcattcccccaaagaagcctccaagcaattcaaagatctgaaagatcgtgttactaaagttagtggcgtcatcttcgatgaagatgccactcctgctgaagttgtttgcgacatcggtctttcccccaaacagcgcttgcgttccgcgccgagcgcaaagtacaaagaaggagctactctcgccgatgaaccagtggggggaaagtcaaaggaagggttgcttggaggcaagctcatgcagtccgacaacgcaaacgaacttcgcaagattggtatcgttcagggtctcagcaacgagaaagtgaacgagataatcgatcaggtctttgcttcagaaagccccaaaggccaagcaggtaaacgggccaagaaagatgagctccctggccaagagcagtatgttcgcgcgctcagggcgcatcttgcgtttcagcgctttcggattgttgcagcagttgcaaaccttcggatactagaggctgaaccaaaacatgaacgattactgtcacagagcgaaaaggacaaagttatcgaattcctgatgtccgccgacggagacgacggagtaacttggtcggatgttgcagaagagttgggaatcgagcgtgaatgtttatccggaacagctaaacggggagccgacggggaacggccttcatcattccctccgacaaactcaacaaacatcagcatagttcgaagcaaagttaagccactcattgagtggtggcgaaaagcttctgatgatgaacaagctgccctggtcaccgccttgtcaaatgcggacgaattgactgacgatcaaccaagcgcagaaacagtccggcaattcctttcgtctctcgacgagcaatcacaggagaaaatagacaagatatctctgcccaaaggacgggctgcgtactctgtaaactccctagaacgcctcaccagaaggatgctcaaagattccgtcgacctttttgaggcgcgaaaacgggagttcggcgtggataacaactggactcctacgccggattcaatcggcgaaccagtcggcaatcccgccgttgacagagtcctcaaaattgtcaataggtggttgttggctgtcaccaggaaatgggggcctccaaaagtagtcaatatagagcatgtacgagtagggttcacttctgcagcacaaactcgcaaatacgaagaggaaaacaaaacaaatcgtgaaagaaatctagcgatccttgaagagcttcgcgataaatttggcaccagtggcaagattcgtcgggaggacataacacggttcgctgctctaagacgtcaaaactgccaatgcgcatattgcggagaagcaatcacgtttttcgattgcgaaatggatcatatcgtacccaggaaaggaccagggtcaactaatacccgtaacaatctcgttgcgatctgcgaaagatgcaacaaatcgaaatccaacatgcctttttccctgtgggctcagaactgcgatatacccggtgtgagcgtcgaagcggttattgacagagttagaacctggataaaggatccagagctaagtccaaaacaatataacaacttcaaaaaggatgttattgaaagactccgaaaaactgttgatgacgatgccatcgacaaccggagcattgaatctgtcgcttggatggctacagagctcgcagaccgcatcggcagtcacttccgcactgcaggagcaaataccaaggtcagggtatatcgaggttggctgacatcagaagctcgaaaagcatcaggattcgaggggaaaatcaatctcatcggcggccgaggaaagacacggcttgaccgtcggcaccatgcaatggatgcggcaactattgcattaatgcgtcaatctgtggcgcagacactggttgaacgggcgagcattcgagagtcggaccgactgcgacgagtcgtctcgagttcctggaaagactacaggggcgcagaccgcgataagcagttctcttacggctcatggcttaactccatgaatgcactcgccgagctattcaatcgtgcgatcgacgccgacgggattcctgtaactcaaaacctaagattgcgtttgggaaatggcgaagcacacgatgccactattcgaagccttgaaaagaaacgcgtaggcgcttcttggacaataggggagatagacagagcgtcgacacctcagctctggcttgctctcacgcgtcaggaagactttgatcagaacgacggtttaccagcgaacgcctcacgagaactacgtgtaaagaatcactggttccacgcggaagagaatgttacactgttccccaccaagtccgctgcaattgcagtgcgaggaggatacgctgagatcggcaacaccattcaccatgcaagactgtacaagcttccgggaaagaaactgacatacggaatgattcgcgtctttgctatcgatcttctttgcgcatggcacacggatctattttcgtctcctttactccccgaaagcatcagcctacgaacagccgaaacgaaggttcgtagagcagtagaagacggaactgccatgtacatcggttggcttgtggacggtgacgaaatcgtccttgatcctgagaccaaagcgttcaagtcaaacaagattggtgagtatctatgcgaatttcccggaacaaaacggtggaaagtggacggttttcctgacaaagagaaacttcgtctccgaccgcttcagctcgcgggtgaagggctccctgaagatgttagtgctggtaccgaagagattttaggccccaagggaaacggttggcgagtggctataaacgcgcttttcaagtcgtcgcagttggtagtggtgagaagaacggcattagggatggtccgaaaactatcgcgcagacatctgccgctgaccacaaggctccgtggttagattgtccaataggtggcgaataatcgattgctcttcgcttaagggtaagatccaaacggcacggggagcggtcaagattctcaaagatgatcatcctccatcatctgtaccgacagcagacgtggctgtggtgctaatcggaatgtccgcgactttctcagtcgcagcactccaccgactcctaagcgaagatatagcggtgctcttttgcgattggaaaggagttcctgaaggtgccgctttctcatggagtagccacggcagggttggagccaggcaccgtgctcaagcttgcctttcaattccacggcagaagaatgcatggggaagaatcatccgagcaaaagtcgagggacaggcagcagtgcttcgggagtataatcgggtagacacaacggagcttagatctctcgcaagagaagttcgctcaggagaccctgggaacatagaagcaagagctgcccgcctgtattggcaggcgctctggggcgaagaaagctttcgaagacaccccggcctaggttctggtgaatcctgtagaaactcccatttggattatgcctacactgttctgcggggacatggtatcagagctgtgctaggagccggactatccccaacgattggtctcttccaccacggaagatctaacaactttgcccttgtcgatgacatcatcgaacccttcagacccgcaatagattcaagcgtctctcgcttagctccaaatgccgatatgaaagaccccgaagtgcggaagcaccttgtcgccgctgcagatcaacgttttctcccagatggacgtagaatcagcgcagctcttgacgaacttgcgcagcattttggtcagtatatagaaggcgagctgaacactcttcccgttccttcttggactggaccaatccggagctggtaatggcggatgaccctatgtggtgcatggtcctctttgatcttcccacaaaaaccgctgctcaacgccgcgagtatgctgctttccgaaatctcttactcgacaacggttttgtgcgtacacagtacagcgtctacgcaaggtactcccctgcaggaatactggcgtcgcgtattgtctcttcgataaagggagcagttccccctcaaggggaagtcaggattctgcacgtcacagacagacaatgggcagctacgctgagattctttaacgcgaccgaggaagctgtcgaaaacgaacccgagcagcttgcctttttctgacgtgacacaagccgatagccctctctacacaaggaaaaaccttccccctgaagtctatcagggggaaggagaactgattcccagccgcacgacctgcaggaaggggatggtgtgaagtctatcagggggaaggagaactgattcccagcgagaatcggccgacaccttcgatgagtcgaagtctatcagggggaaggagaactgattcccagccactgaccaaagcggtctccttgtcccagaagtctatcagggggaaggagaactgattcccagctggccgcggccggggtgacggccattgagaagtctatcagggggaaggagaactgattcccagccgattttggttattcatacgaagcaggggaagtctatcagggggaaggagaactgattcccagctgcggtttgaagctggggggcgtcggctgaagtctatcagggggaaggagaactgattcccagcaattgcgcgcgattgtctactttatgaagaagtctatcagggggaaggagaactgattcccagccgggctttggtggtggcttggtcgcggtgaagtctatcagggggaaggagaactgattcccagcaaagggggaggaatcccgcgttttgggccgaagtctatcagggggaaggagaactgattcccagctgggcaagtatctctcgccgtcgggcaggaagtctatcagggggaaggagaactgattcccagctatagctccatagctttttcgctgaaatgaagtctatcagggggaaggagaactgattcccagcatcgggcacgagctcgccgcgcgaggtggaagtctatcagggggaaggagaactgattcccagctgttgattaccggtacggtgtctaggcggaagtctatcagggggaaggagaactgattcccagccgtcgcctgacgacacgggcgtgacgccgaagtctatcagggggaaggagaactgattcccagcaccatcaaggaaacgtccaccggcgcaagaagtctatcagggggaaggagaactgattcccagctcgaattggacgcgtacaccggatgttggaagtctatcagggggaaggagaactgattcccagcagtcgaagaccgacctcaagaagcgcatgaagtctatcagggggaaggagaactgattcccagccaagcatgccttgttcgtccatgaactcgaagtctatcagggggaaggagaactgattcccagcacaagttgtttacggagcgctctaacaagaagtctatcagggggaaggagaactgattcccagctcttaggttttgaacggagcacccttccgaagtctatcagggggaaggagaactgattcccagcgcttcagtgcgcgtccgtcaatgatcttgaagtctatcagggggaaggagaactgattcccagcgggctgattgcccgtaggctctccccgtgaagtctatcaggggaaggagaactgattcccagcgtggggcgacggcgcttcccaatagcctgaagtctatcagggggaaggagaactgattcccagcccggcgagtccacatcccccaacgccgcgaagtctatcagggggaaggagaactgattcccagccaaacgtgccgataaactggcccgcagcgaagtctatcagggggaaggagaactgattcccagcctatgtcgcatcggctgaggacggggcggaagtctatcagggggaaggagaactgattcccagccgccggcggagcgggcgcgggcgaagaggaagtctatcagggggaaggagaactgattcccagctgtgggttggcgtgctggtccgccgggcgaagtctatcagggggaaggagaactgattcccagccatgttctatagcggtgcgaaggtcgaggaagtctaccaggggacagacaactgaccagcccgccttccgagcctcgcccctacacaggatgcgtgtggcgttggcctatccagcccccccccgaagccagaccaggcccttcacacttccggaacgccaaggtttcgagtccaggaaagaggtgagggcgatggaaaagcaatccttgcccaacaaggcaaaagcccggatgctgcgcacactggcaaaactacgcggatcagggcttttgccttgccaccgccatgacagcggtgctagccgcactgctcaacgtcccacagatggccgctcacaaccacttaacagagcaaccaattcccactgtccttttcacgccccaacggacaagaaagcgcgaagcctcaagtttcgaaaacgcagagcctcaagcctcgaaagctgcggagggtcatgtcttcccatcggcctggccagcttcgtcgtcgggctccttgcgcggccttcccctgccccgcatcggcttcgggcgaggatcccttccagcttcgacgagagcgcgacgcagaatgatttcaatctgagcgttgaccgaccgaagatcgtcggcagcccacttggctatcgcctcgtggactgccggatccagccggagaaggagctgtttacgcttggtttcagcccctttgccggcagccgcacgcttgcccttctcgggcggcacagcgcttccggcctgctcgtccctcccggacactgacaccctacgtgtaaagggagccagcgttgacaacgggctgcgtccgctggtccgaacacagaacgacaagcagattcgaaaccatttgggccctgcgttcgtcgtccaagacgactatgtcggaatcctcaaggcgcttgagcgcctggtccaccatggagacggcgccttccacgatctgttcgcgcgccgcgatgacggctccggcctgctggcgctggagcatcgcctgcgcgatctcgggagcataggcgagcgaggagatgcgaacctcgatgatctccagccccgcaagcgcgacgcgcgcagcgacctcctcggccagctcggaagaaacgaggtcggttcccccgcgcagcgacgtctcccccggaccaggcccgtcgtacggatgcgtcgtagccacatggcgcagcgcggactcagcctgtgccttgatgaacgcctcgtactgctcgacggcgaagaccgcccgagcagtgtccgcaacttgccacacgacgatcgccgctatgttcaccgggtttccgtcaaggtcgttgaccttgagttcgtacgtctcgaaattgtggaccttcacggaaaccctcttgccgtacgtaagcggagggatcagcaccagaccggtccgccggacggttccgatgtacttgccgaagaactggcgaacactggtttcacccggagaaacgatgtaaaaacatgtgccgagcaagcagacgacgatcaccccgaccgcccctatggctatcttgactgccccagagaccacaatgccatcggccgaatcaatggcgccgacgacgatcaggtagacgaaacccgccagcgcggcaagtaggccgactgcggcgaggaaagcggggcccgaacccgcagaccaaacagtcttctcgtcgatgtgaacgcgagcgcggaactcggccgcctccgcctgcagttttgcagactcgggcagtttcgccgattcccgcagctttgcggaccgccgatgtttcatagattcgcgcggtttcgcggattcgccagaatccgcttctggattgtcgttggcaggcatttccctctcctatctaaagtccgacgcctgaaacgttcggggggcggcgtcggaaacgttcgatgcccgacgtcgagaacgccgctttggccccgcgaaccttggcgatatcaatatgatatctatttttgggcgaaaagcaagagctgccctcggcgaaaaggaagaactgttccccgcaaaagcaagatctgccctcggccggaaggctgcgcccaacccgcccggatgaagacacgccgaacgtcggaccctccatgtggaagtagttgccgcccaatgcgcccacatgcagacatgccgctccgaaaagacaataggtttgaggagcttccggccgatgagcgcggatgaggacgtgccgcacagacggcttcctccgtcgccgtcgggccgaaagagccacatccttgccggttcgaaaagtaccggccactcgcccgttttcgaaaagtaccggccactcgcccgtcgccgaaccgaatagacccaagccgtcgtcaatgcgtcccaaaagaagcctcgcccggtgtgtaggcgtgcgggtgtgcggaaccttaccgcagcgccccttacaaagccgtaagaaaactgcgcataaacgggcaggggcccaaaacgcgggattcctccccctttcgccaccggcaataccgtgaaagaatggctgcgcaaggccgaaagccgctcttcgcggacctcggccgcgtcggcggggcgccttgtcccgccgcagcacgcagggtaagcactgggcaacatagccggttcggcgtctaccacgaagccgccgacgccgctatgggaaagtagcacaaacatgaccagcacatttggcacctctacgcagtcgtcggtggcggcgtcgctcgccagcgccttcttggcgcccacgtatgaccgttcggccgtaacgtccggaatcgtccatttcggactgggaaacttccaccgcgcccaccaggccatgtatcttgaccgcctcatgagcgaaggcgaggcgctcgactggggcatctgcggagtgggcgtcatgccatccgacaagcggatgcgcgacgtcatgcagaaccaggacggcctctacactctggtcctcaagcatcccgacgggacgctcgagcccaaagtcatcggttccatccacgaatacctctacgcaccggacgacccgagcaaggtcctcgacaagatgaccgacgccggcacccggatcgtctccctgaccgtcaccgagggcggctataacatcgacgacgcgaccggtgagttcaacaccgagaatcccgccgcgaagaacgacgccgagcatcccgacaagccgaccacggccttcggcttcatcgtcgaggcgttgcgccgacgccgcgacgccggaattcctcccttcaccgtcatgtcttgcgacaacctcccgggcaacggttcgatcgcaaaggccgcggtcctcgcccaggcgaagctcaccgatcccgagctcgaggcatggattcgggcaaacgtcgccttccccaacggcatggtcgataggatcaccccggtgacgacgccggaggacgtcgagatggtccgcgagcgctacggcatcgaggacgcctggcccgtgacggccgagccgttcgcgcagtgggtcctggaggacaagttcaccctggggcggcccccgttcgaggacgcgggggtccagctcgtcgacgacgtcgtcccgtatgagctcatgaagcttcgcctcctcaacgcctcccaccagtcgctcgcgcactgggggcgtctgctcggctttgagttcgcccacgacgccgcggccgaccccgacgtcgccgcgtttacgcgggcctatctggaaaaagaggcgctgaagacgcttcttcccgtgccgggcatcgaccttccgcagtacgtcgacacgctgttcgagcgtttcacgaacgcctcgatcgcagacaccctcgcgaggttggcgcaggatgcctcggatcggatgccgaagttcgttcttccgacggttcgcgacaacctcaaggagaaccgctcgatcaagctcggcgcggccatgtgcgccgcgtgggctctgggaatggagggcaaggccgaggacggctcggagatcgtggtcgacgaccagcagggcgatcgtctggtcgccttggccgcccgcgagcgtgacggcgaggacaccgctgtaatctccgacgaggcggtcttcggcgagctcggctcggacccgcgcttcgttgaggctttcacggaggctttgagggcgattcgggccgacggcgcacgcgcggtcatgaagcgcctggtggcggaagactgagccggccgagagcggcggttttggcggaggcgccgccgaaaccgaggaagccgcctcgtccgaggactgctgaccctttcgggctgactggatagaagtgaccggtgtgggcggtcgcggcgaaaacgtcgcggccgcccacaccgccgtcgtccgaatcccctccggcgtcgcacggcttctgccgcagcatgccttcgggaactcgcgctaaactgagggtgttatggctacaggcactgcattgatcttcgaaggcggcgggatgcgcggcacgtacacggccgcgttggttgccgcaatgattgaatcgggagtcgaggtcccttgggtgggcgggatttctgcgggagcgacccacacggcgaattttttggcccgcgacgcttggcgggcccgtgcatgctttgtcgagcttgcgaaagacccgaagatcggaggcccgatcagcttcataagaggcaaaggttacttcaattcggattacatttaccaccagacgacggcgcccggcgagcttcttccctacaactgggaggcgtactcggccagctccacgccgttcaagatcggctctttcgactgcgcaacaggaaagaccgtctactggggccgagacgacgtgaaggacaattcggatttcacgacgcgatgccaggcctcgtcttctataccgatcgcgatgccaatggttcagcttgacgggaccgcctatctcgacggcgcgataggcgagacgggaggcttcgccgtcgatgcggccagagccgacgggtacgagcgcttcctcgttgtcatgacgcgccctcgcgggtatcggaaagggccggtcagggcccctgccgcgatttaccagaagatatttaagaagtatcccgccgtcgtcgaggcgatactaaagcgtcccgaacgctacaacgccaccctcgacgaactcgaacagctccaggccgaggggaaagcctacctttactatcccgaaacaatgccggtgtccaacggcgagcgcaatgccgtgcgcatccaagcggcctacgaagagggcatgcagcaggcgcggcgagacctccccgcgatcaaagagttcctagccggctgattgggcctggctgattgaacctggccagtcgccgatggcgctctatccggcagggccgggcagggcggcacgctaaccggctgaatggcggttcgctaacctgttgagcggcggccgcgttctgggtcgcccggttcgcggccttgcacccgcgtcgtcggtctgacaatccgcttatccgacgtcgaaccgtcgaaccgaaggccgtgtccgtcgagcatccgatcgtcgagcatctgatcgcctttcttgagacctcggctgtccgttctgtcgtcccgatcagctagcttgcggccctcgtcagccagcttgggggccctatcagcgagcttgctgcccccatgagccagcttgggggcccggccctctagctcgccgtctcggccgccaaggttgccttccccgctgtttggcttctgttcacggccgtccaatcggaccgctttgggatcggtccaatcgcccaggcgaagggagtctcctggatcctgcgagtccttggaatcggcctgctcaaagggacgcatctttcctacgccgtttccgtacacgaggcatgcgcacaccgcgacgatcgcgacctcgatgacggctatggccccggcagggcgcaaaagcgcaagaaggacgcctacgccgagcatcgtcaggcaggcaaagttcagcccctctgggcgcactttcctcttcacgaagacgaaccacagcgcaatcaggcacagcgccggcccccagcccaaaagcagaccgacggaggcggagatcctctcacgcggctggccgactgccatttccattccggcggtgaacgcaacgatgcccgcggcgagcatttgctgcccctcggcgacgaggaggccgagtccgatgccgttggtcgagtggccggattcgccggagattaatccgtcgatgacggctgtccgccagaagtagatgtaccacaggcagacgatcgcggtcagggacaggaggccgacggcgacgctcagcggctcgtcaaggtgacgcttcatcgcgttgccgacggctaggaagcccgaggcgaggcagacgatgaagaagaggcggcagcgcctgacttgatgccccagatcaaaaggcacgcgagaaagctcgctccggtcgaacctcgggaggggatgctgggtccaccgtccggcaaggtcgatcagcgcggccgcgagccacagccagagccgctgctctcgactcgcaaaacaccccgcaacccacagaagcgaggagaagccaagccagatcgccacagccgtccgctgcctgcgaagcgcctcgtatacgtccatgcgcctggcgacgaacgtcctgccgaactggacgacgagcatgggcgccacgaacatccacggagagccgccgaaagcgccgctgatcgccgtgttcatgacgaggctcacgagcatggccgcgacgacgatgggatagacggcgcgcgacctgatgagaacggtggttgaatcgtaaacggtcaaagaccatacgcagaaaacggcgaggagcagaacgagagtctcgagcactccgcgccagtcgagattcttcaaaagatgctcggacagctgcgtcagcgcgagtatatagacgagatcgaaaagcagctcgagggtagtgacctcttgtttcctg

SEQ ID NO: 1605 - DNA, 12064 bp, synthetic construct
  source 1..12064: mol_type = other DNA
  misc_feature 1..12064: note = Synthetic
actccggcgtaaacctccgtcttgttttcctcacttcagacatagtgacctcccttcccagcgagacaccaaatccctaaccgcgatgtccacaaaaccagggtaacctcaagatgaaagatttttacaagtgatgtaaaatagtcaatgaactgattctcagtaaggggcaccatgtttgtgtacctgaattctccgcggagcttcggctccgcaacttttttaaccgatttaccccatttctgaatgatttttggtaataatgatttcatggatagtcgcaaatatcgtgtgggcatagatgttggaactaactcggtgggcttcgcagccgtggaggaagacgattcgggttctcctactaggttcctgaacactatggttgtcattcacgattctggtgtcgatcccgaacggaaggatcgcgccatcactcgtctcgcttccgcaggaacagcaaggcgtacgcgacgactatatcgaacgcgtaggcagcgattacgcgagttggatgatttcatctccaacgaacttggttatcccctggtgaatctggaaaactttgctgacccctacgagtcttggaaagttcgtgccgacctcgctacgacaaaacttcctaacgatgaacttcccgaagcgatgtctattgcactccggcatatggcacgtcaccggggctggcgcagtccttatcaaagagtggaagctctccacctacacgcagaaatatcaaaagaatttgccgcccttaaagaacgggtcgtggaaaaaaccggagacgtgttcagcgacgatgcgacacctgctgaggttctggtggacttgatgggcaggcaaaaagttcgcggcgccgatggagtgctttcaggaaagctgcgtcagagtgataatgccaatgagctgcgcaaaattgcttctgttcagggaattgacgatgaaactctgaatcgcataattgatagagtctttttcagtaagtcaccaaaaggtaaggcatcggagcgcgtcgggatggatgcgttaccgggacaaggctcaaagcctcgcgctttaaaagccatgccgtcttttcaaaagttccgcgtagtttcggtcatctgcaacctgcgtataaaggattctggaggtgataatcgccctctatctatggaggaaaaggaacaacttattgattatctcatgtccagtaccactgatgaccatgtcacttggacagatgttgccgatttgcttcacgttaagcgttctaatcttcagggaacggcaaaggaaggtcccgatggcgagcgtccttacactcgtcctccggtcaattcgacgtggagcaaaatcaaggattcaaaaataaagagcctggttgccttgtggaaaactggggatgtagacgtgcagtctgcgatcgtagaggccttgtccaatgcctctgttctggaggactcacgtccgggagcagacatagtgattgcctatttggagtctttggatgataaagagctcgagagcctggataaagtcgggcttcctgcgggaagggcatcgtattcggaagattctctcgagcgccttaccgagagaatgttgcgagatgactgtgatttgtttgaagcccgtaagcgtgagttcaatgtagccgatgattggaaaccgcctgccgatcccatttacgccccggtgggcaatccaggagtcgatcgtgtactaaaaattgtcaatcgtttgttgatggcagctgagcgcgaatggggggctccaacgcaaatcaacatcgaacatgtgcgttcgggttttagttcggaacttatgcaacgggaatttgagcgtgagaatgagaggcgcagggctcaaaatgaggaagctgttaaagcaattcttactgagaagggcggaaattctcgtgtgtcaaagtatgacataacacgctactacgccgtgaaacgacagcattgtcaatgcctgtattgcggcacaccaataacttttagtgactgtgaacttgaccatattgtccctcggaaaggtgtcgggtcaaccaacactcgagtcaacttggcggcagcatgacgcagttgtaaccgggataaatcgaatctaccttttgctgtttgggcaggcaaggccagtaattttgatgtgagcatcgacgacgcagtttcacgtgtgaaacaatggcaacgctcacaaaacgaaggtgtccgagaatttcgggcattccaaaacgaggttatttcacgacttttgaaaacaaccgaggaccccgagatagactctcgttctctggagtccgtagcctggatggctcgcgagctgcatcatagggttgaatattattttcaatctaaaggcgcacaaacgcaggtatccgtttaccgtggcgctgtcacagcccaggcccgtaagtcttctggtttggaagacaaagtgaagatgattggcggcggtggtaagacacgccttgatagacgtcatcatgcgatggatgctgccaccattgcactcatgacgcccggaatttcaaccactttgtctgaaaagaacaatctgcgtgatgcccaaaaatttaccggtcaatccgagacttggaaagactactgtgggcgcacagagacggctcgtaagcattttgctgtttggaagtcgaatatggagcgtctcacagacctattcaatgacaagctcgaaaatgacgctattccagtcgtgcaaccgctgcgcctcaggctttccaacagtaaggctcacgatgacgggattggtaaacttgactcaaagaaactcggtagcgtctggagcttggcggatatagacagagccgccacgccacagatttggactgcccttaccaggtgtgatgattttgatcccactaagggtttacctgagaatgccaatcgggttatcagagctcagggagtgaagtacgaaagcgaagacaacattcctgtattcccctcaaatgttgcggctattgccgttcgtgatgggtatgcggagattggtagcaccatccatcatgcccggatttataggattgatgacggtaaaaagactttttacagcatgatacgcgtattcgctgttgatttgctaaaacaccaggctgaggatttgtttacagtcaaactgcctcctagcgctatatctatacgtacctgcgaagattctctgcggagggcactctctaatggtacagcggagtacctgggctggcttgtgccgggcgacgaaataatagttgatacgtctgataaggcttttcacactggacagattggagatttgctcaggaatttccctgtcaattcgtttaggctcacgggtttcccatctaattcaagattaagactaaaacctgttttgttggccggggagggattgcgtgatgatgccgaagactctatcaaaaaaattctgttaggtcagggttggcggccagcaataaatgtactgttttccaagggcaaaccgcgcattgtgcggcgaaactctctcggaatcgaacgccccagttccaataacggattgccgttctcatgggaagcatagagatagagaagtggcagattcttgatttcaccggatttcgaggttttgtcacttctaccgaaggtgcattggtggtcagacccgaggaaggcgaggaacgccgcgtcccgatttcagacgtggcagtggttctgtttggtgtagatacgcggttctccgcgggatcagtgcatcgcatcctgaaaaatgacactgccgtaatattttgtgactggaaaggagttccctatggacacgcctatccatggggtgatcatacccgagttggtgcccgtcaaattgcccaagcaaacgccagtattcctgctcggaagtctgtgtgggcgcgtctgattaaatctaaagttctgggccaggctgaggtacttgaattttttgggcgacctaacgggaaaaggcttaaggaactggtcaaagatatccgttccggtgacccctcaaatatagaggggcaagctgcacgcatttattgggaaagtctatgggatgaccaggattttcgccgtataccgggtggaggggacgatacctttactataaatgccatgctggattatggctacacaattctacgtggtcacgctatgcgagctgtagcggcatcgggtttgatttcttcgctgggtgtagctcaccatggacgctcaaacccctggaatttggcagacgatttcatcgagccctttagacccgccattgattattctgtttatttgctggtgtctgagtgtgttgatgatgggaccgaaattaagaaacgattagttaactccgccggtgacgttttcacagccacccgaaagtcgattccagccgagatgaccctgctagctcaacattatgggcagttaattgagggcgacattgggaagttcggggttccatcttggaagccgcccagtaagttggggctctaagcaatgccgggagaaccagtgtggtgcatggtgatgttcgacctaccaaccaaaaccaagaagcagcggcgtgcatatacaggtttccggcgctatctgctagataatgggttttcgcaggtgcagttcagcgtttattcctggtactctcccgctggtcatttaagtgtcaggcttctgaaaggtatcaaagctcatttacccccaggtggggaagtcaggatttatcatctcacagatcatcagtgggctactgcattgagattttctaatgccacggaggtaaagcaagaggaagcacctgcgcaactcatgcttttttaggcctactcgggtgggttacaaggacaaagcggcctaatgagcaaaaacgacgtagcagtattttgaccgcatcccttccgcgttttaaacctggaagcaggcaagactcgagaagacatcctcgaaactgacattttttaggcttaggaaccagcgtttttccccagaatagtaggggaaaacgctggttcataagtataccagggattatttgaactgattcccagctctgtatgggaaatacgcggaaggtttataagtataccagggattatttgaactgattcccagctcgtggtccggttcctcgtcctgcgcattaagtataccagggattatttgaactgattcccagcgggtgatcggctgcgcgtagtggcaccgtaagtataccagggattatttgaactgattcccagcgcagggctgcaagctgttcactcaggcttaagtataccagggattatttgaactgattcccagctcacagggtaatctccgcttaacatttttaagtataccagggattatttgaactgattcccagccagtaagctgcctattcttcgccgccgtataagtataccagggattatttgaactgattcccagcgataagcgccgggggtggctcgggggtataagtataccagggattatttgaactgattcccagcgataagcgccgggggtggctcgggggtataagtataccagggattatttgaactgattcccagcaatgagtaccctgcgatgattacgcttataagtataccagggattatttgaactgattcccagctgaccaatatccaggctttctccgcgtctaagtataccagggattatttgaactgattcccagcccaccctggaactcaaccatttcttctataagtataccagggattatttgaactgattcccagcacactcacaaataaattcatgtgcaccctaagtataccagggattatttgaactgattcccagcctaaggaaattcgggataactaccacaataagtataccagggattatttgaactgattcccagcagggggttgagattctgacgtatggcggtaagtataccagggattatttgaactgattcccagcccactgatgacggggtgccgatggggattaagtataccagggattatttgaactgattcccagctatcgtttcagatagcccggtttctgcctaagtataccagggattatttgaactgattcccagcttcgtgcaagtcgcctggtacaaactcactaagtataccagggattatttgaactgattcccagcacccccgcaggctggccgacagtcgttttaagtataccagggattatttgaactgattcccagcagtagccacgaaacatgccacaccgttgtaagtataccagggattatttgaactgattcccagcttcaaagaactactaggcgcgttgccactaagtataccagggattatttgaactgattcccagccgccctagcgacaccaatctcatcgacctaagtataccagggattatttgaactgattcccagcctgggcgacgacactaaaaccaaccgtctaagtataccagggattatttgaactgattcccagcctgggcgacgacactaaaaccaaccgtctaagtataccagggattatttgaactgattcccagctgtccgctgctactggggctctaagtcttaagtataccagggattatttgaactgattcccagccaaagcaactccagcgaggttacctgtattaagtataccagggattatttgaactgattcccagcggtcgaagcctgggatggtgcggcctggtaagtataccagggattatttgaactgattcccagccctcaagacatacaggctcaagagtcgctaagtataccagggattatttgaactgattcccagctgatgctcaaccttttgaaattgtcgagtaagtataccagggattatttgaactgattcccagcgggcgtggggcgacaacagtaacggccataagtatatcagggattatttgaactgattcccagcccgcacacaagtgggtttatcacttctcgtggctatcgcctggtcaaaaagcgaccgccaagtagccgagccttgcgtgacgaggttttggttggtgaggtgcgccgggttttcgaggaaaattaccgggtgtacggtagaactgacccccgcataagaaacggaacaaaacccaggacacttcacaggtgggaattcagaaatcctgccagcgcggcattcaagattgcgggtggaactccggatggcacctcatgaagccgggggaacaaaggcgagcggggcgaagtcttttgtaaaatagggagcagaggaggtgccaggtggagacagacccgttcaaggaatacctccgggaagttgaaccggacaggcagtataaaggctatgcgtggcacaccgccatcggcttgcaagccgttgatgggctgaaaacctcggattacctggcacacaccgcgattagaaacatcgaaggcgagataacctttaccgaggcaaatgcgcttttagacgcgtattatgcggcaaaacctgttggggatgctcccagtcgggtggaagaggccgacaaggtttcagcgcgaatcgccgcgttgctgtccgaaaaagcctttagtttcaccccgggcgaatacctggggattcaccgtcgactgtttagcgggatttacccgcacgcgggacagatgcgcgattacaacatcaccaagaaagaatgggtgttgaacggtgccacggtgctctacggcagcgccaccgagttggaggccaccctggaatatgacttttccgaagagagacagttttcctatcgggggttgtcgctggacgagattgttgcccacctggcggtgttcgtgtcccgtttgtggcagatccacgtattcgccgaaggcaacaccagaaccacggcggtgttctttatcaagtatctgcgcactctgggcttcgaggtgaccaacgatattttcgctgaaaatgcctggtatttccacaatgcgttggtgcgggcgaactatagcgacctgaagaacgaggttcacgccaccacggaatacctggaactgtttttgcgcaacctcctgtccggtgaaaagcatcccttgcgaaaccggacattgcacgtgagtctgggctcaaaagtaatcaggaaaccggacattgaggcgaataaaccggacattgatgaagagaaaccggatattgatgaagagaaaccggacattgcggatgcgctgtcaaccaaagctgcccagcaagccatgaggctgcgcgaggcgttccccggccaggaaattttcggtcgcgcagaggtgatgcggatccttggtataaaggcatccagaggctctgaactgctcaaacaactgttggaacacggtgtaatcgaaacgatttccggacacggcaaagggaaataccgcttccgcacctctgcctaaaaccgacagtcacccaatggcggtggattttagtgttgtagccgtggttccggatggcacctcatgaaaccgaagcaaaaatgggggaaacaacacgacgaaacaggcggttttggcgaagcgagcagcgaggcaaacgaggacaacggcgaaacatgcggatgaagtgagctgcgagagcggggcaggacagcgaaaagcagggcaaacgaggacaacggcgcggctggcaggggcaacagcggcaaaaatccgagaaaaacgagtgtttgtcccggggcgaggcgactcgatgccttagggtagcagggtgataaagtacctgggatcgaaacgcaccctcgtgcccgcgctgcaaaacatcgcgagattgtccggtgccacgacggctttggacatgttcaccggcactacccgcgtcgcccaggccttcaaagaagccgggattgtcaccggggctaatgacactgcgacttacgcgaaaatcttggcggattgctatatcaaaactaatgcgcgtgacatcgatttccgcaacctgcgcgaaatcctgaaagatctggcggacaccccagcgcgccccggatatttcaccgaaaccttttgcgtgaaatcaagatttttccaacctaaaaacggggcgtgcatcgatgccatccgcgaacgcatcgagaccgaatacgccggcaccccgctgtatcccgtgctgttgacctccctgatggaagccgccgaccgggtcgattccaccaccggccagcagatggcctatctgaaaacctgggcaccgcgcgcgtacaacgacctggagttgcgggtgccagaactgctcgatggcagcggatggacttggcgcgcggatgcgaatgaactagctgggtgcttggctaggcacggcggtgtcaatctgggtggtactggttgcggcggcggtgcgcaggtgggtgctgggctgggtgccgcgcgcgaagacgcactgccggaatttgacctggtgtacctcgatccgccgtacaaccagcaccgatacttcacgaactatcacatttgggaaactctggtgcgctgggatgcgcccgaggcctacggggtggcgtgcaagcgtgccgatgcccgcgaccctgacacgcattcgccctacaatcgtcggcgtgaaatgccgcaagccctggctgacctgattgccaccattccctgtcagaccctggtgctctcgtataacaatgaagcctgggtggacttcgaggagctgttcgcgctggtcgcagcacgattcgaggatgccaccgccttggcttttgactccaaacgctacgtgggagcccagattggcatctatagccccaccggtcagcgcgttgggaaaatcagccatttgcgcaacctcgaatacgtattcgttggcggctcccgcgaagtcgtctccgctgttcgcgacgacttcgcctcgctgggcaccacggtgcatgtctaaaatagtggcagagcatgcaattgtaaatcatatcatagtataacaatagtgtagactattcacgcatctaagaagggataaataatgcgcaaaattcgcctaacctcactatttaccgccctggtacttgcagtttgcactgtaagctttccgggaacggcatttgcggcgaactccacaataagtagccaagagaaattatctcatgtgttatctgaatcaaatagtggtaatagccagggtggccattcctttgagacccgtggtgcaaaatccttcgctattaagactactttaaagggtatagcctttgggctccggggtggaggtgaggagtttattaaattcgtcggcaaggcgttggataaacaagccgtaaaagtattgaggaagaatttagattttgttgccgacgcgatagacggtgtgcctagaatacctgatttagctgaacatgtagtgaaagaaaaaccgttctatgctctaaggccattaggccacggtaacgcaatggtcatatctgacgcggtaactacgctagtttcagcagtagtgctctagattttaaagcgtgtgtattttatggaagaagaaaagcctaaaacgcgaattgaccagctggaatccgaagttacgcgacttaaggaactcgttatgactctagttggaagcgttcaatacagaaacgataaaccctattgggcatacctggttcaaagtatgacctacggcgaaaaagaaacagaacttagcctgatgctcatcggcatttgtagacgattagaaggtgaggaacaacctataaaaccaaagagactgtgcgaaaacaattcatatatgcaagaggcttattcgaacgaaccaatgaccgaaaaagaagccatagaattgttagattaagttgtcgggccggtagacgcgcctgaagtgctgcacggatttatcaaacagtctcaaaattaaatccaacgtatcagtgcttttccgtagtggcgttcgcgcagtgcttagtttttcggggtggcagttttgcgtagcgcggggaacatgcgctacagttgggggcacggcgttgaaccggccgcgcggcttgtgttagcagctcacctgggtctttacgattcatgaggtgccagcgaaaatctcgcgggaatcaccggggagcctcggaaagaacagcggtacccgcctgcctgggtaggccacgctcattagaatccgacgggtcggatccgtaatcatcccgaaggaagcggctcgcttccagaaactgggcaagttcgggacttgaaacctttgccagggaaaccggcaagcacctcatgaacccgaaaccagatgggcgcgggacatgaacgccgccgggaataccgggtggcgcctcatgaactcaccatcaaaaccagacccggcagcgagcaagcgaggtggtaccgcgcgcgccgcaaacagtgacgggcgtcctcgtgaccaacacgaccagcgaggacgaaatgagcgaaaccaagcgcgggttttaccccaaacaccgaaaaagcagtgtcccttcctctccggatttccccacccaagaaacggaaaccctggcgtattggaaggctgatgacacctttcaagccagcattgaccagcgtgacgccgggaaaaatggttccaacgaattcgtgttctatgacgggccgccctttgcgaacggcctgccccactatgggcacctgctgaccgggtatgtcaaagacatcgtggggcgctatgaaaccatgcgggggtatcgggtcgaacgtcgttttggttgggatacccacggtctgcccgccgaactagaagccgagcgcattctgggaatcgaggataaatcccagattgaaggcgaaggcgcgatgggaatcaaggctttcaaccaggcgtgtcgcgactccgttttgaaatacaccaaagaatgggaagaacaggtcactcgccaggcgcgttgggtcgatttcgataacgactacaagaccttggatcccacctttatggaatccgtgatttgggctttcaagacgctctatgacaagggtctgatttacgaaggctacaaggtgttgccgtactgttggaatgacggcacccccttgtcgaaccacgagctaaagatggatgatgacatctatcaaaaccgcaccgaccagaccgtgacggtgggcttgcgcctggaaaccggtgagttagcgttgatttggaccacaactccttggactttgccatctaacctggcggttgcggtgggac

SEQ ID NO: 1606 - DNA, 3858 bp, synthetic construct
  misc_feature 1..3858: note = Synthetic
  source 1..3858: mol_type = other DNA
gacgccttcgcgcggcgatcgaccatgactctttcggggccgacgaaacgcccggcgcggagaagctctgcgcccctttgccgttgcgcccaactccttccaccgctcttattgcctttaaactatagaaataaacgtaaaatattaaaaataattgtttacaatatatttacatatttcattctaatacgggagaaaatagacatattcttaatatattcatacttgtccaaaatattttcattagtcaagcaacgatggctgtggcccacttgacacatacgagccgtgagtctaaagtttctcttataactgattcccagtaagggcctccgagtttgaggacctgaatgctcagcttatcggctgaatggcggcgcttttcagtgccgccattcgttttgtagaccacttgataaaacggttaagaagtgcaaatattctttcatgaacgcaatgaagcattatcatgcaggaattgatgtaggaatcaactcagtcggctttgcggcgatagaagtagattctaaaggcctacctttgaatattctcaacaatatggtcgtcttgcatgactcgggcgtcgatcccgggacggcaaaaaccggtgccacccgcttagccaactccggaacagcacgtcgaactcgcaaacttattgcgagacgccgtaagcggctgcagaaactggaccgatatatcgaagtgcaaggatggccgcttgtcgatttttcttccttgcccgatccgtacacgccgtggaagatccgagccaaactaacgcaggataggctcgaaggcgaagagcaaggtcgtgggctttcaatagccttaagacacatggcgcgacatcgcggatggcgcaatccgtacgagggagtagagtctcttcattcccccaaagaagcctccaagcaattcaaagatctgaaagatcgtgttactaaagttagtggcgtcatcttcgatgaagatgccactcctgctgaagttgtttgcgacatcggtctttcccccaaacagcgcttgcgttccgcgccgagcgcaaagtacaaagaaggagctactctcgccgatgaaccagtggggggaaagtcaaaggaagggttgcttggaggcaagctcatgcagtccgacaacgcaaacgaacttcgcaagattggtatcgttcagggtctcagcaacgagaaagtgaacgagataatcgatcaggtctttgcttcagaaagccccaaaggccaagcaggtaaacgggccaagaaagatgagctccctggccaagagcagtatgttcgcgcgctcagggcgcatcttgcgtttcagcgctttcggattgttgcagcagttgcaaaccttcggatactagaggctgaaccaaaacatgaacgattactgtcacagagcgaaaaggacaaagttatcgaattcctgatgtccgccgacggagacgacggagtaacttggtcggatgttgcagaagagttgggaatcgagcgtgaatgtttatccggaacagctaaacggggagccgacggggaacggccttcatcattccctccgacaaactcaacaaacatcagcatagttcgaagcaaagttaagccactcattgagtggtggcgaaaagcttctgatgatgaacaagctgccctggtcaccgccttgtcaaatgcggacgaattgactgacgatcaaccaagcgcagaaacagtccggcaattcctttcgtctctcgacgagcaatcacaggagaaaatagacaagatatctctgcccaaaggacgggctgcgtactctgtaaactccctagaacgcctcaccagaaggatgctcaaagattccgtcgacctttttgaggcgcgaaaacgggagttcggcgtggataacaactggactcctacgccggattcaatcggcgaaccagtcggcaatcccgccgttgacagagtcctcaaaattgtcaatagatggttgttggctgtcaccaggaaatgggggcctccaaaagtagtcaatatagagcatgtacgagtagggttcacttctgcagcacaaactcgcaaatacgaagaggaaaacaaaacaaatcgtgaaagaaatctagcgatccttgaagagcttcgcgataaatacaaggggctggctgatgagtacgccaagcagcaggatcagctcaatgccgagggcgataagctcgctgcagaggcaatggcagcacaggcagcagctgaggagaagctcagacagcagcaggcgtcacagcctcagtcacagccacagagcaagccatccggtggcggatcgagtaccccggctcgcccaagcacaccggccgcatcgtcgggcggctaccagtggccggttagcggtggaacaatcacgtcaccgttcggatggagggttcacccgatcttccataccaagaagtatcacgacggtgtagacgtgtcaggtcttccaacaggtacgccaatcagatcgattgcaaacggttatgttaccaaggcgtcgtactacggtggatacggaaactgcgtaatgatttctattggaaacggatatacgactctgtacggacatatgagcagatttgcggtatccaacggtcagtatgtaactaagggacaggttgtcggatatattggcagcacaggatggtcgacaggtcctcacttgcacttcagcctgatcaagaacggaagatacattaacccgatgagtatattctagagtatgaacacagatttttttaagaacactccggtgctgtacgagttattaagaataagagggattgaaggcgacgaggaactcaaggagttcctctcccccagtcctaagctcgcatatgatccattcctgctagcaaatatgcatgcgggggtggatttattattagatgcgatatacagcggctgcaagattgtaatctacggagattatgactgcgatggagtcacttcgacggcacttctgatgaaggttatcgggtcgctcaccgacaacgtgacatattacatcccatccagactggatgaggggtatggtcttaacaagacggcaatagaccgtatatatcaggaagagggtgaagtgatagtaacagtggactgcggttctgtttcagccgaggaggtttcttatgcaaacagccttggcatagagacgatagtaaccgatcaccacacggtgaaggatgtagttgcaccggggatagttatcaaccccaagaacccgggcgacacgtatccattcaaaggcttggccggagtaggcgttgcctacaagctggcacttgctctcagccgcagctgcgatatacccagaagcctcataacagaagtgcttgagctggttgcagtcggaactatcgctgatatcatgcctcttgtagataagaacaggtcgcttgtaaaatatggactcaggctgatgagactgggctttaagaacaagggcttgcgcagactgaccgagatggcaggggtggattacagcactatggattcgaccaatgttgcgttcgcgatcgtgccgaggattaatgctgcaggcaggctgggagacgcttctctgggagtcgagatgctcctatcggatgacgatgatgatatagaacgtctgtgcaccaagctgatggagaataataagaggcggcgtgagctgcagcgggaggcgtatgaaaattgcatcggcacagcggagcgcgagctggagcgcggggatttcatcatgattgaggctgagagtgctcatgagggtatcctcggtatagtggcagggaatctcaaggagagatttaacaggccggtggtcatcgtttctccgagcgatggtcagctcaaggggaccggcagg

SEQ ID NO: 1607 - DNA, 23372 bp, synthetic construct
  source 1..23372: mol_type = other DNA
  misc_feature 1..23372: note = Synthetic
attgcgaagcgctaattattccaggcgagggcacagagttcattcctcgccacttcatcggtaaatttgatctacaccagcgggcttacgctctttacaatttctcgaaggaaatcaacgcaagatttctcttttactatctgatctatcaaaaggattattttcctcgggttgcagtaggcgcaaccgttaagtctttgaggatgcgtcattttgaggaactgcagatcgcgtttacatgtattgaagaacaaaggcgcatagccgatacccttgataaggttttcgaaagccttgaaagggctcgcatcaactgtgccctcaatctacagatcgttcgtagcgcgtttgaaagctatcgcgacgcaatcttcgtaacgaacgccaacagtcatttcaagcgactggatgaagtcgcctcgtttagaaacggcgccaattttacaaaggccagtagaggtcaaactgcaacgatcattggagttaaagactttcgagatagatttttcactccgacagaggatttagcgtcagtcacgattgatggagatataaatgaagaggatgtacttagagctaatgacctgctgaccgttcgctccaatggaaatgctgacctaattggtcgtacgatgctcgtggaggaatgcccgcacaatgcgctacactccggttttacaatcagaactcgtcttattactgatgatgtttggccaaggtatctttgtcacttcatgagatcccgagcaacacgcaaacggctgacaaatggtgggacaggaacaaacatcaagagccttaatcaaggatcattagcaagtctggtctgttcctttccgcccctcgctcagcagaagctacttgcgaatcaattagatcgattctccaatgctacggatcgcctgcaaggtgtgtatgaagaaaagttatctttgctggacggactaaaacagtctctgctccataaagctttctccggccagttgcatcagagacaatcgaaagcggcggtcatcccgtttccgattaagatatccaacatatcaccgaccgatctgcacattggagttcttgcagtcgcctatgcaactcacgaagcactgcacagggcatccgatttcggacatgtcaaagcggaaaagattgcacatatggtggaggcatatgtgggagtagatttgggtcgggctcccgtccgcgatgccgccgggccaaatgactttcctcatctcaagaaagtcgagcatcgggccgacaaggctggatatctcacattcgcgcgtcagccgagcggagcttatagggtcacgaagaaagcaggttttgattctctcgtgacaaagacccgcactgcgttagcggatcgcaatcaagacctcgataagctgctcaacttgatgacgccaatgaccaccaagcaagcggaaatcttcgctacggtatatgccgcttggaacaatctgctgatggacggtgagcccatcactgatgagcgaatcgttcatgccgcacgagaggactggcatagcgataaactaaacattcctcgggacaaattctttacggccattgcatggatcagagcgaaggggctttgccctgaaggcaaagggaagaaggttgaggccaagaaacactaacgaacgatgcgcaacgagtccgagacccgagccgagctgatcgaccccgccctccgcgccgcaggctggggcgtggttgctggctcacggattctgcgcgagttcaagatcacccaaggacgcctgatcggggccggacggcgcactgatcccgatacagccgactacgtccttgtctatcagaaccgcaagctcgccgtcatcgaggccaagcgggaagacctctccgaatccgagggagtcgcccaggccaagcactacgccggaaagatggccgtccgcttcgcctatgcgacgaatggactcaagatttatcgcatggacttgggtagtacgccagttcaggagccagccaacatagatgaacccgacggcccgattgccatcacaacttccgagggtctggtagatcacttccccacgccggacgaactgtgggccgcgacctttgccgtaccgaatgcttggcgcgaacgcttcgctcaggttcccttcgaggaccgctcaggctcatgggacgttcgctactatcaggacactgccattcagagagtccttgaggcagtcgctgatgagcgccagcgcattttgctgactctcgccaccggcaccggcaagaccgccattgccttccaaattgcatggaagctcttccacgccaagtggaatctctcgcgccagcctacccgtcggccccgcattctgttcctcgccgaccgtaacatccttgctgaccaggcctacaactcgttctcttcgtttgccgacgatgcccgcatccgtatcgcaccggactcgattcgcaagtctggcaaagtccctacaaacgcaagcatcttctttacgatcttccagacgttcatgtccggcaccggcccggatggccggccagcgccctacttcggccagtatccacccgacttcttcgacttcatcatcatcgacgaatgccatcgtggcggcgcgaatgacgagtcgaactggcgcggcatcctcgactacttcgccccggcagtccagcttggccttacagccactccgaagcgccgggacaacgtggacacctacgcctacttcggagagccggtctatatctactcgctgaaggaaggcatcaacgacggcttcctcacgcccttcaaagtcgttcaggtatccaccactctcgacgactatgtgtacaccccagacgacaccatcgttgaaggcgaagtagaggaaggccgtcgctacactgagtccgacttcaatcgcattattgagatcaaggagcgcgaggacaaacgtgtctctgtgctcatggagcggatcgatcagcgggaaaagaccatcgtcttctgcgccgcgcagctccacgccgccgccgtccgtgacctcatcaaccaaaagaagacgagcaccgacacgatgtactgctgtcgagtgacggcaaacgatggcgctttgggcgaccagtatctccgcgagttccaggacaacgagaagaccatcccgacgatcctgacgacatcacagaagctctccaccggcgttgatgctcgcaacgtgcgcaacatcgtcttgctccgccccgtgaactccatgatcgagttcaaacagatcatcggacgtggcacgcgtcttttcgacggtaaggacttcttcaccatctacgatttcgttcgcgcccatcacctgttcaacgatcctgagtgggacggtgagccgcttgatcctgaaccagacccagagccgcgactgccccagccaccagctcctcccccggacggagaacaacctgagggcgaagacgaccctgcgccacgccgtgagcgcttagtgattcgtctggcagatggaaaagcccgcgagattcaacacatgacagcaaccagcttctggagtgcagacggaagacccatctctgccaatcagtttctggaatcgctgttcggcacgctgcctgagtttttcaaggatgaagatgaactccgcaaaatctggagtaaacccgatacccgccgtactctgctgaggagccttgaaggtaagggttttgatcgaacgcagcttgctgaaatccagcgtgcgctcgctgccgaacaatccgatctatatgacgtgcttgcctacatcgcgttcgctctaccccgtgcgaccagacaggaacgagctgatcgtgcgtgaccctcgattcaagcgacgttcccagaaaagcagcaggccttcctcgacttcgtgctctctcagtacgtcaccgagggcgtggaagagctcgaccaggacaagttgtctccgctcttgatccttcgctacaacgccatctccgacgcgatccttgaattgggtaagcctcccgagattcgggatatgttcgttggcttccagcagtacctctactaatccagaacagacttggcttagacggcagacgtccctctacgaaggccaccgggagaccgttcttccacctgaggacgcgttgagatcaatcagccaccgagatttgaggaatcactcgtcactgaatcacaaatttactgctttttcccagcatcgcaagagtgtctctgcaaagtctccagatcgcacggcagagcgtatatcttcacccgtcacgggtaccacaagaatttgctctcgacttcctcgcagcatttccttggtaatcgtatcgctaaagccattccacgagaccaagaatcccaatgtgcatctctggctccggttttctaacttggaatggaagacgacgaactcgttctttccgcacctgcctgaccagttcttacattcgacgagaattactgcaccctcgcggcgcagacgtggctctgcactatcgttgagtaccgagatgtctatttcctcggtttgagtacgcagacgccctgtgactataaatccgggaacggactcaagaagacggctgcaaagctcctcgagagtcctccctttgctgtcagcagagtttgcgctttctacagcttcaacgagtgcgtcaagcgtttcagaaccccaaccggaaaggcgtgatgctatttctgcgatccgctgtccgatttcgtccgcggcgtgctccgctgcctcctccacctctttggcaactttccgaatgatctcgtatgctctgcctagatttgtctcggaagtatcgatgcggaagcgaagcgctatgtaggcaccatcgtcgtcataatcggtaagctcgacgtctccgcgcagccgctgccgcgtctctaccgcacgcctaacgagatctagatattgctccagtcctagcggcgaataccaatatttgcgcgtcatcgtatggtccgctatgccatatagaactgaaccgtcgcggccaagcgatccgctccagtcaagatgcagcactccgtctttcatgcttccgacctcaagtgtgaggccgtccggcaggtcatccacggtcaaatttgataatgcggacgctggcaagttggccggggattcgccttcttcattccaatccgccaataggagctttgcttctgttgcgttcatcctcaatcctctcttgcaacaaacattgttgattatcaggttcctaatgtcgagaaagtggagaaagtgctcacggaggacgcttcgcaccccttttacggcctatcgtccgctgcccccaaacctactcatcatcggacagtccaagcggcccgaagagcgagagcttcacctcaagctcgccgtcaaggcacactggagcaaacccgagttggcgcgtcagctcaagagtgcgaccctagagcggacgatgctctccggcctaaaactcgcaccagcggtgcgagttttggcgcaagacgcacggggacattcaacgatactgaactgccagttgttcgtacagacgaagtcgcccactgtaaactgtcgttcaacaaggaacatgcggatattcgtcggtgtcactgataaagaatggttcgacctccacgcctcacgcgtcaacgtggacgaggtgaacttttggcggccatcgcctacggcgactttcaaagcccttgaccctggcgaactgctcctgttcaaactacacgcacccgacaatttcattgtgggcggtggtttctttaccaagtttcagcagttgccggtcaatctggcgtgggacgcctttcgtgaaggtaacggtgtctcctctttgactgagatgcgacagcgtatcggcaaataccggcgtgccgtcattcaaccagccgacaaccccaccatcggctgtgtactacttgcggagccatttttctggccgaccgaacagtggctcccgtcgcctccggatttcaaatcgcagacggtgcaaggcaaaggctacgacggagaaatcggaaccggtcgtgagctctggaatgaagttgagcagaggctacgattacagcccatagaaaagttgcataaagaaacggccacgctggccgcaatcgaatcacatggactcggcaagccacagatcgttctaccaagacttggacagggttcgtttcgaatcgtcattactgatgcctatgagcggcgctgtgcgttgtccggcgagcggacactacctgtcctcgacgctgctcacataaaaccctatgcggttcttcagcgccatgaggtctcgaatggcattctcatgcgcagcgatctacatcggctgttcgacgaagggtacatcaccatcgacccgttggacaggcgaatccaggtcagcaggcgaatacgcgaggagttcgacaatggcaaggagtattacaagttgcatggcgagcgcatacgcgagcctgcgcaggcgaattacaggccccactctgacaacctagattttcatgcatatagcgtattccgctaacggagttctagaatcgcttcgttagcgggtatcagctttagttcttaaccaacttgaaactgatttggtaacggtagaagtcaatgctcgggaccatcgacaaggcccgtcgaattctctggtcatcttcgagtgcgatgatgatccctctcactccttgatccttttcggccaacacttcctgtacgaaactcatataccgtagcgtttgtccgacgacggcatcgctcgcccgacccttcttcagttccaccaccaagagtcgcttcttatctttgctgatagccaaaatgtcgagaggcccagtatcagtctgatactgttgtgctggctcgccatcttcttcgtagatgtcgtactctttgcccaaatctgtctgcgcccagttctttaccaggaactcttcaagatgagcttcgagcgcgaaggccgaagcatcctcgactgtggcatccgtcgagatgagcttcggagcggagacgtcgccaattagcttctcgatctcttcggcgtatcgggagatattgcttacggtaccgatcgatccggcagaatttttcaaagcctcactcaatgcggctcgatcaatgcttacactcaaccattgaacagggcggcgatgagggaggatctcccccggctggtagtagtaatctccactcacctcgccaacacgatactggccggaaccgtcgggacagaggacgatgtcgcccttttgaatccccttggcgaccgtccataaagcaccacaagcgagtcccgcactgatcttggatttatcagggtgattcgctagatagatcggaatgaattcctgattgaacattcgccattcgtcggggagcttgctcgtcaggtcttggttgatatcgaatccggctccgataaactttccggccaaacattctggagcgtaaatgcttttgcgtccaagcatgacgcggtagtagctcttcataggagtcgattccttccatcgagtgccagcgggcttaacccaatctactaggtatggcctcgaatcggcacttctgccgggatgccaagcaagagcgtagagggccaatcaggcgcgctttacgcgcaaataaggaaaccaaaccctcctaagggcgctgccctcgcgcggcgcaagggcttccccaatcttccgcgcttcgcttgtgcagacctccgctgcgctccgccctttccgttccaccttcggctccctctccaagggtggggaaacccctcccttgcaccttgctaccccgccttcgccaggtggcgttcggcatgtaggtacatgccacgcatggcatgaaaagcaacggccaaggccaaggaggaagcacccatgaacaccaccgctatcaccaccgcaaaccccgtcattccgttcacccagaaccccaaaaatccgcaaccaaagcagcaaacaacaaaagaagcaattgctgccaacatccaagccctcatcgaacaactggagcagggacattcagacggcctcaccgcctacctaactgcgatgggcaggtttcacaactactcctttggcaacattcttgagattgcaagacagaagcccgatgctacccgcgttgctggcctctatgcgtggaaccagcttggccgaaaggtcaggaaaggtgagcgcggtatccgtatccttgcccctgtcatcggagttcgacggaagaaggatgccgaggccaagaaggacatccgcacccagaatcaagccgtgctggtaggattccgctccgcctacgtcttcgatgtctctcagaccgaaggcaaagcgcttcccgagttgtcagaacgtgtgaccggcaatgtcggtgaataccgcgaacgactggtagacttcatctccgcccagggcatccagcttgagttcaaagagagcattgcgccagcactcggaatgagctacggcggcaggatcgccctcctgcccggacaggaggcagccgaagagttcagcacgcttgttcacgaactctcgcacgaaatgctgcataaagccgagcggcgcaccgcgacgacgaagaccgtgcgcgagacggaggccgaggccattgcgtttgtggtcggcaagacgatcggactcagcacggggcgggcatctgccgactatattcacctctatcacggtaatacggcactccttaccgaaagtcttgaagtcatccagaagacttccgcagtcatcctctccgctcttgaatccaaggccgaaacagcgctctcagatgcccctgaactggcggaagccagctagagctaccctcggcgggcggcttccgccgcccgccgtcattctatggacacaaaagaaataggtggaattgggtgtactatcgggtaccgcagcggccccgtaggcatccccttgatttctctttgacgcgaaatcgcccgtcttcccgccctgaaggtcgctctcagaagaacgagagcgcctgaatttgcccacccgacgggctaaacaccagcccaaactatagccgagccagccgcatccttatactgcggttaggatgcaagagctgacccaagcaatcgccacggacatcagttgccggcccgaagggacaccgatcacggcagcagcattcctccatcttggaaatcggcctgccgtatcccgggcgctccgcgcgttagcaaaaggaggcgtcattcttcgagctgcacacggagtctacgttgcccccgttgccagtcgctttggccgccatgcgccccacgctcacctcttcattcaccagctcgccgctcaatcgggagaggccatcgctccctttggagcggcctgcgccaatgccctcggcttgaccactcaagttcccgtcaagatcgtttattggacttcgggcagaactcgttcgtataagctgggcaaactgatggtctatctccagcacgctcccgattggcagctcgtcctctgggatgaacctgctggagagttggtcagagcgctagcgtgggctggccctgtcgacgctggtaaggtgtttcgtcagattgtcgaaaaggtttccgaggctgcaatccttgaactccgacggcacacatccgtgttccctctgtggttccagacagccttgcaacaccccggatcagctgcgcgtggcaagcaatagctcataacgggcgtatgcaggactccgagcgacactcggatcagcggaagcgaaaagcgcaagtgaggaagagacaccatccctaagcctgtcggcttaggaatgcggtgacaaaaataggactcgaaccgacatcgaacgggatcgaacatcgttcgaggttgtccgatagctgttcgatgttgtacgacatagcaattgaagcatacaaaaacaagaacgcccctttgccgaggcatcggggcgtcctaaaggtcgctcagtgagcggtagccttacgacgattagcttactaaaaatagcaagggattcgccgctcaagtacactgacagaactctacccggccccctatgattcgtcaagagttcatcaaggagtaactgtggatagcaacaacctaaccctgggtttggatctcggtgtcacctctatcggttgggcgctcgcagatgtcgagggccaacagatcgtcgatgccggagttcgcatctttgaagcgcccatggatgtcgctaaattcgaggctggcgaaccaggtggctccaaagcggcaattcgccgcaaaagccgaatgcaacgccgtcaaaccagcagacgacaggctcgccatcgggacctctaccttgctctgcaaagtgcagggatgctccccttcgctggcaagaaggctgaagatcgccataagaaattgaccgacttcgacaaagacctgatgagcgacaagacgcgcgacgatcagttggcgtgggggtggagggagcgcatccgcgccgaggcccctacaatcgccgaccccgaccaagtgatctgctactacctccgagcgaaggcagccacggaaaagctggagctaccagagctaggtcgtgcgctatatcacctcggtcagaggcgcggtttcaagagcaatcgtcgcgagggacgctcgggactcacaacagccgatgcgaagaaggaagaaactgagcgcagcaataagctaaacaacattcgaacattacaagaggaactaaccgcgactgggcttactctagcccagcgacttgcattcataaatccccatcaagccgcgatccgaaaccgtaaacgtagcgatattgcgcccatcgaaactgggcgacgcatgtatcaggacgagttcaagaagatatgggagacgcaacaggctcactaccctgacctgttgacggccaacttctacaatcgcatcgagcgcctgatgtttaagcagcgcgatgtttccgctggcaagcccggcaaatgcgaactggagcgtgatcccccactgccacgcgctccgaagtcttcgctgctggcgcagcactttaggcttgtgcagacggttaataacctgaaggccgaagggatcagcggcactgagtggcgcgaaaagcaacgcgagctgatagctatgctctccaccgtcatattcaaaaaggagaccaagaagggcacccagaccttctttggcctgccgttcgcagaggtgaaggtccgactcggcctgcacaaacgaaccaagctgaacttggatgacgatgaggacagcacgtaccttcgaggcaaccgaacaaacgcaatcatggccgatgctttcggtgtagaacgctggagtgcgatggaggagcaggagtgccgccgcatcgtccgcaagtggatcaccgaatcttcaccggagaagcttttccgcattgccaggacgcagtggaatcttgacgacgctaaagccgagcagctcgccagccttgaagccgaggaaggctacgccgcgctttctcatgtggcgatactcaagctattgccccacatggagcagggacttacttactcggaggccgtcaaggaggtctacccaagccagctctccggcggcgaggcgtatgagtttctcccgccggtcgaaactgatgagctgccacgcatccccaatcccgtcgtcaagcgcgcactcacagaactgcgaaaagtgctcaacgcgatcatcagaaaatacaagatcgaaaccgggcaagaaacatggcgcccagcgcgtatccgtattgaattggctcgtgacttgaagcgcaacgccgaacagcgcgagaagattcacaagggaaacaaggagcgcgaacgcgaacgcataaccgctaagaaatggatcgaagagcgaggacagcggccaaccgaccgcctcgtcgaaagggttgcgctctacaagcgcactaggggccagtgcgtttattgtgtgctgcctctcggcgatatggagaatgtcttctccgaagactcaggcatcgaagttgagcatatccttccccgccgctgcaacgacaattcgttctccaacaaggtgctggcacaccgtgcctgcaacctccgcaaggcggatcgcacaccgcgacaggcctgggacccaagcccggagtgggacgagatgctgaagttcgtgaatgctttgaaggataaggctctacacgatcgcttcatcatccaaacagaagaggaactgcagagcttcacgaatcgacatctctctgacacgcgctacatcagcaagctggccagcgagtatgtcgagctcctctacggtgggcgcgacgcgcagctcgattgggacgaccgagtccgccgctgcgtctatgcctcatcgggcgcattgaccgcagagatgcgcaaacgctggggcctgaatggaatcttgaaaccgaaaccggtcaatactgaggctgcccgccaggaaaccaagtctcgcgacgaccatcgccatcacgcggtcgatgccatcgtgatagcactcaccacagagtccacaatacaacgcgctgcctttgaggcccagcgccatgatcgggccagtggacacttgcttccgcgctacttccctccgccctggccggcaaatggcgagatcgaagagcggatcaggagcttccgaggggaagttcaacaggcggcagaaaaaatcaaggtttcccatcgcgtggatcacgcgctgaatggcaaattaaatgaagagacgttctacgcgccgccaaaacccggtagtgacgttgcgcacatcaccaaattggtccataagttgacaccatcggatctcaagaatttagatcttttgatcgaagacaaaagtgttcgagaagccatcagcgcacaactccaaaaagtcggcaatgatcccaagagccttgagggcaatctcccgtatcttgaaggaaaagacgggagaaagacccccatacgcaaagtgcgcttagccaaacgcggactgacgttagaaactctgcgccacggcgctgtcctcaacgctgaaaatcatcacatcgtaatcttcaagcgaattgatccagtggcaggggagctttggtatacgcccgggcctgttacaaggctaaaggccatgagagatcgggcccaggaggcaaagcggatagcccctaaaaaagggccctacgagattgtgaacaagaaggatggcgaggggtcaacctatgtaatgcacctgatgaagggggatgcagtggagatgctcgaccccgtcaacgatctgcgggatgtctacatcttctccagcatgagtgatggagattacgtcttccttcgccacagtgctgtcgtttcttccgcaaagaaaatggggctcactctatcccagatgagatcagagatgcagaaaagtggagatcgagttcgtacccgcctcgacaggctccgcgaattggaatgcgagaagataacccttgatcccctcggaaaggtcatttacagcgcatgattgatcgcattgtcgaaatcgcaaatcccgcacgtctgagcatccgcgacgcacaactcgtcattgagcgcccaaaggaggagcaattgactctaccgttcacgactccagtcagcgagattgccgtactactgttggcgcatcctcaaatcaccctgtcccaagctgtcctctcgcgcattgcggaggccggcggctctgttgtaaccattgacggaaactttctgcccgcctctatgctgctccccgtgcagagccacttcatacaaacagaacgcttcgcaaaacagatggagatgacactcccgacccgcaagcggctctggcaacagatcgtccgcgcaaagatcaaagcccagggagaactactgcgagaactccatggcaacgatcacggactcattgcgatggctgcgcgagttcgcaccgacgatcaagggaatcttgaagctcaggcagctcgcaagtattggggcctcatctttggcgatagtaagttccggcgcggctctgacaaagcggatcaaaatcgtcatctggactatggctatacggtgctgcgagcagcggtagccagagcactttgtgccgctggcttgcatccttcaattggatttcggcataagaatcgctacgacgccttctgccttgccgcagatgttatggagccatttcgcccgctcgtcgataggcgtgtgtgtcagtggatttccaaagaagatgcggaaggaccgttcgactcgaagacaaagggttggatgatcggcgcaacaacttcgcgctacatcctcgacagagaggaacgatctttgttcgatatcgtcttgcgaacggcaaactctttggcaaagtgcatcacaggggatgctcgcgatcctgagataccgagcctgctcattccttgcgaggaagaagttacgaggaagcgcggagttcgccgggtcgaggctgaagacgtgagaaccgctgttgctgctagctaggaattactttatggatgcggtcgtggattgctatgaaaggacagcttctttctgcgtatcgatcattgtggctcatagccatgttcgacttgccaacggagacgttggagaataagcgcgactacacgcgcttccgtaaagggctgctcaaagatggatttatgatgttgcagtattcgatctacgcaaggtatctgccaagcgaagaagcagcagactcgcaccgcactacgatccgggcgatcattccgcctcttggccaagtgcgcttgatgaccgtgactgaccaccagttcggcaagatggaggtgttctatggacgaaaacctcgtgaacctgagccagttccagatcagattctgcttttttgaagagataagccgcgccgaactctctgcttttcagcgagttcggcgcggcctagtgtacttgagcggtgaatcccggccatccctagcgtttgtgtatctggaggacaacggcggcatagtgtacttgagcggtgaatcccggccatccctagcctctgatcgctgcgatggcggatcctagtgagtgtacttgagcggtgaatcccggccatccctagctcattcatctcaataggttcgcccacgcgaagtgtacttgagcggtgaatcccggccatccctagccgataagctccgagaacttcgcctcaaccaagtgtacttgagcggtgaatcccggccatccctagcaattgcctgacgagtatcggatcgatctatagtgtacttgagcggtgaatcccggccatccctagcgcctcaaaagcctgcccgattcgttgaatgagtgtacttgagcggtgaatcccggccatccctagcgctaacaacctatccaacaacctgttgaaagtgtacttgagcggtgaatcccggccatccctagcacatgaaggcgtattgtccagattgggtcagtgtacttgagcggtgaatcccggccatccctagcgagttggatcttatcgcggttcttggcgtaagtgtacttgagcggtgaatcccggccatccctagcgaataggcagcattgtccttcgtactcccgagtgtacttgagcggtgaatcccggccatccctagcagaaatttagcctgatgataactgcttgtgagtgtacttgagcggtgaatcccggccatccctagcttgctaccggccttggtcctcagccgccgtagtgtacttgagcggtgaatcccggccatccctagcgggtgatcctcttacttccccacctgatgaagtgtacttgagcggtgaatcccggccatccctagcaggaaattgactaggtacgaggccggaaatagtgtacttgagcggtgaatcccggccatccctagcggctgcagcagtgtgcgggttcggttccaaagtgtacttgagcggtgaatcccggccatccctagcggggaaagccctccaggctattgatcgtctcagcgcaaagccagggcaaaggaacggcatcggcccggcgtgcctctctggaaaatagcctgaagggctttccccgctcgaaatgaacccacaaaacgagttgcaaatacttgccaatcaaggacgagcgtctttagcaactttcaccgtccgacatgctcggtttgcttagcagtcgatccctgaacgtgatggccggcggccttggccgtgggttcttgagctgagttcgggatgaaaggcgcttgcggtggaataggcgaagattgagttaccggcgggggttcagagtctcgacatccttgtatttccatgcccgcgaacaatccgatgagcattgttgcgccagtgactatcggaatccagatacggagcaggtctgttttgaattcgtgtaccagttcatccagggtccgggttcggcgttcgattgtctgcacaatttggcgatttgcggattcgactctagcagcgacgccgccgtctctgtccgtcaggtcacgcagggccccgattagctgcttttgcgtattccccatcgcaatagatgtcgcctgaagtcctgccacggtttcaggcatacccgaactcacaaagtgctgacgcagactctcgccaagaatcttggcgatctgctgagggtcgagaccgacttcaatctcagaaggcagttctgccagacgactctctatgaaatggacgtaccccaacatcttctcttgtgcctcatcggagaattgaaggtgtgcatcgagcatcgcttggatacgctcacgctcatcagcgatgtcctttggcgtatgccgcgtcagcaatgcgaggatgcccatggcttcgaggatgcgtagcatctcgtcatctggactcagagtgcgggtgtgagcgagaacacgatagtaggcggtctgcagttcttccggtacgagccgagcgagagagtcgaacaaagtcgactctcccgcctgtgcttcatcaagttcatgcaacgtgggaacggtgctcatggaaggaagacctcctttgtgcggtcgaactcgctgaacagcctacgacggtagctctgcgcgcgcattacgagcgatgctcgcttcagctcatctacagatgccttgcgatccgccacatctcccagcttgatcccgtgttgacgaactggattttccagctctgccagtcggaactccatctggaggacagttggagagaacgcctcacggaatcgcttggcttgctccgttgccttccagtaggtgaaatcggagagtgtactggtcgcattctcaaccaccacatacttaacgcgatcctgtagacggtttgcccacgcgaggatgctttctacacttgccgggtccggcgtgacgacgccaacagcagtaaagctgacgccggtcgccgctacatcctcatacatgctctcgaaccagtccgccgccacctgtccggcaccggctcccatgtcggccaggatgatctccgaaccgctgtcgagatgatcgacgaaagcatcgaggccagcaggagtatgaatgttgaccttcgtgacggagccattgaagaagtgcttgagagagccacgggctttgttctctgtgtccaggtcaagcagtgtgacaggaatctcgtttgcggcgaaccattcggccagggccaccatgacgcccgtcttgccgacgccgcctttaccgcccattgtgaagaccacgcgcttcgctggcgtggtttgagtctttgctgcttgtgtcatcgggcacctccatcagtgctcagggtgaggggttcgttttcacggaagacgaagcgggaacgctttgcctcctgcgctgtgggtttggctttgaacgcagcgaggcgggcgctcactggcggttgggcaaccgggagctcgacggcaggaagctcgaactgcacctgcttccggtgacgggcgcggactttcacgaaggaatgcagtgtgctgggcgcgacccgcattccaagccgttcggcgaagagccgagaaacctcccgatacgtccgccccttacggcggagttctcggatcagttcgcggtgcggttcgagtttcgaacgcggcggtttcggagggaggtcagagaaatcagccagcagaactgcggattcgcagacattgtttgatgaaacgttcatggcagctccgtttaagtccccaatggggacttattggttctgacgccgatctttggcgtcaaccggccatctggactgggatttcccaaaggcccacagttcaattaccgggggctttgattactgaaatcaggtacttaggagcgcgacctttgggcctcgaagagtctagtttaagtccccattggggactcaaaaagtttgggcaaaatgaggacttaagacttttttaagtccccactaagtccccaatggacgattcccaaatgttcctatttgctcctaaccctttccatatgtgccacttagagccattcccgattgttcctatgggttaccactcgtgccctttattatctaggacttacagggatttgcgtcgtctcataacccaaaggtcgtaggttcaaatcctacccccgcaaccacttagcggaaacgccaaccccagataaccccacgtaagagaagccaacaattctccgtggggttttctgcatttcggcaacgtttcccttcatcgctacgagctcctcaagatcttgtttacaactgctgtgttcgcctcgcgtttggactccatcagggcgttgccgtagacgttcatggtggtcgagacctgggcgtgccgcatcagcttttgttgaatgccgatgggtgctcccgtgtcgtcaagccatgaacggtacgtatggcggaaggtgtgccagccgacatggccgtacttgcccgccgcctcccagcgctcatcgtgaatcggtagacgctttccgttgggcaccggcgagtccgtgagacaccagacgccggcaccggccccacacgttggacacgccacgaggcagcaccatgcaggacggaaatagtcctgttggatgggcgacgcatggtagtggcgtcccgtgacgggactcgtgaagagaagatcggattcctcaacctcgattccggttctctcgaacgcctcccgggcctctagttcgcattggcgtatccagtccaacaggatcgccgcgaggtctggatcgagcggcaactcatcctcggaatactcagtcttcacgaacttggcccgcccgtggacaaccgcgcggaagagctgaatgctgagcttctcaaaatgaatgtccggcttctcgatcgcgagaacctcttcggcgcgtactcctgaacagatcgccaccagcaccatcgtgcgatagggctggggcacgagttcaaagcccaaaaagaactgatcgaccgtcaggattagaggccgtttgcgccgcttgctgatccctttgatctccacgagttgcataggattgcgctgcctttcgaccaactcccaaaacatcgccttctcgaacaagcggtgcatgacagccttgatatggcctttggtcttcggtgccaaatcaaggcccttcaaccactcctggatcttcatcggcttcatccgagagaggcgggtggttccccacttctcgcgaatacgcttgatgttgctgaggtagcctgaagccgttgaatagctcagttcgccgatgtcatcgcttcgttcacctgggcgcacgctcttgatttcaagcaagcgttcttcggtgatgaaacgatcaaggatgatgtcaaaggtcgggtctaatacagcgagggttggattttcatcattaagtttgagcacaaacgatcccagatgcctttcggcagcggtctgtgtcgggaactgttccacgctcaggtacaaggattttctcttattggtttcggggtcttggtatcggtattcccaagcccattgattgtctgcccgcgcaactttgcgcagggtgccgcgctgaaaacgctgccgtgtgaacttcaaggacgctcctgtccagtcacagcggcctgatcggttgtattcgattttaggcctgtctccagccacgaatccagggaacttaaacggaatctccaacgttttcctaccttgaaagcgggcacttctttgtggcgtgccttcccctctaaggtcttccaatgcatccccaaaaccgaagcagcttcgtgaagatcgagcaatggctcgaacgcaggaattagcctgcgggggttgggctttgcggttgagagcatggaacctcccgtcgaagcggccccggcgtggctcagggcagagataacgtaccgtgctccgaagatggctcaccatgcgatacggtgtccaattcacaaagagaggctacttatcaacaggaagaataaggatcattacgtttacttttttgagcaaattgcatctaatctcgcaatgttttagcggtgggacgttcagcgcgcatccagttcatttgacaccgcttatcgcttcaccagcgcgtcgtcccatcccatctactcagagtttatgggagcacgtatgctgcgaaatgaaacgaaattgatggaatcggccatcgctcttgctgaagagctgcactatcagcgggcagcgcggaaggtccgtatcagtcagccgatgctgacgaagaacatccaggaccttgaaaccattgtcggcggaccactattcattcggaaccgcaaaagcgtgcttttaaatgatgcgggacgggcctacgtccaacaggcgagactttcccttctctacagcgagcgagccgttcaagcggccagggccgtgatgcaggacgtggacgtgcctttccatatcggacgttccccgtataccgacccattcctaacttcgactttgatgtctatccaccttccgctttacccgaagctaagaattgaattagcaagccaatactccgtggacctcgttcacgatctactggatggcacactagatttggcgatcgctaatgaacctccagaatcgccgttgcttacccaaattcagattgcggacacacccttctatattgcgatggcacggagagacgctttggccgagaaaccagaagtcacctttgcagacgtgaatggtcgcagatggattctttttgaacgtaggctgcatccccctctttatgatctgatcctcgaagcagcagaacgacgtaatgtgcgccccggacgtattcagcacgtcaccgccccggaagaggcatttccgtttgttgcggacaggtctgcggtcgcatttttggtgaaagcgggagcgttgttaatggctcgaaacggagtgactatcaggccacttgcggaacacaacctccgcttgcgtacattccttgtttccagggcagataacgactccaagatcgctagtgagatcgtgcggacgttcgtccgcaaaacttctgaagttagcacttataaacagttaccacttccgatttcggcgtaagttctacttctactcctctcgtttcggcgccggaccgttgctgccaactatctgaatctctatcttgcccgcccattcgcaacgggaacacgatacgattccagtcgttatcgcgcggagatctatatccgcaaggttgatgacgtattcacaattagggcagacgtggacactctcccaaggtccaccacctcccccgttggctccggtctcgctcattcgccttcatccggtctatcaggactccccagagattcggagtgtgttggacggcagcatcggaaaggatggttcgcgccatcttatttgatgggccatcggacaaaagctttgggccatcctcttggcaaagaggattgaagaatgttcactttcgcttatggctttgcgctcttccaacgctgccagttcttgcagatcgcagtcccagattcgaataaattcttcgtggaacccctccccgctgttttgttgtccggcactagagggatcacgtagacacctcaattcgaaagctaccaaataaactctgctgaaatagcaagacgagagccagatgacaaaactttacattggctattcgactgacagattggaccatacagatcgaatttccgttccccatgccggtccgacaaaacttgacaaagtgaagagtgaagatcggtcttccctgttcgtatccttgattgggaagcccactttgtaggagcagacatggcaactgttgcggtacccattacgtatgcggcgaaacgtgagacggatattccctggtatttgtggtgcttggcgctagctgtgacttcagcatcgatcggtgggagatgggatgtctcctggcatcaatcgatcggtcgggacactttctggaccccggcgcacattgcaatttacctctgtggtgtcctggcgggcatcgcgtgtggatacttgatcctcaaggctacgtttcagcgacccacggaactgatcgcaacgtctgtacaagtcgtggggctcagtggtcctctcggtgcatttctagcggcatggggcgggctagcgatgttgacctctgcaccgttcgataactggtggcataacgcctatgggctagatgtgaagattgtcagcccccctcatactttgttgatactgggcgatgtagcgatcgaggctggggcattgctactcgctatgtcggccttgaaccgagccgaaggccagccaatactcttttcgcgattgcgaaagctggtactgtacctctccagtgttctgctcatgtccgtcatgtttttctgtatggagttcacgcgcgacgtcctccttcatacctctctcccctacgttgctctaagcatcggcgttccggtgtgttttgccgcaacgtcgcgagcttctcgatacaaatgggcagccacatcgatcgcggccctctacattgcgtccgtcattgcattcatcttgatcctgccgctatttccggcggaaccgaaactgggacccgtctatcagccggtcacacatttcgtccctccacaatttcctatgcttctgcttgttccagcgatgctgctggatcttttctggacgaaaataggaagtctcggcaagctgttggcatctgcgctgagcgggccactgtttgtcttaagcctgctggccgttgagtggccttttgctagctttctcatgacccccgcatccaacaaccgattcttcgccacaggttctcaccccttctccgtacctccctgggcaccagtcgtgctccgccaattcattcgcggcgatcagccttccatgcttataagaggtctaggaatggcgacagtgtgtgccgcgatcagcgtgtggcttggactaaccgttggtgactggatgcgaaagatacagcgatgaagagatggaaatggttgctttgtatcttggtgctggcttcagcgacatccggatacgcccatgtgggtagccccgacgtttacgctgaaggacaagcaggcgcctacaaaatgttggtcgtgctccgcccaccgctcgtaatccctggcgttgcagagattgaagtacgaacggaatcgcctgt

SEQ ID NO: 1608 - DNA, 8721 bp, synthetic construct
  source 1..8721: mol_type = other DNA
  misc_feature 1..8721: note = Synthetic
ccacaatcgcgccctagcgtaaagcgcaggcggaccaaggatgaaagcccgcatatattatactgtattttccgggaaatcaagcaaaattttgaccggatgcggcggcgcctaacccaaatatttcgcgtggttcaagtagttcagcagaatctttgtccggctgaattgcggattcggcccgcgtttctgtatagtgtatgcccagttatgacataattggcgcaggcgttcatcgtttctcgcacccgactgaaattgtagtatcatgttgatagcttggccgagattaacggtaaagcttaatcggtaattagtatcggatataaagtttttcttatccgtttttgccgcccgtataggtttcaatgaattgctttttgaattccgcaaaccggccggactctatcgcggcgcggattccgcgcatcaggtcttgatagaaccagaggttatgctgggtcagcagcatcgcccccagaatctcgtcagatttcaccaggtgatgaatatacgcgcgggataaattcccctccctgggaggggtgccgcgctggtattgcgcggcggggtgggtgttacccccctcggcgccgatacaaggcgccacccccccgttgggggggaaacggcatgccggacacccgcattccggatccagcgggcccgcgtcatcacggaattttgcgttgcgcatgttcagcgtgccgcgccgggtaaatgcctgggccgtgcggccggcgcgcgtgggcatgacgcagtcaaacatgtcaattccgcgctctaccgcgccgagtatgtcaatcggcgttccaacgcccatcagataccgcggccggtcggcgggcagggcgggcgcggttttcgcgattatatcaaacattacgtcttgcggttcccctaccgccagcccgcctatggcgtatccgtcaaagcctatgccggtcagcgccgccgccgatcgcgcgcgcaaatccggctgatccgccccctggacaatgccgaaaattccatacccgggccggtcggtaaaggcgtcgcgcgatcgccgcgcccagcgggtgaccatgtctacatttttatctactcgcgcgcgcggcgcgggcaatttcaagcactcgtccaacaccatagtaatattggaatccagctgatgctgaatctgaactgatttttcgggggtcaggaaatgctttattccgccgtcaatgtgggacgtgaattccacgccttgttcggacattttcgccaactctgaaagggacatcacctgaaacccgccggaatcagttaaaatcggcccgcgccagccggaaaatttatgcagcccgcccatctgttccaccaaatccccgccggggcgcagcatcaggtgataagtattccccagaatcacctctgtccccgtggccgcgaccatatccattgtcagggctttgacggttgcggcggttccgacggccataaaggccggcgtctggaaagttccgtgcgcggtttctaccgcgcccctccgcgcggttccatcggctgcgataagattgaattttaatgacatgcgcggattatatccgctgtgcgcggaaatgcaacgaaaaaacgaacaccgaagtgtccgttttaatggtggataatccttattaacagctggacatttaatccctattaaaaattcagatgctgaattttccactgcgaaaagtatcgcatatcatcgcgcgaaagtcaaattaaaatttgatttataaataaatgtctgtaaacttgtagttaagtaataaaggaaggtgtcggcatgaaatacaaacttggactggacctgggctctacatcgctcggctgggcggcggtggaattggatgacaacgacaacataatcggcctgcttgacctgggcgtgcggatatttcccgacggccgcgacgatcagaaaaaggaaatcagcaatgcggcaaaacgttcatctgccgcccagatgcgagttcaatttgacagaaaaatagaacgccgcgaaaaactattgaaaattctacaaggaaatgggtttttaccaaaagatgaaaaagagctaaaatatcttttggatcctgaaaaaggcaatagtggattgacggatccatattatttgcgcgacaaggcaagtcgcgaagaagtcagtttgtatgaacttgggcgcgtattttggcatctttccaaacatcgcggattttccggcaagaaagaccaggacatagataaccatgcagacagagatgcgaagaactcaaaagatacggcagatgctacggaaacagaaaaagaggccaaatcagtaaatgccaggattgataaattgcgcggagaaattctttccgccgattacaagacgctggggcagtatttatacgctcggcaacaagaagggaaaaaactcagtttcaaggggctcaaaaaagaagacggcagcggcgatcaaagcggttttatggacgggtttccaagccgacagctgtatattgaagagttcaattatatttgggatatgcaaaaaagatttcactcggagttaactgatgaattaaaaactcaactgcaagataaagtaatttattaccaacggcccttaaagcaaaaagaacctgggaaatgtaaatttaccggaagggatagaatcgcaaaatgccagcctttgtatcaagaattccgcatctggcaagatattaacaatttaaagattggcggcggatcactttccgaaggtcagcgcgatgccgtctttaacttattaaacgatccggctaagtttggcgacgtggctgacgccgccgacaaagtttcatttgacctcatataccacgtggtttccggccgtcccgatgatgctgaattcaatccggatcgtccgagattcaatctggaagaaggcggccgcaagggcttgctttgcaacaagactaatttggtcatgtcaaaactgcttggtgcaaaatggaaccccaacgctgataactataaagttattgaaaagctgaccgcttattatgagtccaggtcagaaaccgaaagatttatacgtcaggacatgggaattaccgatgattctctgatgaaaaaattattaaagctgaagttgccgaaaggatacggagagctttctggcgaagccatcggcaagattttgccgcttattaggcagggaaaaagatacgatgaagcggccgcagaaatatttggctctcattcagctttgcgtccttacctggtcggcggatataatccgcccgcgcaactgccaccttatcaaattctatttcctgaatctttgaccaatggaaagatcggtaatgttacggttcatattgggcttaaccaaatacgcttgatagttaatgaactgataaaaaaatacaacggtcatcccagtgaaataaatattgaaatggcgcgcgatttgaaaatggggcaaaaggcgtatgccgaatacaggcgaaaacaatcgcaaaacgaagacatgaatatgcgcgcgcgtttggccataaaagaagcaaagggcgatgccgattatgaaccgaccgccacggacatggagaaatacagggtttggttcaacctgaatccatttgacgccaaaaaaaggtatgattattacaatgattcagaaatgccgacaataccgttagtagccgctttgacttccgaatacgagatagaccatataatcccacgcgcgcttggcggagatgacacctggtgcaacaaaatattgaccaaggctgtctctaatcgcgccaaaggcgatcggacaccggcacagtatctttccgaacgccaattggcgcgcgcgaaattttgggccgaagaactggataagataaatgaagcgcggcgtagcaagaaaactaaatatgatgcatcggccaagaaagctaagaaaaaggataaagagaaagagttcaaatttttctcacttgcgtggcgttttgaaccgggtgcggaagagaagtgccagaaccgtgggttcaagtcgcgcgatttgaacgatacgcggtatatgtcgaaattggcgcgggattacctgtcttatatatgctctggctttacgcgcggcgcagagaaagggcatcgcaccccgaaagtgcttgccagcaacggcgccttgaccgatttgttcaaatctgtctggggggttaacgagacattgccgatggattatatgtattggaatatacaaaagtggcagcgcgatttgatggcggaaaagataaaagagaaacttatggccgggccggattcggataaatacaatatggccagcaaaggaaaagatgaatccaaagccgctaaaaagttgctaaacgatgatgtggaatcagaactggcaaaactttctgacaatgatttttataaaatatcttcgcgcaagaaagatcgcagcaaccattaccatcatgccttggacgcatttgttattgcatgcatgaataattcaatggcgaatgacataaactctatggccaatgaaattgaattggaaaacaggcgctataaccttgcgcatgatgacgaggctgaaaaagagactttgaatcaaacgcgcaaaagattaataaaaaataacggcaagttcaaaatcccgtttgatgggtttgatatggggaagcttaaagcaaaaatgaagaacataattatttctgaaaaacagtctccggataaattaaagcaagcattggaatcagaaaataagccaacagaaactttcccaaatgggcgcagtctggaacaaatcagtttttctggcgttacaaaggacactgctttcggcttggcggatacattccttaataataagagagaattacaattgaagttaaagcattttgacggcaagaaaaataaaatagaggtatcctcatttgattctatggttcctgtattcaataaaaagcatttagaatacagaaatctcaaggcaagatatatatccgcctatgcagaatataagaaaaatccgaaaaatgaagacaatatcaaaacgctatgtgaatccatagcaaaagacaaagttttcaaatggcttgccagcgaaggaaactatgcggcagagatttacgaaaccggaaaaaatggcagggaaaaatggaatgtagaagttatgtcaaactggtgggcccttcagcggcgtggtagattcttttggtgtgattcagagcctagctcaaaatttattatgaggttgagaatcggggatatcgtgcgtgcaacatttaagaaaggtgacaaatcaattctgcctaatatgaaggaatgggtggaatctcaaatcggcgacaatgaagatgctgacattttattccgtgtaaaaaaagccagtggatataacgtataccttaccccaattcacgtagcgcaacaggatggagatacaaaggcttggcaggcaagtgctacgacgttaaaagcggcaaacgtaagaaaggtaacaatatctcccctgggagaattaaaataacatcaactggtttggcatttcggccagacgcgccggccccgcggtcttgtccagatgtattatgtccccgaactgtgtgtctgtaaaaaacagtatattaacatcgccggtcgttgggttattgttctttaccattcgcacatatttttgcgagttctcgcgcgtgccggtaaagcgcatgtaaaccgagaactgcgccatagaaaatccggcgtccaacaagaaattgcggaatcgcgacgcctcgtggcgatctctctttgtttccgtcggcaaatcaaacatcaccatcatccacatatatttcaatccttgggccttagaaaacatctttgttcaccatagtttgggtgtagctcagcaagttcttcttttcttttattgattgaaccaggttccatatgtcgcgctgcataatcatgtaaagcggtgaatttccgccggtttgattaggcagctcccagtggacgcacccggccagcactttcttctcatccggtcccagaatacggtcgggattgtctgtcccggcgaacaattgccaaaccagcatgtcaaccagcgggcggtaaggctctatcacatcatctaccaaacagaatgggttcagcatgttatgatgctgcagcccaagcgaggggttcagcccggcggcgacaaccattcgcgccaaagtcccgcggagcacggcatagccatagttcagaaaggcattaattccaggccttgtgggctggcgcaggaaatccgcgccgaatagggccggaaaatatgcccgcgccgcgcgcgcttctacgtttgttttgtcgccagacatgactaaatcgggcagggcccggattccattattgcaattcaaggcatccaaaacgcgcgattggtttttgattttctcacgaacgattgtcgcccatagttgcttttgaattggttttgacaacgcgatttgggcctgctgaatttccgtttgtctttgttgcccgacgaaagaaagcaatattccattcggatgatagttatcgccaactattatgaccggaatgccttcgtcgcaaagccgcgacaaggcattgttggtccagacaatcgcccgccccgtcgccattaccgcgccaatatcgtccagcggcacgtccgataagatttctccgccggacttgatgcgtaaaaatccgcggtaaacagatatttcacgattatcgttgaaaacttcaattatgttcatcatttaatataataatacaccgcatatattatttgtcaagtgtatttttagtaaaatatagtagtgaacttagaatgtgtttaagcaaaaattaaaatttattttataaaaaccgggcttagagtaaataaattatagaaaaaaatagattaaaacgaatcgttttcgcaataaatttaaccatttttattataatacgccggtaaaaaccccttgaaaatcaaggggtttttaccggcgtattataacgcatagggattaaatgtccagccgcaacgcaatagtccaggttacatctatgccggagattataacgcatagggattaaatgtccagccgcaactgccgccgcgctggacttcggatgaacgccattataacgcatagggattaaatgtccagccgcaactggtgggttccgtaagggacatacgcaaagattataacgcatagggattaaatgtccagccgcaaccgggagagcaatctatcattccatatcgccaattataacgcatagggattaaatgtccagccgcaacatttgcccgctatggattatcaggcacagcattataacgcatagggattaaatgtccagccgcaactcaacagagctctcaatggtaggtaaattcattataacgcatagggattaaatgtccagccgcaacaagctgattggcgtgcagatggacgccatgattataacgcatagggattaaatgtccagccgcaaccggaacaatgcttgtataaaatttgtgaaactaatcttttctaaataatagacagcaatcgccataactgaaaaagcgatagttttccgcgatggcgtgcgcgtatgcggccttcatttccggcaatccggcaaatgcggccaccagcataaagagcgttgatttcggcaaatgaaagttggtcagcaacacatccacaatcccgaatttatacccgggcgtgatgaaaatatccgtatcgccgcaaaatggagcgaccaggttccatcgcgtctcccccatcttgggggggggcggcgtgcttgtatcgcacgccggagggggggcttgttcgctatctgaaccagggccccctctcggccgctccgcggctcctgcccccttgtggggcgggatagaatcacttggcaacttgtcgcttagtgattcttgggtgggggtaatcgccgcgctttccaacagacgcagcgacgtggtgccgatcgcgaacacccgtccgccgcgcgcatgcgcggcgtttatgatgtcggcttgttcggatgtgatgacgccccactcgctgtgcatcttgtgaccgtcggtgtcggcggatttcatgggcgcccatgttcccgcgccaacgtgcaaagtgatgtttacaacgtctgcgccggcatcgtgtattgcggcaatcagttccggcgtaaagtgcagtcccgcggtcggtgcggccatgctgcccaatgggtcggcgtataccgtctgataccgctcgcggtcggatgaatctgggtctcgcttcatataagggggcaggggcatcttgccgacccgatccagaacgcgaaataattcttcgtccccgaacgggaattgaatcagcaatccgctgtcgtcgtttttttcaatgacggttattttatcatcgttttcgtaaccgcttatttgcagggtttccccgacgcgcagtttttgaaatttctttgcgaatccccaccaccgattttgcccgcgacttgtcgcggctgcaaaatcgagtgccccacgtagccttggcgaagtggggccgccaacttttgtatgcagcgtgatttcgtattccgcaccatccgcggcggtcgcaataaaccgcgcggggataacccgcgaattattgaacaccaccacatccccggggcacaggtatgaaataaagtcagcgatatgcttgtctgcaaacaggtgagagtacgtctcccccccgtagggggggagtggctcggcgccgcttgcggcgacggccgaggggg

SEQ ID NO: 1609 - DNA, 23294 bp, synthetic construct
  source 1..23294: mol_type = other DNA
  misc_feature 1..23294: note = Synthetic
ggcgcacgaccggatgcggaacgtcggcatggccaagctacgcttcggcatttgcggcctgggatgcatggggcgggggcatttcgcgcggctttacaagaacccgcgcgcgcaggtcacggccgtttgcgatcagaacgaagcccggcggcgtggcgactggaacgatgaactcggcaacatcgaccttgttcggagccgcggcggccgtgcgccgctggagggcgtggcccaatacgccgcgcctgcggagctgattgcggacccgaacgtggacgctgtgctgattgcgctgccgaccgtgtttcacgcggacgtggcggtgcaggccctcgaggccggcaaacacgtgctgtgcgacaagccgatggcgctgcggccggccgactgcgaccggatgatccgggcggctgagagttcggggcgccgcctcatggtggcacaatgtctgcgcttctggccgcagtacgtgctgatcaaggacctggtggacggcggacgcgtcggtcgggtccgccatgcggtgctgcggcgcgtcggcagcccgcccacgtactccgcgggcaactggctgctgaaagccgagcagagcgggggggcgctgctcgacctgcatgtgcacgacatcgactttgcgcactatctcctgggcgtcccggcgaccatctacgcgcggggggcggtcgggccgtccaacggcatcgatcacgtcgtcgccctgtactcatacgacgacggccggttcgccgtgctcgaaggcggctggtggcgggcgccgacctgcccgttcgacatggagatcctcgtgcgtggggaggagggtacactgcactggcggtcatcggcgggcaacgacgtgcagctgcaccgcccgggcggccggactgagactttgaccgccgccggtgacgcgatagacgcggagcacgagtactttctcgacgcggtgttgaacgatcgccccgtggagcgctgctccccgcaatccacgcggatcagtgtcgtcctggcctggctggagcgccgctcggttgaatcgggcatcgtggtgcacgtgggggagcgtcttcgggccgcttggtcggaagaaccgggtcgcgccagttaagggacagagcgcccgaaggtccggtaaagacggcacttgcggcagccgtttccggcgccggctcgggggcctttgactcaacgcctgcaatcccgaataacctggtgatgtgtaaacaggctgtcatcggggcgttggcgctggcgcttctggcgtgtcgtacgccgcagcccgcggtcatcgcggcgggcagggacggcgcgccggcggtgaacttggcgctcggcccgacagccgagcacgcgtggctagcaacggagctggcgtggcgttcaaattggccggccgtgcggctcggctatcgcttcgacgacgtgactctgtactacagcgtgctttacaacgagcactcgacgtacgaccgcagcggcagcctggtggacgcgcaggagtccgtgcggacgggcgtctggctgcggtaaggtcggccgggtgggacacggttgcagcgatgctctgcggaatcgtccgcacgtgagggcgaggcgactgaacgcgctgtcgaccgggtggagtttgcggcggcgcgcgtgattggttcgaggtttcaggcgctacgccgagcgcagggtcggcggctgggaaagctctgaggagagtagcatgaagcgggtcttgttgggtgcagtaatggtgacggcggtcctggccggcttgacggtgggctgcggaaccgtgagcggcgccgcgatggatgcgtactggatcaacgcgctttacaaccagcagaacggcggtgccgggctggtcagcccgggtcccgcagggccggcggggccgcaggggcccgcggggccgcagggtccggccgggccgccgggtccgccgggtgaaccgggtgcggccggccctgcgggttcgcagggcccggcgggacctcaggggcctgcggggcctcagggcccggcggggccgcaaggtccggcgggacctcaggggcctgcggggcctcagggcccggcggggccgggcggggtgatcgtgcggggccgtgtcgactcggccggcgtgacgacgggcggatcgccggaagtgtcgtcgtcgctgctcagcaccggcaagtatcgagttgtggtcacccttccggagagctttgactccggcccgccgctctcgcacttcgacttcccgatcctcgtgacgcccgaggcactgcccttggggggcgaactgtcggaagtgccgctggtcgcgaccgtgaacccgctccaatacaacgacactaacagtaatggcttgcgggaccagatcgtcatggaggtttacttgcggcgcctcctgccgagcatccagttcgtgaacgccccgttcagcctggcggtgctggagccgtaacgcggtttcgaccaaatcgccggtacggttttttccattgggcggtgccactcgtactcagagtggcgccgcttttctcttttcgcaggctgtgggtggctcagaggctgtagatggccgacgaagccgcggtaacccgcgacgcgaagcgttttgatcagtcgccccgcggggatatctcgtctccgataaactgctctctttcgacgcggcgattctgaagtctggccgcacgcgcggcagcgcctcaggccgagcggcagggtcgagccttcggcgcggcgatccccttgatgaccttccctttgccggctcgccgagctcgaggctcagttggtggagattgccgggcggccgagcatcggtttgccgggtccgcagagtcccccagggccgcagggccccgcgggcgcgcccggtccgcagggcccgcccgggcgtccagggcctgaaggcgcacagggcccgcccgggcagaacggtcaagacggccaagatttgacgggcgtctcagcgcgtgcgcaggttgggccggacggaagcacgctcggaggccggggaataacttcgaggcgattctttcccggcgagtacctgctggtggctgacatcccggaggcgctcgatccgggtaacccgagcgtggatgaattgtcctttcctgtggtcgtaacaccgtgggaattcaagatcatcggcgaaatcccggcgatcatgatcgtgtcagtcgaaccgattgggtacattgacaaagatcccaacgggctccgtgacacgctcggcgtctgggtgtacagccgcaagatctggcccggcgagccgagatgctgtgggacaacggattcggagtgctggtgcttgggccgtagggctgcggaagacagccactcggggcgatagcgacggcggcggactgcgaacgcagacgccgccgtttcgttttttccgccgtaacgtggagtggccagggacgttccgaggctggagagggggccagcggccgaagcgtccgttagtgccatagcccaaccgaccagccggggacgaacctgattccgtcggattccatcggaagcgatggcgaagaggtaatgattgcgggtctgtgcttatcgtgctcacgcaccggattctattggacttgcttcaactcatccgtttctccgttatgggtccccgagagatcggaatcgaatcgcggacgcaagggattaatggaggcgtattctcgggaacgcttccggatcgaagcagtggggacgtgaggcgtgtactggccgggttcgcaccccttcttggggcgctagtgtggggatgtggttgcgcggcgctcgactcgaacagcaactcagactttcaggtcgaagtcgagaggccggagccgccgacgaccgaagtggccggctgacaatccggcgaccgtgaccgggccggcggggccacggggagcataaggcccgccgggtaccgaggggccgcgagggccgcaaggcgataagggcgagccgggtaacccaggacgcgatctagcgggcctgatcgctagggcccagatcgacgcgagcggttccaacgtcagcggggcagcgaacatcacgagttcgcgccgcgcgcgaagcgcacacagcgtggttgtgaggctcccggagacgctcgacaccggcgccagcacgcgcgactactacgacttcccggtgcaggtggcagcctgagagctgccgatcagcgatgaggttcgggcaactatgctgggatcattcgagccgtacgcgcacgaggacacagacaggcagcggcctgcgagattgattgacgatcagggtgtacaaccgtcgcatcttgacggggccgccggagctttgggacggggcttcggcgtggttgggttggagccctagcagctcgctcagggccggccccgctgcgccggtgggtgcggggtgggcactgggacgacctccgcatcggtcgacgcaccgggtggcccgtgctaccgcgctgtgttacggggcgcggcggtaaacgaacaccggcttattggcccaggcgatgcgtgccggaggcttatgtggtggaaactgtgcgacgaggcggtacgctccggcgtcgatccaccactcgcgcgcgcgggcggccgcgtcgtccgcagtaaacacgacccactcggggagcgcggcgggctccagcccggccggccgctcgcgcggcagcaggatgatttccgtacgggtgaaatctaatgggggtacggcgtagggcgcaggctcctgaaggaccccgacgcgggccccgacgtcgggcaggaccccacggaggaaatgaccggctgctcgtcgcgactcgtgttccccggcggcatccgcggcaaaggcgctgaggtaggtcggcgtcttcgtggttcccaggagtgccacggcgagggcgaacgccagcaccggccggcggcgcgccaggagcatgacggcggccgcggcacagacgcacaggacaatcgcaggaagaagcaggaagcgtgcgtactccgccggcttgcccgcgccgaggagcgttgcgagtgccaggagagccagcgcgggaggggcgacggccgcgaccgggcggctgccgaccaagaggagcactccgcccacgagaccaacgatcgccgtgagcgcgccgatcgcctcggggagcaactgtgcgacccgcagcgcgccggccggagcccgcgcgatctgatcgcggtacatcgccaggctgttggcgaggttgctttctaaagcggggccgccccgtgcggcgtgccagacgaggtaaggattggccgccgcgtatacgctgagggccaacccgccggcccacgcgatcgtgcgccgcggaatgcggcggtagagggccagcggcaggaatagaagcagggcggcgaggccggtcaacacgaaggcgaacgcgccgccggcgctgagcgcaagacgcacgaaatcccgcgttcgacggttgcgcaggacatcgagggctgccagcatcgcccagagaatgagcgtggccgacggcagatggggcttggcctcgagcgtggccgtgatgaagaccggggccgcggcggtgaggatggcggccagccacccggcgcggcggccggccgcccgcgtggccaggcggaacacggcgacgagcgtcagcgcgccggccagcaaggaaagcgagcgggcggcgacgtagaagccggcgaaggcttccggccgggcgaggtagtacgtgacgtcggaggtgaggtgcaggaggccggcgacgctcgccgcgagcagggttgcgccgacgaggtagatgtaagccccgccgtattgatagaggcgggggtcgaagtcgagccggcgcgggtccatccgctgcagggcccgtaaggtgatcatctcatcgggttgccgcgagtagagtcgatagcggcggaggatttcgccgcgcgccgcctcgttgggggtcaggttgatgaggtggtcgcgctgaatgatgggattgaggtccgtgtcggccccggtggagcgtcgccgcagcgcttcgacgtccgcggcgatgccgtagtggtcgggctgccacggagggctcccgccgaaaagcagttcgtcgtggcgcgcggagggcagaccccatagcgccaagggggccatgatcaccagccaaagcaccagcgccgcgactcccgtcgcgcggcgtcggcggcgacgggactccaaagcgctcatgtcagcagcacatccgcaatgccgagcaggcccaggaccagcccgacgactccgttgatcgtgaagaaggcgaggttgacgcggctcagatcgtgcggccgcacgagcatattctcgatcagcagcagcgcggcgccgcagccgacgccgacaaagtacaacattccgagttgcgcggtgaggccgacggcgatgagcgcacagaccgccgcgacatgggcggcgcgggccagccagagggccggcgcgacgccgagccgggccggcaggctgtgcaggccgtgtgcccggtcgaactcggtgtcctgacaggcgtaaatgatgtcgaacccgccgacccaggtcacgacggcgagcgcgagccagagcgtcggccagccgagcgtgtgcggggcgacggcgatccaagccgcgaggggcgccacccccagcgccgcccccaacaggaagtgcgaccaggccgtgaaacgtttggtgtatgaataaaagcacagccacgcgagaacgaccggagccagcaggaggggccagcggttgccgctcagccaccagaacccggcggcaccgaggtggaagaggatggctgcggccgcgaagaagccccaggcggcgcgagccgagatccgcccagcgggcaaggcgcggttggcggtccgcgggttgagggcgtcgtagcgccggtcgacgagacggttgaaagtcatggccgcgctgcgcgccgcgaccatgcagacaagaacgaggagaagctcgagcggtgtcgggcgggccgggcgggccgcgaggaaggtcgccaggagggcgaacgggagcgcgaagacggagtgactgaacttgatcatctcgccccaggtccgcgcggtggccgctagcccggacatcgctcaatcctccgggaggggggcggccccggccgggtcccagcggatcgccagacggtggggaatcccaagcaggtccaacacacggccgaccacgaagtcgacgaggtcctccacccgctgcggtcgcaggtagaacccggggcaggcggggcagatgactgcgccggcctggctggcgcggagcatgttggcgatctcaatctgagagagcggcatctcgcgcgggacgaggatcaggcggcgggcttccttcagcgtgaccatcgcggcgcgggcgacgagatcgtccgccgtgccggccgcaaccgcggcgagggtgttgctgctgcacgggcagatgaccatcccgtgcgtgaggaacgagccactggcgatgcgggcgccctgatcgcggtgggggtagagggtcacgttcgccgcggggcgtccgagcagctcggggacggccgggcgacggatgcccagctcctcggtcaggatgcgggcgccgtgaggcgacacgacgaggtgaacgtgcgtgtcgctgtccgcaaggcattggagcaggcggcgggcgtagggcgctccgctggcgccagtgatgccgaggacgacatgcttcatggggactccgctgggagatgatagcgcggttcgctgatgcggaggagttcggcggcctggcgggcccacacgctgtggggggcgcgttcgatgatggtgtgcaatcgggcgcggccggcggcgcggcgctgggggtcgcccgggccggactggtgcagttcgaggtccgcgagctggaacagcgcctccggcgcggcgtctccgttggggaagcgggccaagcaggccgtcaaccgctccgcccgcagctcccgctcgcgggtcgccgcggcccggcggacctcaagattgtcctccagcagactgccggcgaacgtcgcggcgaggtgggcgagctgagcggcgtacagtgggcggtgcgggtcgagctgggccagggcctggagcggggcgaccccgaaacgcggatcgtcgcggttcgcgaggatcagctcgcgcaagcgctcgacctccaacaagtacggctccgggtcgaagtcgagactggcctctggcgggcgactgtacagcagccgccgcatggacggctcacgcggcaccggcggagggggcggcacggcggacgcagcggcgagctcggccagcgcgccgtcggcgtcgccacggcgcaagcggagctgtgccagccggagccgccccgcgaccgccagcggcgagtccggatactgagtgaccaggttgatccacgccggctcggactgggcgtgtgggaagtccgtgtagagctcccgctgggcgtcgggaccgaccagccggcgctcgtccatccgggtgtccagcgcgcgggcctggatgtaaaggacgcacgggacataccggctgcgggggaagtcggcgatgaacgcgcggcaggcctcgtacgcctcgcggcggtcggtcagcaactcgagcacgagcgggcggaggatgcggcgcttgagggcgtccagctcggacggctgcgcactccagacggtcagcagggcggcgcggagcggttcgcggtcgatgcccggctgggtccagcgatgcagcaggtcaaggatgcggttggcggcgtcttgcacgggctcgaagcgggcggaacgggggccgtattcggcctccagcaggcgataccgcagctcgtccgcgccgacgtacacgtgaaagagcacggccggcgtggcgaacatgaccgccatgaccggcgcgacgccgtcggggcggtagttcaccaggcgcgcaatgaagatgatcagcgccagcatggtgcaggcgccgaggatgcccagcagccacggtccgattagcaggagcttgagctccggcgacgtgctgaccgcgggtacgttcggcccgccgcgggtggcgagatagagatacagcagcacgggcagcaggcccaccagcgccgacgcgtagcggaacgagagccgaaacggccggaccgcggccaggatgcagctccccaacagggtgatcgccagccacggagtgtgcgcgaagatgagcaccgccgccacgaacggcagcgcgctgctgaagcggtagagaatggcaaccgagatcggaacggccaccgtcgcggccagcagcagcccgagcacgatcccgtatacgggggtttgcacgacgctaatggggaagaggacgaaatcggtgaggttctgcgtctgcggtccccagaaccggaacggctcgacgtacgacgaccagcggaaatcgaacgcgcgggcgaagtgcagccagtggatgaagacgcagagtccggcgtacagcgtgaggttgagcagcaggagaaggcgggcccgcacgcggtacttgcgtgcggtccaggaccagacgtcggtgatcggctcggcgtgggggcggacgggcggcactgtcgcggtcggccccggcccccgggccacgggggcagcgcgggccagcggatcggcgcagcgttcgctcatcgggcgtaaatgctactgctggggcggggaagtgcaattcagcccggcggcgggcggggcgttcgaggcggggacttgagactcacagcgcgcgcccgggggcctggacggatttctagcttatcaagtctgtcctgtgcgaggtgtgttcaggtcggcggcagagggccgggtaaggttcgcacggaagagcccgcgcggcagcgggaaaatcgggcggcggctcatcgcaggggacgtacgacacggtcgccgccccgaacgaatcctcgactgccaccaatggtgccgaccgagccaaacgatcggaccgttgcggggcactcccgacgctcaggcttggcgtaaatccccgtcgcggaatcaacgaccagggcggcgcaaaaaaagggaccgggccaatggccgggtctccggtcgctccgcggagcggtggcctgcgaatctttcgtctgtgttgcgaaaaactgcaagccggggtcgattacactacttgaagcttgcgcgcttccgcgtatcctgtcaagtgcacaactcgaaaaaaagcgtgcggggttcgcgatggcaaacctgacgttggggttggacctgggaccgacttcactcggctgggcgttgttggacgaggagggcggtcggattgtcgccgctggcgtgcgcgtcttccccgagggggtcgaccgggacagcaacggcgcggaggtctcgaagatgcagcaacggcgtctcgcccgcgccatgcggcgccagatcgcccgccgggcccgccgcaaacgccggctgcgtcgcgccctcgtcgacgccgggctgctgccggaggtggcgctgctcccgcgcaccgacccgcaacgcagcgcctgggaggattccgcgttccacgcggcggacccctacgagcttcgggctcgcgctctgaccacgcgcctcgagccctacgagctgggccgcgtgttcctgcatctggcgcaacgccgcggcttcaaatcgaatcgcaaggcggatcgggcccagcgcaaggagcgttcgcagatcctcgaagaaatcagcaccctggcgcgcgacctgaacggccgcacgctcggccagtatctggccaagctccgcggcaccgacccaaagtgctatcacaaagagcggctccgcggtcggtacacgcagcgcgacatgtacgagcacgagttcgatcgcatttgggccgcacaggcgccgcatcatccgacgctactcaccgacgagcgtcgcaaagagctcaaagacgtgattttctttcagcgcaacctccgccccccgtctcctgcgctggtcgggcgctgcgagctcgaaccgcggctgccgcgctgcccgcgggccgaccgccgggcgcagaaattccggctctaccaggaggtcaacaacctgcgcctgatcgactcgaccgcgggcgtcgagcgcgccctcacgccggacgagcgccagcgggccctcgatctgctccgccggaaaaaggattgcgagttcaaggagctcgccaagctgctgttccccgagcacccggacaacatccgtttcaacctccagcgcggcgaccgcgagaagctcaagggcctcccaatcgatgccgagctcgccaaaaagaagttcatcggcaaggcctggcacagccttcccgaggaagtcaaagaccgcatcgtagcctccatcgtgcatcctgcgacgccgcccaaaaagggccccgacagaaaagaggaccagaacccgaccccgagcaacggaaaggaggaccacgacccgccccagaaggtcgatcccgaagtcgagcacctgaagcacgtgttggagaaggccgggctcgatcccgacctcgcgccgcggctgctggacgagctgccgctcgagtcgggctacgccagttacagcgtgcacgcgatcaagcggctgctgccgcacctggaagcgggtctgccgctgaccagtcgcgacccgcagacgccctgcgcgctgcgggccgccggctacctcatgccctgggagcatgtcgcccagcggcgaccgatgctcccggagccgccgcaggtcaccaatccgctcgtccgccaggccctgcatgaggtccgcaaggtcgtcaacgccgtcctgcgcgagctcgtctatcgcgccggccacaccctcgcgcgaattcacatcgagctggcccgcgaggtgcgcggcaccgcccgcgagcgcgcccagcgggcccgcgaaatgcgcgagcgcgaggagctgcgcaatcaggccgccgagcgcgtccgcgaacagggcgtccggccgacgcgcgacgcgatcgaccgctacctcctgtgggaggagcagggccgcgtctgcatctactccggtcggcccatcagcctcgcgcagcttttcggcggtgaggtcgacgtggaccacatcctgccttactcccgcagcctcgacaactcgctgatgaatcgcgtcctggccttccgcgccgagaacgccgcgaaaggcgaccgcacacctcacgagtggctcgccgccaccgatccgcagaaatgggagcaggtccagcaacgggcccggcacctgccgtaccccaagtaccgccgcttcctccagcgggacgtgagcctcgacgactttttcgcccgtcagttcgtcgacacggcctacatcgccacgcaggtccatcagtacgtgcgctgtctgggcgccgatgtcgtctgttccaagggtcagcacaccgccgagctgcgctggcagtggggcctcgatacgatcctcgccgaactgcccgacagccccgcgaacgacgccgcggccgacctcccgctgggcgagaaaaaccgggccgaccatcgccatcacgcgatcgacgccatcgtgatcgcgctcaacggccgcaagcggctccagcagctcgccgccctccgccgcgccgggggcactgccgccacgggcgagatcctgccggagccctggccgaacttccgggccgccgtgcgcgccgcggtcgaaagcatcaacgtctcccaccggccgcgccgccgtgtcagcggccggctgcatgaggaaacgctctacggcccgacccagacgcccggcgagttcgtcgttcgcaagccgctcacggagctgtcgctgtccgaggtggagcggatccgcgaccccgcgatccgccgcctcgtgaccgcacggctgcaagagttcggcctcgaccccggccgcgccaagggcggcaagatttcaccggcggtctgggcccggccgctctgcatgccctctggtgtgccgatccggcgcgtccgggtcatcaagaaggatcagaccatcacgccgatccgcggcgggaccgcatgggtcaagccgggcaacgtgcaccacgtcgagatctttgagttccaccagggctcgcggacgttccggcggggccgcttcgtctcgctgctggaagccacccagcgcctccgggcccgtcagccgatcgtgcagcgcacctggcccgagcaccccgacgcccggttcgtcatgtcgctgtgcacgggtgatatggtcctggctcgatgggacggtagcgagcgattggtgttggtaagcaccctggtttcgacccaggagagaatccacattgttgacgcccgtgatgcgcgcccgtcgtcgaagcggtgcgacgtcggcaagactccaaacagcctccaagccatcaaggtgaccgtcgatccgatcggccgcatccgccgcgccggcgattgaacctccgcccgtacccggccgataggcccgatatcggggggccgggtacaaacgtgatccgacggacgcttgaaatttcgcaacagccggtccatctcaccgtccgcgacgggcaactcgtccttctgccgcgcgaccacggcgtctcgcctgctaggacccgcacggccgagcgcctggcctccgttcccgccgaggacgtgggcctggtgctggtggaccagcccgccacgacctacagtcatgcggcgctgacgacactgctggagcacgacgcggccgtggtcgtttgcgggcgcaaccacctgccggccgggctgctgctgcccttcggcgagcattcgcaggtcgtgtggcgcctccgtgcgcaagtggcggcccgacggccgctgcgcaagcgcctctggcggcagatcgtgcaggccaagattcgggcgcaggcccgcaacttggcccgcgggaccgcggtccgcacccgactgctggccctggcgcggacggtgcgctcgggcgacccggagaatgccgaggcacaggccgcccgggcgtactggggcgtgctgttcaccggcgtcggctgggcggacgcgacgccgttccgacgcgacccggacggcccgccgcccaacgggctgctcaactacggttacgccgtgctgcgggcggccgtcgcccgggccgtcgtcggcgccggcctgctgccggccatcggcctgcggcacgcgaaccggtccaacgccttctgcctggccgacgacctggtcgagccgctgcggccgctggtggaccgcgccgcgcgggagctgtgggccgcgggcgaagtcgaggtcacgccggcggcgaaacgggtgctgttggagctgctgaccgcggaggtcgagtgcggcgggctgcgggggccgctgatggtggcgctgcaccgctatgcggcgtcgttggtggagtgcctcgagggacaggcgcaagcgctgcgcatacccgtagccgtcgacgagccggaattgtcggcgggcgaggcggacccggagagctgagcggtgaacctgagcggatatcgctggatgtgggtggtggcgatgttcgacctgccggtggacacgaaggaggcccgccgggcgtacgcgcagttccggaaaagcctcttgaaggacggtttctcccgcctgcaatattcggtgtatgcccggcactgtgccagcgaggagaacgcggccgtgcatatcgcacgggtggaggcggcgctgccggatgacggcgaagtgcgggtcatcacgattaccgataagcagtttgagcggatgcgcgttttctgggggaaaatgcgacgggcgcccgaaaaggcgcccacgcaactcctgcttttctgactccgaaatgtccgaagtccttttttgctcgaaggttggcggggtgctagtgtaatcgaccccggcctgcgagcaatccgcaacgggaaagtccctatgtaccaaggcaagtcagtgtaatcgaccccggcctgcgagcaatccgcaacgcgcgcagcgcgccgaagatgctctgcccagtgtaatcgaccccggcctgcgagcaatccgcaacccgccagcggcttcgcgcccgcggccagtcagtgtaatcgaccccggcctgcgagcaatccgcaacgtcgtcggccattccgcacctccatgcgggagtgtaatcgaccccggcctgcgagcaatccgcaacatgcgggcatgccactgctgccaccccagcagtgtaatcgaccccggcctgcgagcaatccgcaacggcgaccacgacgcacgcatcgacacgcgcagtgtaatcgaccccggcctgcgagcaatccgcaacttcacggcccgaacgatgcgccgatgcgccagtgtaatcgaccccggcctgcgagcaatccgcaacgctcgtgggcggacgcaatttgcccggcgaagtgtaatcgaccccggcctgcgagcaatccgcaactggcgacgcacattgaacttgcggtgcgcgagtgtaatcgaccccggcctgcgagcaatccgcaaccgacgcgagagcacgctctcgtagatcgccagtgtaatcgaccccggcctgcgagcaatccgcaaccgtgcgggcattgcgggcgacgccgccgccagtgtaatcgaccccggcctgcgagcaatccgcaacagccagcgggcatcattcagctcgccggtgagtgtaatcgaccccggcctgcgagcaatccgcaaccgcgatgcgagaatgcgcgccacctgctgcagtgtaatcgaccccggcctgcgagcaatccgcaacacgccacccagtgcaacagtcgcttgccgaagtgtaatcgaccccggcctgcgagcaatccgcaacagcgggcaatggcggaattctgcgagctggagtgtaatcgaccccggcctgcgagcaatccgcaactccatcgacacgatgtcgcgcagccgccccagtgtaatcgaccccggcctgcgagcaatccgcaacccgggaagtacctcgcggtcatcaccgccaagtgtaatcgaccccggcctgcgagcaatccgcaacgaagctcagcgcgaccttggctgcgctggcagtgtaatcgaccccggcctgcgagcaatccgcaaccccagcggtgctcgccctcgattgccgactagtgtaatcgaccccggcctgcgagcaatccgcaacgggccgcaggctcaggcggtgctgcggccgagtgtaatcgaccccggcctgcgagcaatccgcaacgcaacgtcacgctggccgtcggcgtcggggagtgtaatcgaccccggcctgcgagcaatccgcaaccccgcgcggcgtggccgcgaccatcgcctcagtgtaatcgaccccggcctgcgagcaatccgcaaccacgggcgctcgatcgacgcacccgctggcagtgtaatcgaccccggcctgcgagcaatccgcaactgccggacagtcagtccgcgcgcacgcgatagtgtaatcgaccccggcctgcgagcaatccgcatccgccccggtcggcattcgcgtccacgcccttagcggccgctgaggctcggttgttggtccggctcagcgcggtgttgcctgtcgctgcggctccacctgtgggtcggtcggtgctggagagacgtgcttttcggctcggcactgcgcggcctgacgatccgccggaccatcagcgcgcctgtactagcaactgccgcaccagcggctgcacggcggggcgcagggctgcggccgtctcgcggctcgccagctcgcgcacgcgggcggtcgtcgtgcgcagttgtgcgacgtcgagcagcgcggagcggctcctttggaggcgcatggcgcgcgaaacaccgtagcgggcgagcgcgtcgtcgattcgatctaaggcgtgcagcgcctgcgcgcgtgccgcagcacgctggccggctgtacgctccgcattgtcgaacgtggcgaccgccgccatcaggttgccggcctcgagccgcaggcgcgcgtgcagttcgtccgaaggtgggaagtagctgtagaggctcatcacgcagcacgcaaccgctgcgccgccgagcactgcgcgcaccgccgactgcgagcagcgaggctcgccgagccacggcctcggatcgcccggcgcggcaaccgtgcgacgtgaccgcacagctcgttcgagcaggccggccgaggctagcagcaccagcacggccagcgcggcgagaccgcctgggccggtgcgccgccactcggccaccacggccgctgcgggcgcgcggttgtcgaggtggtaaggccgggtcaacaggtcgaaagcgtgggagtccggctcaccgtcgccggcgggacgcggcagagcgtcggcggcggccacggctcccagcgcaagggccagccatgtgagcgcggcgaccgcgcccgcgcggcccagccgctggaggcaccacgcgagcgttcccagattccaggccgcaccgaggaggaatgtcagcaggatgtcacccgccggcaggccgatgcggcggaactcgccggctagaacgaccgtcaggtccgggtcgggggtggccagcgcgagcggcacggccaggccgggctgcgtcgccgggccgggcgcggtaagccggtcctcgatcgcgcccggcggcaggacgcaggccagcgcggcagacgcgccgatcgccagaaagatttggacggcccacgaaccggcgctgtgattcgccgccgcccggaacaggacgagcagtggcgaggccgcggttcgcggagcgggcggggcggagccgcacaacgcggcgctggttcgcgccgtgtcggtccgtgcggcatcggtcggggcggtaccgacgggaagagcgccgccgggcggcgactcgcccgatgccgcgctcgtcggcagcggttccgttcgcacggactcaccgggggcggcgcgcgtccgcgggcgtgtgccgcgggcctggtccgcccacagggccgcaagccccgccgacagccccacgaggaggcacacagacaagacgaggcccgtgctgagcaggcccagccggtcggcggcgtggccgaacgaccacggcatgaacagcggcgcggtgaccaggaaacaaaccacggcggccgggcgaatgcgggcgcgcagcatctcgtccgcgatcggcagcgcgcccagagcggtcaccggcgtgaggagtcccaagacagccgcgcggagcatcgcgcgaggcgccgccgtgtccaggcaggcgcgcaaccagccgtgcgccgcgggagtgcgcagccagccggccaggagcactccggcgagcagtccgggggcgcccagcaggaggtactggccgaaccgcaggaggaaggtccaggcgtagagtgctgccgcggcttccgcagggttgaggtcggacgacggcgtcatgaagcggagtcccgacggtttccggccgtatcggcgcgtgaagggagctccgtcggcacgggaacctgcgcgaggacgcgctgggcgagatcatcgcccgccgccgacgcggcggcgacatggatgcttagcaggggggcggcgacggcctggatgtcgtcgggggtgacgaaggagcgccgcgagaggaacgcgcgggcctgcgcgagccgctgccacatgagcagggcgcgcgggctcagaccgtgctggaactgcgggtccgcgcgggtcgcggtcgccaacgccacgaggtagcgctgcaaggctgcggcgacgggcaaccgggcgacgagggcctggaggtgccggagctggcccggctcgaagatcggtggccgggggtcggtctcggcggagcccccgactgcggccgccagcatctgcacctcgtcctccggcgcggggtagccgatgctgagcttgagggcgaagcgatcgagctgcgcctccggcagcgggtaggtgccgtggtgctcgatcgggttctgcgtggcgatcacgaagaattcggggctcagggagtagcgctcgttgtcgacggtgacctgccgttcggccatcgcctcgagcagcgcgctctgggcccgcggcgtggcccgattgatctcgtccgccaacagcacgtcacagaagaccgggccgggtacgaactcgaactcgcgcagcttctgattgaacagtttgaagcccgtaatgtcgctgggcagcaggtccggcgtgcattgcaggcgagcgaaccttccgccgatggccgacgcgagcgtccgcgccagggtggttttgcccagccccggcagatcctcaagcagaatatggccgcgggccaagaggcccgtcaggacatgttccaccaccggctgctttccgcgcagggccgcgttcaaccggtcgcgcagttgcgacaggcggtcgaaaagccgcgcagcggcggcccccgcgttgttctccatgccggccccgacggcgacctgccgatcgttggccatcagatgctcccccgggtcgcggggaccccgtcgagcgcagcggcccggcgtcgtccgggatgcgccgtcaccggtgacgaggacgcgagcaccgcgcggagcctcgcgaccgccgtcgcccggatcgccccgcgacacgcgtcaagcagcgccgcggaggacgccgcccggttcgacccggtgtcaccgtatagggcgtcgtaaagcaacccgaggtacgtgcggcacgccgggtcgtccacggcctgataccaggcgagcggcgtggtgccggccggtcgcggacgaccgctcaagcggctgcgcaagtcgagcagacgcagcgtgtcggcgagccgttgctcggccccccgcagcggccaccacagacaccagagggtcaacaaacgctcgcgcacccacccgcgacggcaccacaggacgacgctcagcacgccgcctaccaggaacagcagcaggttttcccgaaggacctcacggagtgcggcggccgcgaccgccaggtgctcgcgccaggtcggctcgtaccacgcgattcggtagcccggggtcgggtcgagcgtcacccacgtgccgtcggcggcgcgcacctcgatccagaagtgagcgtcggcggcgcggacgggcgtaaggcccgcgcgggcgtcatagtcgtcaggcccggcatagaagcctgacaccacgcgcgtcgggtagccgagactgcgcagcgcgagcgcggccgcggtggcgaactgatacgcgggcccgccgcgcgagtggtgcaggaaatggtggatcgggtcggagcaggtcggcgggatggtggcgtcccgatcgtgcgcgtagtgcgttcgcagatgctcgaggagggcgttgacctgttcccagccgcgcggcaggtgagcgaaaatgtgggccagcgccgcggcactggggcgcagatggatgggaacatccaggcacggatcgtccgccgccgtggtgaggcgcaacgagtcgggccgagccagcctctggcggtcgaccgcccgcgactcgacctccaggtacgtgccggagggaagacgcggccgcgcgcggaggagcccgtcgtggacccacgccagaacctcccgtgcccaccgctccaggctgtccccgccgtgccgcccgaaccggacccgcagcgggtgactgggcagcggcaggcgctcggacatcagaaggccgagtcgcagccggtggtgccgcgtgccgcagaggagctcggcggcgtgccggtggggcagccacagccaggagaaatcgggcgcgcgggtctccgccggacacgcgatcggctgctccggcagttcgcaccaccgcacgccgtcgaagtgcacgtacacgcacaacgcaagatgaaccggcaggcggccctccacatacagcagcgccccgtccgcccggcacgggggcgtccgatccccggcccgcccgcgtcggtagatcgagaaccgtcggccctcggcgcccgagtcgggggccttgtggcccggctggctcagcatctgctccggatcaacaaagatcgcccgctggagctcgtgcggcttgcgagactcgccgtacgcctccgtgagcacgtcgtagatcgtcgagaggtcggactcgaggaaataatccgagtcgatcgcgcccgtgcttcgggctcgtgggccgctgatgacccactctccgtcaccgatcccgagcagcgcggccggatgggcccagcgacttccgccggacgatggaagccactccccccagatgtcgggcaggccctgcgccagccgcgtcgatgcggccgtgacgccggccaacgtcagcgccgcgccgagcacgggcaccatcgggagccgcgtcgtcacgccgttccgggcagcggaagccacgccatgccaatggcggatcgccagccaggcgacgcccagccccccgtacgccgccgccagcggaacgatcgccgggtgctcacccaacatccgcgccgcgagcagcaggacgaacgacacagcggcggccgccgccgtgctgcgcggcacgcgagcaaccgcgagagcgaagaacgcgaaatgggtcagcgcggtgatggagacctgctccagcggccggaaataggtcgtggcgaggatgcgagccgcgctcatggcaaaaggcgtcccgaccagcagcacccccaccaggatccccagcggcgagagggagtgtccccggggggtccgacgcgtgaaccagccggcccgggcggcgagggccccgaccattatcgtggccgccacgtaagcgatgagcctcagtgccggatgaaaccatggcgttcccggttcggtgatcgccagtcgggcggccagcgcggccacggcgacaagcagaaccgtgagcagccacgaactcggcgtccgcacctcaagccacattggcgagcccccctcggagtcgcgcgagtgcggccggcacgttctccggccgctcgatcacgatgacgtcacggccgagccgcggcggcgggcgcggcacgccgccgaagccgccgctgcgcaggaggaaaccgcgccacgcgcggcaagccggctcccgtcgctcggcccagccgagatcggtgctgacgaaaaccgtggccaactcgctgggcggtggcggggcgcagcggtcggcaggcaccaagtcggcctccgccaacgcatcgagcactcggcgtcgatgagcctggccggcggccggcggcagccgtaaagccccggccgtcagctccacctccgcgccatcgtccagccagcgagcagccagactggccgcgatgcgcaccgcccactcgaacgagccttgggctcccgcgccgacgtggacgtccgcgttgcagtccagaacgatacgaacccgtggaatcccgttcgcgcggaactcgcgaaccatgaaccgcgcgtggcgcgccgtctgcggccagtggatccagcgcatcgggtctccccggcggtactcgcgaacgccgaccgtgtctcccgcgaacgtgcccacgcggcgcgtctcaatatgtcccgcggctccctcactccgcgcccaatccggcacaggtgcggccgggaatacgcgtggccagacgacgagaggggccgcggccgacacgcggcgagccgcgcgcaccaaccccaccgggaaaccgctctggagcgtgggcggccagcggggaaagacgccccgttgttccgcctgtacggaaaacgacgtgacggacgtggtgaaaggacgtagtttcgggagcagaagtcggttttccgcgtcgaccaccagttccagcccccacgccggccagggtccgcggtaggctacgcggagggcgacctgcacacgttctccagcgaaaatccggtccctcctgaaacgcagctcgccgcggacgagcaggatggtcagccacggccagacccagcctagcgcgaccagcagccccatcgccggcagcagcagcagcagtcgggggtgcaacgtccagccgacgacggcgacgaaacagacggccagcaggaggccgacgcccaaggcgtcgcggccgcaggcgcgtcgcaaccaggcgagtaccaggtggagtgggaagacgcgtacgcggctcatacgctcgacggttgaaaacccacggcggcggcgcgcccttacgacggtgagctgcacgcggcgcaggaaccgtacagcacgatgtcgtggcccctcaggcgaaacccgcggggcaccagccgcttgagaccctcgacacagccctgcagatcgaacacggagttgcaacggcggcaccggaagtgatggtggtgtcgctcggctgcggaccggagctcgtaccgggggggctcgccgggcagctcgaccggctgaacggccccctcggccaccagccgcttgagcgtgcggtataccgtcgcgagattcagcgtgcggacgcgctgccgcgcgccgtccaggatctcctgcgggctcagcggccgccccgccccgtccagcgcggcgcgaatcgcccgatgttgctgcgtctgacgctgcatgtcgcgctccgtgtgcgccgacagccgcc

SEQ ID NO: 1610 - DNA, 22979 bp, synthetic construct
  source 1..22979: mol_type = other DNA
  misc_feature 1..22979: note = Synthetic
gacgacgacaaataatgcgatggccaacgaataggacacccggaaacccaaaaattcaaaccagacgcccgatccgatcatcatgaattgtggcggcaagccgatcaccggcgcggcgttggtgatatagcgcgccagaccacgatagatcatcatgaaacccagcgtaacgatgaaactaggaatgccaaagcgtacgacgatgaatccggcgacgcttcccgcaatggcgccggacagaatcacgatcagaacaaacaatccgccgcagaccagccaccacgcaatctgaccgggaaacagatccggaaaaggagtcaacaggaaaccggcggcatgggtgagcatgttcagtcccgcttccggatcgatttgcaaggtaaaagcagtaatcattccgcataaagcgagcaacgatcccaccgaaagatcgatttctgccgcgcaaatgacgaatgtcattcccgtagcaatgatgatattgacagaggattgaatcagaatattggaaaagttgtcttttgtaaaaaagatatccgattgcacggcaaaaaagaggcagagcaagccaaaaatgacgccgatgccgaacgtgtcaatcaagcgatagagtgttttcatggttgcatcacggatcatgggtttgtgcttaaacaagttgttgttcgataggccattaaagccgggtctgggggtacgggtctagggtccaggatcgaaaaaatgaacgggcgaataatcagtcgccgccgtagaaataataccttgatgcaaactcctctcgtcagttttgaataagattctaccattatggaatcgggtatcgtatgataaaaaagaaaggaatgctatcatgaaagaaaggagatcacaaattttcaattcgctaatataatccggggcaatatgtatccggcgcgagcatagtgaatcattctccatgaattcacagcaaaggaggttctatgatgaaagacttactaccccgttcggatgcggatatttcaagtaaaccaacacggcgtcagttcgtcaaacatgcaaccgcccaagtcggcgcgatgttgacgacgcccgcactgttatccacgtcctcgcctggccgtgggaacgcggaatccgttgatcaagaacagaaggatatgccgattggaaaaatcggcgatctgtccatcagtcgtttaatctgcggcagcaattccgcccacggacggcatccactgcgcgtttgaacagggagcagatttcatctgtttgggcatgttcgattttcaagtgacggaggatgcaatcatgaccaaacggttcattgccgaagcgaaacatcgcaagcgttcttgggcgacataaaatccgggtatcgcacaatactccgggtttgtgtgaaagtggatataatatcaatacattttttctataggttgcaatcatggattttgacaaccgtttttacagcaatattttggaaaacctgcacgaaggcgtttattacgtcgatcacaaccgcaaaattttgtattggaacaacgcggcagagcggataaccggttattccaaaaaggaagtggaggggcatcgatgcagcgacaacatcctcgtccatgtgaacggcgaggggaaaaatatttgccactccgactgtccgttatccaactccatgcgagaagagaaatttgaaagcactacaatttatctccatcacaaggatggacatcgcgtaccggtagccgttcgcgccacaccgatacacaattcggaaggaatgattttgggagcggtcgagatattttcagaaaatatggaaaaagtcagcgaccaggaaaaaatcaaggagctggcaaaactggcctatctcgacgaattgaccggcctgccgaataaaaactatttgaatatgaaacgaaagtccattcatgcggagatagaagaaacgcagcagatgtatgggatcatcatgatcagaatcaagaattacgattccattaccgaaaaacatggcctacacattacggaaaaaatgttgaaggtgattacgaaaacgttgttgaatatcaccccatcttcctgctcgatgggacgatgggacgaaaccgcttttctgtgcctgtttccaaactcaacgcaggaccagacgttgatattagaaaaacggtatcgtggactggtcgagaaaacatcattggatttgggcaagaataattttttgcaaattataaccgcaagcaaagcccttctctccaaaaccggggaaaacgaagccgagaccttgcagcgattcctgcttgcgccatttcggtaaatcgaatttccgattggatcgcaatcgcccatcttcttcactttttttcatttccccaatggtttcttgatccgcgccacctttatgccataatagttccatccttcatttgaatcacttgatttggaaagggaatgggatgaaatgatcaacaaagcctttactctcatcgaattactgatcgtcgtcgccattatcggcatcctggcggcgattgccgtgcccaattttttgaatgcgcagctgcgggcgaaaatcgccaatgcggtttccgacatgcgcagcatcgatacggcgctggagatgtataaattggataaaaacatatatccgccctggcaggacgcgaatggaaccaaccgcaatcccgtcaatcgccgtttggttccattgaccacgccgattgcgtatatgtcttccgttccacaggatcctttcatctacggaccgccgggaacccgggtggacgaaaatcaacacgtagcatatgtaacctatgattacgtggatgcgtgggcgctggtgcatttcagcggcgccacgatgttggggaattcatttcgttgttcggaatggcgtatagccagcgccggtcccgacggaaccatgacgttcggctccgttcccagtttcgacgccaccaacggcttgaaaagctggggggatatcgtgcgaaccggcccccgcacgtctgttccctgcgacgactcattggtcgggaagtaaatcatcacgcatccgaaatgttttcccagcgcaagtccaatttgcgcgcggcgtatcccacctctttcaaatagtcgccatagaccatcatccaatgcgaatcacgcacttcgctgatgagttttttccattggccttgaatccgcacgtcctgctgcgaacggcagatggaaaagaagggattatcttcgacgttgccgcgaaaaccgagccagcgtcctttggtgtattcgggatcgataaacgtcacttcctgcccgatggggatttcgactttcggcgcggcgccgtattcggattcttcgtgcgtgagaaggatggtcggctcgtaatgaatcccgtccatgcggcggggcgcggagcaatgggcgcaggtcacgatgccgttatgcgggaaggtggaattgtgcaaaaacaccggctttccggaaatatgccgcaataaaattcccgccgggataatgacgaagtcggattcacagaacgccagcagaccttcgtcgttgagcaggccgagagtgagacaagccgtcgtttgcgaaatggggagaatcgtgctcatgcattccttgatggtgaaaacaggagtgctgtgttcccgcataaggtctttaaagatttcgtagagaagaaacgcattgacgacgaacggtctgtctgtttgtaaggtggtattgggaagcgtcaaatacaattccgtccatttctcggctcgcgccatccgtttttcgtccgccatggcgttcttgatgagaggctccaggttgtcgtaaccgatttcaatcaggtccattttgaatcgatcccgcgcgatttgcggcgcgtcggcggcgtatttgccccatacgccgccgacggcgacgatttttgtgccgacgaaatttttcaagccgtaaagcgcgcgcagacgccacattacctcgtcatactcatcgacgacgacatcatccacgtgcacgttgggaagcctcggcgtggagccggattcctccttgtccgtcgccaggtacgccacgctgagcgcctcgtaccaataatagatcggtccggagcgatggcgcacaaaaatgatggtttccccctccgccggtacgcaggattgcagcacgcttcccgaaccggacgcgggataaatcaaaaccacgtccgcgtcgtgcttgtgcgcttgtttggcttcttcactcgttttcacttttacgggcggaagaatttcaagcggaaactcggctttttcggacagcgtggccaattccttggcaattcgttccgattcttccgcggcggcggcttccgtcaagacgtcaccccacgatttccacgatcgcatgggctgcggttgcggtacggtatacatcagaatgggttgaacgcgcagggggcggccccagatcaaaaaatcatgttgtggattccaatcgtcgagaaaaatccggcgttcctccgcttgctcatgaatggccgcccaaatgttggcaggagcgaaccagccaagagccgccgccaaacacgcgctctgtcggagaaacgatcgccgcggatagaaatgttcgtttgggatttccccttgcgttgctttccgcgatttcactgatgtttctgtcatggtattcatcctttctaaaaaaacgcctggttttgttcggatcaatcaatattggttccagtttcttatttccgtggagggaaactcatgaaaattggtttgaccgggcgtgccgcctcgatgttgactggctcgccagttttgaggatcgtcattgtcgagcgtgggatcggacagcgaaagcgaatatccatatccggcggcaagcgtcggccagggatcgaatcgctcatatgccaccgcattgacaagttgtccaaagcggtcaaccagccggatttcttcaccggcattgtcgagtctgccatccttccactcaaaaacgttgatctccaagtcagtataatgattcggattctgcgtcaagagtaggtattcacgtgggaatatccaggttctttccggaaacgtaaacgatatgcccttggtaaacgaataaccggaaagatcgacaatggcattgcccgcattgaataactcgatgaattctccaccttctgcgttttgcaatgcgtcgggatgatagtgaatttcattgatcacgatggagtttccttcttcaaaatacgcaatcaggtgagattcgtccgcaacgaaggtcgtaatggaatcgatcgccgcgttgctgagtccttcccaaccgacgaagcgataacccggcttcggacaggctttggcatgaatcggcatttccggataaaaccgggccggcaaataattatcagtttgcggaacgtcttccacataaatccatcccattccctcctccgcaacgacgagagaacaatcgaccagcgctttcaacgaaaattttccgacgagatgtcgttccaacgcgcgcaggcggtagcgaccaaaggagatcattttcccgatttcggtattccaggcgttcatcgacgagggatatttccaccgggcgatatgaccgggcatttccggcgcgatcgcgctcttgtattgttcgatcagattcaacactcgctccggcgagaacgtgctgttcatgcagctcgcaaagcgttgaataaacgtattccgaaattcctcacttttaagcaaggtgcgaaacaagaacgtggaccacggcggattgggccaactcggaccattcgttgccgcggcgaactcgatggtattatgcgacaagccgccttcttttaaattgaagccgaaatcggtatcgaaaacaatccagcgccaacgtccattttctgttttgggacgccagaattttatattattgccgggccagtcggtgttggaaaaatagatttgcgcaatttgataattgatgaattcatccatatccatcaacgtttttacgtacgtataattttccggtttgctcatgtcgttgcggttaagaaaggaatacatgcggttataatgcgtgacgtcgcccgccaggaccacgcgatctctttccagcaaatcaatctgatccttaccgtaatcataattgttttggagatacgattcgttgattttttcgcgaaggttatgaatcccccaatagtctccgttgatgtatacaatcgccgggcgataggcctgcagatcgagatccatctgccctttgaccaatccctgcatcaagccgtcgcgaaacatcgtcgaatggttgtcgttgccggaattccgcaaaacgaatgacgtgaatttcgtgatcgccttgtccggaaagatgggatagtcgatctccttgacgccatacttgcttctgacataaatagccagcgacttttcgtcgaaggttcgactgcatcaaccgaaaattttcgttccggcgtcaaggtggaatcccaatgcgccgtcggattcgaaaaattcaagatgaatgggacgctcccaatcctgattccagtttttgcgtgtatccgagcagtaaccggtgacgccgtttttaccggttacgtaaatcccgatctgatcatcccaaaaattagccggcgctgtcgcaatcgaaaccaccggcaaggtgtgagacgcgctgatgaagtacgttttcgttatcgtttcgctcggcagccgatccggttcgaatgcgcgcgcacggatgacggtggtagtaaaaagccgaatcggttgttcgtataaagtggattcgcgcatggggatggatccatccagcgtatatcggatttccgtattcgggaaaagggaggcaagttcgacgataactcttctttcgtaaaaaccggcgggaacggaaaatcgcggcggctgcgcgcgaaccggccagggaattccatccatcggattggcggacgcgggagtcggatccgaaaaatagacccagttcgaactcccatcgggttggcggccatacgagatgtccggaaattgccggtgataatacaccgtattgattctctcgccgtcaggcgaaaccaaactcaccatttcattctgcggtttcaatgcaaattcgacatgaccacgtatgcgttgcccgtccgcccaaatgaggagacattgctttggctcgatgacggtacgtgtcaggattctcgcttgttgaagattggcaggatcgtcgctcaagtaacaaccgcgcagatcaatgctgcggtcgccggcgttgtacaactcgatccaatccgaaaaattattccggttcggctccaaatacgtcgaggcgttggacgcgagaatttcattgatacaaatgccgtcgtattccgcagcgatcacatcgaaaaatatcgttattaaaaaaatgcaggataggcatgccggtttcattgttttcaattccatttcgtacataactttagaacgttgtcgcgcaatggtaaagatttcgctctcatcggcgcggatgggaagccgcccgtttgggtgaagggtctcgcacgaaacgatcggctgtgaatgttgacacatccgtgatttccattcatcgtataattcggtggattgtggattgtgtatggatggaacaaattcggagccgggacgccaaaaaccggccaaaaggggagaataaattccggcaatatcgattcatgtaaaatccctgcgcacgatttcattccggcctgattgatccgacgaaaaaggagtgtatggatgatacataaaaccgtaaaattacagacgacaatggttttgattttaatttattttccggctgcgctttccgtccattctcaagacgcggcgcttctgcgtgaccactatcgccttccttacaaccatcccgatctgatcgtggatctgggtgtggggatttgggcgattccgtttccctgtgattgggacggcgacggcgtgcgcgacctgctggtcggctgcgaggatggttttttctacctgtttaaaagagattcgacgcagaccttactgggaacaaaataaatcacagcggtcaaagcacaaaacgagatcagccccaaacaggattctattgtttatcaaaaaagggcaaaccaaccgttcgccctttcgtatcgtttccttgcaagcgggacgcttgctttacccgcgttcgtttttaatggaattgaatcggaatttccttgatcttgccggtttccgttttcggcagatgcacggtcaggatgccgttgcggtattccgccgtcgcttgttccacgtcgacatagttcggcagctggacgctgcgttcgaaacttccataggaacgctccacccaacggtaattgcgctcctccattttcgcttcctgtttcttttcgccgcgaatccggagatacccattcttgaattcaacggaaaattcgtctttttccaacccgggcatttccgcatgaacgatgaacgcgtcgttcgtctcttcgatgtcgatggccggcgtaatggcggcaaactgcgtcatcgtcatatcctgcaaccaagccggcgtttccgcaaagaacggatcacgaaaacgtttccacatcgcatccaaatcgtttcgcaaggtggaaggaatcaggtgcaacattgtattttcctccatgtttttaatattgttcgtcggattacgagggagagcctggcggagccgatccggttcggctctccccgattcacttatccggcaattttcacttcgatctgccacggtttgacttgctcgactttgggcagatgaagatacaacacaccattcgacaattccgcggaaatcttatccacgtcaattttttcggacagttcgaactggcgatagaaattgaccagctcgaattcacggtaaatcggcgaaccgacgctttgcgactgcgtactggcttgcaacgtcaacatgccattttcgacgtccactttgacggaatccttgtcgctgcccggcaggtcggcgaccagcaccagtttgtctttctcttcgtatatatccacgggtggagcgacgtagtaggcatccgcccgcgtcgactcttttttcacgggagcagccgtttcttcctgtactgcgggaatcgttttttcgaccatgatcgtatacctccttcgcttagctgaccttcacggcaatggatttcggttttgcttcgtcggccttgggtaatgaaacacacagtactccatttttatattctgcctggacggcgccggcgttgaccggcgcaggcaactcgacagtgcggacaaaccggccggccgctcgttcgttgcggtgatatgcttccggtttcacgtttcccggcgtcgcggttttctcgccggacaaggtcaccgtgtttcccacgacggaaacattcaggtttttcggatcgatccccggcgccaaggcctccacatagaatttgtcggcgtcttcggaaagattgatgcggggatactggcgcgcggcgactcccggcaggaacgacaacggccatttctcccgccccgtggagggccacatccggttgaaaacctgatcgatttcacgacgaagctgttccatctctcgaaatgaattgaaccctaacatggctctgacctccatctgattttgaagtgtcggacttcaccggcgttggtttggaaatgcgcccgggagtccacttttctttagtaattctttttttacctgcaatttaatcaagtagcaggaatgatgccaaattcataaaatcaaaaaaatcagttggttatgtgaaaatatataagaatggacagtgcgcctttttggctcactggacacacaagcttcgtcgaatttgcagaaggattggacttgccggataaaatgttcgaaaaaataaatggccgccctgcaatgcatgacggccggtcgctccgtagagcgtcgcctgcgaatttttcgtcttgttacgaaaagatccacagattgagattgattacactacaattaagaatattaatcgattaaaattcattgtcaatccctgaaaccacatatccgggaggtaaatatgaaggcacactcaacgctgggaatcgatttgggatcgaactcgataggatgggcgctgctggacgagaaagacgggagagtgatcgcgaccggagtccgcgtttttccggaaggagtggatcgcgatcaacagggaggagaattatcgaaaaatgaaacccgtcgcacaaagcgaggagttcggcgtcagatcgccagacgctccggacggaaaagaaaactacgtgatgtattgattcaatcaggattatttccatgcgagacggattcgccccaatccgtattgcaatccaatccctatgaactgcgaaaacggggtttggatgagcaattaaagcccgaagaattcggacggggcctgattcatctcaatcaaaggcgtggatttcgttccaatcggaaaagcgaccaggcgaagaaaaatgaaaaatcgaaaaccctgcaagccatcagcgaactggagtcaaggattgcggagagcggatgtcgaacgttaggggaatatctttattccataactttacagggaaacggacctgctttcgaaaaaatacgtgctaaacatacccgtcgtgaaatgtatgaaaaggaatttgagttgctttggaatgcacaacagaaatataatccgcagctgtataacaatgaattgcgggaacgaatccatgacttgatcttttttcaacgatccatgtattggttgaaatcgaccatcgggaaatgtgaactcgaaaaaggtcagctccgttgtccacgggcagaccgtctggcgcaacgatttcgtctctggcaggagatcaataatttgcggtatatcgatccacgaaccaatgaagaacagggattgaccgatgaggaaaggcgggaactatttgatcaactttcgaacaaacgcgaaggtactttcgttcaaatccgcaagtggcttcatctttacgaaaattgcagtttcaattacgaacgaggggaacggcaaaaactaaaaggtctggaaacggagtatcttttgtcaaagaaagaacatttcggaaagaactggtttttattcctcagtgataagaaagacgaaatcattgccgctcttctcgatgaaaaaatcgacgatgaaaaaatacggcgaaaagccgttaccgattggggagtagatgaagaaaccgtcgaacgattgctagatatcaattttcccaaaggatatatgaattacagtcgcaaggcaatcgaaaagttgttgccgtttatggagcagggattgccgctcatggcgaaggatgaggagcaatcggcgcttcgggaagccgggtatctgcgtccggatcagcgggagaagccgatatgccattttttacccaagcctcctgatcttcccaatcccattgttcgccaggcattacacgaagcacaaaagttgatcaatgccatcatcagggagtatggaaaaccagatgcgattcatatcgaattgccgagagatgtcaaacgctccttccgcgaaagaaaggaaatcaacaaggaccagaaaaaacgagagaaaaaacgggaagaggccaaaacggaaatcgagcgctatggcgttcgtgccactcacgagaccatccagcgatatttgttatgggaagaacaaaaaagggaatgcatctattccggcaatccgatcagcatagcgcaattgctgggaggggaaacggacgtcgatcatattctaccctattcgcgcagcctggataattccatgatgaacaaggtggtctgctttcgaccggtcaatgcggaaaaaggaaacaaaacgccgagggaatggctggaagcgaccgatccggagcggtatgacgaaatcctgcagcgagccaaacggctgccgtgggggaaacagcgaaaatttttacaaaaaacggtggaactcgaggatttcatttcccggcaattgaatgatacggcctatgtcagcagagaagtaacaaaatatgtccgcaatctgaatgtcgatgtgatctgttcgaaggggcaaatcaccgccgatctgcggcaattgtggggactcaatacggtgttgcgggacgacggacgaggattgaagaatcgcgaggatcaccgccatcacgccgtggatgccatcgtcatcgccctgaccagccgctctcgccttcagcagctcgcccgctcccggacatatcattgggaacgtccggaatttcctgaaccgtgggaggattttcgcgcggaagtggagagaaaaatcaatgcgatttatgtgtcccatcgcgtccagaggaaaatcagaggcgcatttcacgaagaaacgatttacggacccacctccactcccggagaattcgtatatcgaaaaccgctcgaacagttgactccgaacatgataaacgacatccgtgatgaaacgatcagaaaacttgtccgcgaacatatcgagaaacatggagttgatttggcgaataccggttccatccccgccagcgtgtggaaagaaccgttggttatgccgtcctccggagttccgatcagaaaagtgcgtctgatcaagcgcgacaacacgatccaaccgattcgtgatcaaaccgcatgtgtcaaacccggcagtattcatcatttgtgcctctttgagatcccatcgtccgatggctccataaaacgggacgctgtatttgtatcaatgatcgaagccgcaaaacgagcgaaaaatcatgaaccgatcattcaaagaaaccatccaagaaatccggaagcgaaatttttattttcattaagtactaatgaaatggtcttaattaccgataaagaaaaagaggagttgattcgtttcgaaaccgctgcctcaacaagtcagcaaatgaaatttcggcatcatacatttgctggaaaaagttctgatagacgtgcaatcatcacgaaatacccaaatacgttagtagggaaaaaagtatcaattgatttacttggacggttgagatgggcgaatgattaaatgagaagtggggatctgcccatgatcaaaagaaccattgaaatctctaatcggcccgcgcatctaaaagtccgatacgatcagctaatcgtaaggcaggaggaaaacggagaagtcaaagaaacctccattccttgcgaggatatcggtgtgctagtcgtggatcagacggagacaacctatacccacaaagccctttccacgctgatggattccggcgcggcggtggttttgtgcgggcaaaaccatcttccggcgggaatgattttgcccatgaccgagcacagtgaagtggtatggcgtattcaggaacagatttccatcggcaaaccgctctgtaagcaactctggcaacagctggttcaggccaaggtatcggcgcaggcgagaaatctgatcgaaggaacccccgaacacaccaaattgctgcgactggagaaggaagtgcgttcgggggatccgagcaacatcgaggcgcaggcggcgaaggtatattggtccgcctggctgggagaggaggattcgtttcggagaaatccgcgagggaaagacggactgaacagtttactcaattatggatatgcgatcgtgcgggcgggaatcgcgcgggccatcgtcgccgccggattgttgccctccatcggcttgcatcactcccatcgctcaaacgccttttgtcttgccgacgacctgatcgaaccgctccgaccgctggtcgatgaacgggttcgcgaattgtaccgcaatggaacgaaacaaatcgaacctgcggcaaaaaaatttctcttggaattattaacgaaaaccgttaaacttgatgaacaaaaaggcccgctgctgattgcgtttcatcgcatggcggcctcgctggtgaattgtatcgaagggaaggaaaagaagctgttgattccggttgccgtcgatgaataaaaatcatgaaactcagtggataccgatgtatgtggatcgtagtgatgttcgacttgccaacggataccaaggcagcgcgccgccaatatacgcagtttcgcaagagcctgctcaaggacggtttcacgcagatgcagtattccgtttatatccggcattgtcccagcaaggaaaacacggtggttcatgccagccgcgtcaaaaaaaagttaccgccggacggggaagtgcgggtgttggccatcaccgacaaacagttcgaaaagatgcaagtttttttcggaaaaaggcgccgagaaacagaaaaagctccagtacaactggagcttttttgaccgggattgcgcctaacctgttgtcagaccgtcacttatgggaaggtgtagtgtaatcaatcccaatctgtgatcaatccgcaactcttcagtgctcaattgtacactttcaataagtgtaatcaatcccaatctgtgatcaatccgcaacaaggggatatgggagctttttacgagaagagtgtaatcaatcccaatctgtgatcaatccgcaactagcgtggtcagctctacaatatcccttagagtgtaatcaatcccaatctgtgatcaatccgcaacgctcctgtcgattaagccttgcgccttaagagtgtaatcaatcccaatctgtgatcaatccgcaacaggcgaaggcaaggcaaggcaaggcaaggcagtgtaatcaatcccaatctgtgatcaatccgcaactatataatctatccatatccgcatatggaagtgtaatcaatcccaatctgtgatcaatccgcaaccacctacatggagtttcgcgcaaaaatgaagtgtaatcaatcccaatctgtgatcaatccgcaacaatgaggtatccattccatggccacaatcaagtgtaatcaatcccaatctgtgatcaatccgcaacaattacagcattaatatattggagatatgagtgtaatcaatcccaatctgtgatcaatccgcaactcagacgtctcacgggaacgcagaaaagagagtgtaatcaatcccaatctgtgatcaatccgcaaccatgcgaatcgtttgtcacgagagcttggaagtgtaatcaatcccaatctgtgatcaatccgcaacaaagcatacactgaggctatggcacaaaacagtgtaatcaatcccaatctgtgatcaatccgcaacatgatgcttcccgcataaataaaaccatttagtgtaatcaatcccaatctgtgatcaatccgcaacaattgctagcgctaaactctttgactccacaagtgtaatcaatcccaatctgtgatcaatccgcaacagcgcttccgttcaccgtatgctcaatcgagtgtaatcaatcccaatctgtgatcaatccgcaactaatagcatcccgtgtaatcggaatgttcagtgtaatcaatcccaatctgtgatcaatccgcaacattgatccgcgagtgtgggcagcgtctccagtgtaatcaatcccaatctgtgatcaatccgcaacgggagaaggcatcagcgttccggattgccgagtgtaatcaatcccaatctgtgatcaatccgcaactgaacaggattaatgttcccggtggatggaagtgtaatcaatcccaatctgtgatcaatccgcaacaagacttgacacggcttcaacgcgatgcgctagtgtaatcaatcccaatctgtgatcaatccgcaaccttgaaagccccgccttcgcgccaatctcaaagtgtaatcaatcccaatctgtgatcaatccgcaactcaagaggcggcgtatgcagatgcttttgagtgtaatcaatcccaatctgtgatcaatccgcaacttcaccccacattggtcataccgcattgagagtgtaatcaatcccaatctgtgatcaatccgcaacttgacgccgcattgatcatatctcattgaagtgtaatcaatcccaatctgtgatcaatccgcaactgtagtattggaaataagcgcattcattcagtgtaatcaatcccaatctgtgatcaatccgcaacacaatgatgcaacctattcctggactgtcgaagtgtaatcaatcccaatctgtgatcaatccgcaacattcatgcagattggtccatcgccccaaatagtgtaatcaatcccaatctgtgatcaatccgcaacagccagtgcgactggttacataggaattccagtgtaatcaatcccaatctgtgatcaatccgcaacgccaacgtctggcgggcgataacttttcaagtgtaatcaatcccaatctgtgatcaatccgcaaccatgttgtttcagaccaattcggccacgtggagtgtaatcaatcccaatctgtgatcaatccgcaactgatcaaacagttgtatcgaaagaacacaagtgtaatcaatcccaatctgtgatcaatccgcaaccaggagcattactgaagacttcaacgattagtgtaatcaatcccaatctgtgatcaatccgcaactatattccggcaggcgcgacaacggagttaagtgtaatcaatcccaatctgtgatcaatccgcaacgcgctttgccaatcggtgatcgtggtatcagtgtaatcaatcccaatctgtgatcaatccgcaacactacatgaacgtcgtcaaccataattaaagtgtaatcaatcccaatctgtgatcaatccgcaacgggaaatagcccgctaactcattgaggttaagtgtaatcaatcccaatctgtgatcaatccgcaacctaaattggcgcggctgtagggccaccgccagtgtaatcaatcccaatctgtgatcaatccgcaacaccccgccatagatttgcagctcgacgtgcagtgtaatcaatcccaatctgtgatcaatccgcaacggaacctctattgtccctgtgggcaactctagtgtaatcaatcccaatctgtgatcaatccgcaacggctgggtaggccgggtaatctatggcccagtgtaatcaatcccaatctgtgatcaatccgcaaccgagagcgatctcggaggtctcccgaacgagtgtaatcaatcccaatctgtgatcaatccgcaactgcattcgtgcgttttgataattcgcggggagtgtaatcaatcccaatctgtgatcaatccgcaacaagactacgtccgatggttcaactcctatgagtgtaatcaatcccaatctgtgatcaatccgcaacgggttgaggaaaagggcggcggtccattttagtgtaatcaatcccaatctgtgatcaatccgcaacagaagatagcaaaggctacagactcattacagtgtaatcaatcccaatctgtgatcaatccgcaactccaccacaggttgagccgtctgcatttgtagtgtaatcaatcccaatctgtgatcaatccgcaactcttgcgcgtctgttgttaattgatgacaagtgtaatcaatcccaatctgtgatcaatccgcaacacagaggcgaacctcacagaggcggacatcagtgtaatcaatcccaatctgtgatcaatccgcaacggtaaccggggcgaacgcggggaaatataagtgtaatcaatcccaatctgtgatcaatccgcaacaattcattggattcaaacatttccttccgtagtgtaatcaatcccaatctgtgatcaatccgcaaccgagacggaatcgttcaaggccgcgttcgagtgtaatcaatcccaatctgtgatcaatccgcaacaacagccagcattgcatccggcgcggttacagtgtaatcaatcccaatctgtgatcaatccgcaacagtgcgccgatcgcggaagcgttacggatagtgtaatcaatcccaatctgtgatcaatccgcaacccaaggcatacacgcatcacgacggtccgagtgtaatcaatcccaatctgtgatcaatccgcaactactccacggtccccgtcgcgcctggcgggagtgtaatcaatcccaatctgtgatcaatccgcaacaaccggtcgaatgcgaagtggcaaagtatagtgtaatcaatcccaatctgtgatcaatccgcaacggtaaaatcaggtggcgcgcaggaaaggatagtgtaatcaatcccaatctgtgatcaatccgcaacattactccaccgatttgaaccgttgcgcgaagtgtaatcaatcccaatctgtgatcaatccgcaacatgcaacagacaaaccgggatgtcgcgcaaagtgtaatcaatcccaatctgtgatcaatccgcaacgaaggcgtgcaatcggtgaaaaccttaaaagtgtaatcaatcccaatctgtgatcaatccgcaactttcttgatctactacatttctgatgagaagtgtaatcaatcccaatctgtgatcaatccgcaacggcgaacacatggcatgaatacggaatccaagtgtaatcaatcccaatctgtgatcaatccgcaaccaagatgctgtgggcgaaatagcatcatggagtgtaatcaatcccaatctgtgatcaatccgcaactgggcaggggcgttggtgttcgggtagcgagtgtaatcaatcccaatctgtgatcaatccgcaactcagaatccatcgcgcctaaccgcttaccagtgtaatcaatcccaatctgtgatcaatccgcaacgggtgggggcaactgcgcgcggatcggagcagtgtaatcaatcccaatctgtgatcaatccgcaaccgacactcgatacactcgatgccacggaaaagtgtaatcaatcccaatctgtgatcaatccgcaactcggtgtattccggcaaaatgttcgaaacgagtgtaatcaatcccaatctgtgatcaatccgcaaccgcgcccggcccggcaagtaatccattttgagtgtaatcaatcccaatctgtgatcaatccgcaacacgccatgacaaaagttgagtatttaaaaagtgtaatcaatcccaatctgtgatcaatccgcaacaagtccaagtcaataattatctgatggccaagtgtaatcaatcccaatctgtgatcaatccgcaacacacttacgagactatagtcgcataagtgagtgtaatcaatcccaatctgtgatcaatccgcaacgcagcatgtggcgttggaatctacggcataagtgtaatcaatcccaatctgtgatcaatccgcaacggtggacggcaagggacgagcggacttgtagtgtaatcaatcccaatctgtgatcaatccgcaaccattgcgctccagccgataggtccgaaattagtgtaatcaatcccaatctgtgatcaatccgcaacgaaaattgacgcggttgaagaatgaccgtagtgtaatcaatcccaatctgtgatcaatccgcaactacccaaacggttcgccttctcaaacagaagtgtaatcaatcccaatctgtgatcaatccgcaacgcggcaaggttgccatcgcgtcgataaccagtgtaatcaatcctgtcacccgccgcgctattctgacccaccaggagtcacccagtttgacccgtctatgatcggccagtgtgacccccctaaggttacccaatatgacccgtgtaggttgccctggaaagatagacaggagagatcaaagatttcctatcgtgagatagggaggaaagaatgaagaggctccatatgaatgaagtgcgagaaatcatttatcgattgcgtcagaaagaaggcaatcgaacgatagcgaaagccatgaagatatccaagaccacggtgaagaaatatcgccggctcgccagccggcatggatatctcgacccggcaaggccgctgccaagcatcgaggaattggggcgcgtgatccacccgccgtcccatccccggcagatgcgcagtacggtcgagccctacgagacgatcgtgcgcaagtggttgcaggatgaggtggaaatgcaggcgatctggcagcggctgagcgaagaccacgggtattcgggtagttattcgtccgtgcgaaggtacattcatcggattcagccaacggaaccggaagcgacctgccggatcgaaacggccccgggtgaggaagcgcaagtggatttcggcagcgcgggtctgcaatgggattcgcgaacggggaaacggcgaaaggcgtggatgttcgtcatgatgttgtcctggtcgcggcatcagtatgtcgaattcgtcttcgatcaaaaggttcccacgtaggtggcctgccatgaacacgccttcgactggttcggcggtgtggtcaagcgggtggtgatcgacaacgtaaaagcaggtgtgctgaagaccgatttacacgatccggtgttgggggaaccctaccggcggttggcgcaacactacggattcgtggcgtcgcccaatcgtccacgaacgccccggcacaaaggaaaagtcgaatcgggagtgcattatgtcaaacgaaatttcattgccggacgcacgtttgccgacctggagagcctgaatgaacggggaaaacgttgggtgatggagaccacggggcaacggattcacgggaccaccaaggaagcgccgttgggccggttccaccgccaggaacaagcctccttgcaagcgctgccggtgagggaatttgaatggatcgccacctatcaagccaaggtgcagcgcgattgtcacgtgaatgtggaaagccgctattactccgcgcccttccgcttgatcggaaaacaagtggatgtgtatgtcggacgccgtttggtcgagatgtatgtcggaaccgagttggtggcgactcatccgcgagtcaaggaaaaaggcggacgcgccactcgtctggaacattatccggaagcgaagcgggaatggttggccaatccgccggagcggtgtcgggaacgcgcccaggccattggaaattcatgtgccaaagtggtggacgccttgttggatgatccgattcaggaccggcggcgcagtgcgcaatctctcttgcggtggagtgaaacggtgagcaccgaacgcttggaaaacgcctgtcggcgtgcgttgcactatggggatccttcctcccggcgggtgaagaaaatcctggacgccgggttggatcgcgtgccgattgagcgtgaatatcccaaagggatccccctggcatcttaccgcttcgcgcggccggcttcgacgttcttcggaaaggaggccccctcatgttgacgcactcgctgattccaaaattgcgaacgctcaaattgtccggcatggcggataccctggaccaccgggcgcagaccgctcaacaagattccctggctcccctggagtttttcgcgctcctcttggatgacgaactggaacgccgggagcaaaaccggctgcgacgccgctttcgcgattcgaaaattgatgaaacaaaaaccttgaaccgcttcgattttgccgccgtgccgcaagtgccgaaaacacggatggcagacctggcgctttgccgctttgtcgaacggggagaaaacgttttgtttgccgggccgaccggcgccggaaaatcgcatctcgcccaagccttggcgcacgcagcgatcaaacatgggtttcaagcctggttccagccgacccataccctcctggcttcccttcacgccgcccgcgccgatgggagttatccccgggtgttcaaacggttgattcccatcgacgtgttgctcttggacgatttcggacttttgcccttgtctccaccaaccgtggaagatttgtacgagatcattcgggaacggtatgagaagcgctcgattgggctgaccagcaatcgggctccggaggaatggagcgagattttcggcaatccgctcctggcttccgccgctctggaccgcctgacccatcatgctcacgtgatcacgatcaccggcaacagttatcggcaaaaacgaaacaagaaaaattcgggaacgctccccccaaagagtgagtagtaaaaaaaattttcagccgtcagttgggttccagtcgctacgctccttccacccaactgacggccaattttcggaacaaaggaggtttattccactgctcttatttcgcagaatcggtcctgttttttttcaccagacgggtcacaccaaaccgactccggggggggcaaatgtacccggctattgaaagtttttcgatcggcagaaaaatttgccattgtatggcaggaagagaaaggcggatggagccggattctgtccgcgattctgaaacgcctaccattgcgtggaatcctctcgcagaacggctcgccgttgcgtggatcgaacgtggattagaaggcaatttctccatcgttcttcggacaagtgaaaacacgtccgtgcaggaatggattctccatcaataaaaaatcatgacaaatcatctttcttcgtcatcaatccagtatacccacggaggagacagacaagccttcacgcgccgccattccatcgaaccggatgccgttctcgatttcagcgtctatacgtggccgtttggcgttccgaaaaaattagtcgaggtactggttcgccattggggtgaaataacctgttatcccgacattcatgccgaatcgttacgccagaccattgccagatgtcacgatatttcgcccgagttcgtgattcccgcgaacggctccatgcaattgatttacgcgctctgttcgtcttcgttgtattcggacgtattgatattcgaacccacgttcaacgaataccggcgcgccggcgcgctccacgacaacgccgccaacggacgcgagccactgaataccagatacttcaatcggtgccctaacaacttccgatatcccagataatggcactgggccacgagttgatcccacaaccattccctctcgggatcactgaccaataccaatgatataggaaataagcccggtaaatcgcttgcgatcggcgacctctctattgaatttaatgggacctgcacttcaccgaatgctccatttccttgatgtctgtaaaagagcgcacttcaccctctcgccgatatcctccatcgaatcggcagt

SEQ ID NO: 1611 - DNA, 15288 bp, synthetic construct
  source 1..15288: mol_type = other DNA
  misc_feature 1..15288: note = Synthetic
aggctaccgagacattgcatccccgtcaaaccgacaatcggccggcgggcggaccggcagagggccggaaaaatctggactggaccggacaggcatgacatcgttgtcggcaaaggaacgaaggcggcccttggtcggccggaggatggttctcccatgaatgcctacagccccccctatcttggcgccgcgtactatcccgaggcctggccggctgaggaaatggaccgggacatcgaatggatgaagcgggcggggatgaacgtcatgcgtctcggcgagttcgcctggagccgcatggaaccccaagaaggaaccttcgacttcgattggctgcaccgggctgtcgagcaactcgccgccgcgggcatcgccaccatcctgggcacgcccacctgcaccccgccagcctggctgtcgcaacggtatccggagatactggtcgtcggggccgacggcagggcgtgccagcacggggcgcggcgccacgcctgccccaacagccccgtcttccgcgaacactgccggcggatcgttacgcggatggcccgggagttcggcctggatcccaatgtcatcggctggcagatcgacaacgaggtgtatcccaaggggccgcgcggctgctgctgcccggtctgcctggcggcgttccggcaggccatgcgggagcgcttcggcgacatcaaggcgctgaatgcagcatggggcctggacctttggagcatggcttactccgacttcgaccagcttcccgcctcccgcacggatacgtggcaccatccatccctgttgacggcatggatgcgattccagagcgattcgcaggttcgttttgtcacattccaggcggatattctgagggatttcacctcggcgccgatatcgacggacatgatgtacttcaacggggtggactaccacgacatgttcgcctccctcgacttggtgcagcacaacaactaccaccagatggacaacctctggcatgaggcgttctgggcggatttctgtcgtccccttaaggacaggcccttctggatcaccgagacggcaacgtgctggaacggggcccacttcgccgagcggtacaaggaggagggcttctgccgggccaatacctggctgccgatggccttgggggccgagatgaacctttactggctgtggcggacgcactgggccggacaggaactcagccacagcgcggtgctgtcctcggcaggccggccttatcatgttttcgaggaggttcgccaaatcgccgagggtctgggcaaggcgggggagtttctccgcggcacgcgcccttccggcagcgggctggcgatgcacttttccggcctggcgtggtggatgtttgagtttcagccgatggtcaaggacttcaagtacctcccgcggctcatggaggatttctatggaccgatgatccgggcgcagttgcgcccggacgtcatcgccccggcggcggaggtggagtcctatcgactcatctgttcgccctacctgccctcgctggaggaagccggcgtggggactcggatgcgggagtgggtggagcgcggcggtacgtggatcgtcggaccgctgtcggacgtccgcacagccgaggccgccaagtatcgccatgcgcccctgggccgcctggaggactgggccggggcctacgttcggtactccctgcctggcgatccccgccccttcgccctgcggtggaccgacggagtggagtcccacggttccgtgtggttcgacgccttggaggctcgtgactcggaggcgatggcgacctacaccgaaggaccgttggcgggcctggcggctgtcacgcaaaggcgcgtgggcaaggggcgcatcgtcctgctgggcactacaccggcggcgggggacttccagcgtctgctacttggcctggcccaagaggcgggaatcgccccgatgacgggggcttcggcgaacctgatggttgtcccgcgtcgcggccaggccggggagggccttatcgccgtcgagctggccaaccagcccgcgcaactggcgttgccccagccggcccgtgacctgctgaccggcctgcgccatagtgggcaagtgcaggttccgccctatggcgtgatggtgttggtgttctgagccatccgccccggttgatccctgtccggacagcggtctagtggcttgaccggagaacacggctggattagaatcctgcgagtctttgccggctgggatcccgcgcgtttcgcgccgttccggcggactggaataacctatggaatggtcggatctcgccaagacgttgttcatgacggtctacaccttcgcgctggtgatggtgtctatctacgggcttcaccgctatttgttggtgtatctctattaccgtcatcgccacaaggctccccaggcagcgggccatttcgagaacctccctgccgtcaccgttcaattaccgatgtacaacgagcggttcgtcgcccagcggatcatcgaaaagacctgtcagatcgactacccgcgcgagaaactccagatccaggtgttggacgacagcaccgatgagacctgtcagatcgccgtgtcggctgtcgcggatgcccaggcggcgggtttcgatatcgaatacatccaccgcacggaccgccggggcttcaaggccggcgcgctggaaaacgggctgcgcagcgccaagggggagttcgtggcgatcttcgacgccgacttcgtccccgaatcaagcttcctgaaacgctccatccactacttcaccaacccgaaagtctgcgccgttcaggcgcgatgggaccacctcaaccgcggcgacagcctgctgacgcgcagccaggctatcttcctggacgggcatttcgccatcgagcacgtggcccgcaaccgcagcgatcggttcatgagcttcaacggcacggcagggacgtggcgacgctcggccatcgacgcctccggaggctggcagcacgacacgctgacggaagacctggacctttcctaccgcgcccagatgcggggctggaagttcgttttcctgcccgatctggccgcaccggcggagctcccgccggagatgaacgccttcaaggcccagcagttccgctggaccaagggcggggcgcaaacggcactgaagctgctgcccaaggtgttgatgtcgggcctgcccctgaaggtgaagatcgaggcgttcttccacctgacctgcttcaccatgcacatgtacatgttggtgctggtggcgctgatgcttccggcgatgcgccttcgctgcgtgcccgtggacgatgggacgttctggcgggtgtgcttcgacatcggcgtctttaccttggcgacgctgtcagccagcgttttctattgcgccgggcaggcggaactgttcggcgactggcgatcggcgctgaaatacatgcccgtcatgatggccctgggcgtggggctgtgcctgtcaaacaccaaggccatcctggaggccctgctggggtgcaagagcgagttcatccgcacgcccaagtatggtgatcggccctcgctggcgcgcagcgacgcccacaaattagccgtcagcaggaagcggtcgctgctgccgtacctggagatggtcttcggcctgtacatgttgggttgcgcggtcctcagcgtcgtgggtcttcgctcggcaatcctcacgccgttcctggtgatcttcacctttggtttcttctacgtctcggtgctgagcctgctgtctcagcgggccgcgcgcagacagcccgcggcatccgccgaggcccgggcctgacgtcggagccgttggaacgacaagggggggcgttcagggcctcttgccggaccgcccatgcagcgccccacaggaaaaaaaggaatcctcacgtgctcaaagtcagcgacaacgggaggtttctggtttaccacgacgggcggcctttcttttacctgggcgacaccgcctgggagctttttcaccgactcaaccgcgagcaatctgatctgtatctggccaaccgggcggaaaagggctttaccgttatccaggccgtcgtgctggcggaactggacggtttgggcacgcccaacgcttacggggacctgccgctgatcgatcgagacatcgagcggccgaatgaagcttacttccgccacgtggactacatcgtggacaaggccgcctcgctgggcctctacatcggcatgctgcccacctggggtgacaaggtgggtctggccccccccaagcccatccgggaacacaacgcgcggcggtacggacgattcctgggccgccgctacgccgacaagcccatcatctggatcctgggcggcgaccgggacgccgaaggcgtagtggagatatggaacgaactggccgggggactggaagaaggcgacgacgggcggaacctgatgaccttccatcccggcagcacccggcattcctccacgtggttccaccatgtcgactggctggacttcaacatggtccaaagcgggcacgcaatcgacaacgccaatttcctgctcatccagcgggagtacaaccatctgccgcccaagccctgcatggacggcgaaccgacctatgaggacgttcccggcgacaagcccgccgatcgcacggtcaacagctttcacgtgcggcgcaacgcctactggtcggtctttgccggttcgcacggacacacctacggcgatcatccgatctggcagatgtacgaaccgccgagaaaaccgctctgggaggtgcgtaccgcgtggcatcaggcgttggacatccccggggccttccagatgcgccatctcaaggcgctgatgctcagccggccataccttccccgcatccccgatcagcgggtcctcctgtccggttcctccgagggattggaccgtgtccaggtgacgcgggatggggcgatccggcaatcagacgcaacgtacatgatggcctatttcccccagcatcggcgggtgcaaatcgacgtgggcaaaatatcagccgggaggctctgcgggtggtggttcaacccgcgcgacggacgagctgaacaccattgggaattccccaacggcggcgtgatggaattccaaccccccacccaggtcgagggcgaggactgggtgctggtcgtcgatgacgccattcgcgaatatcccccaccgggaggctcggttggttgaaagggacgattgggcgatcatacgggcggtcgcggctttggttgcgacggctcgctccagtccagagagtttttttggggaaataaaacgccggaaaaaagcgtttaatccttgatcaccgggaacgctttgggtaactgccacggtggcgtcgaaaatccctaatagaccttcggtggcgcggttggtcccatcggccaacggaggccaaaggagcttgacatgccttttcggaatttctccctgtggatcgtattgttagttgccggcggtaccgtcctggccggccaagccgattgggtcttcccaggcaagaaatgggagacgaaatcccccgccgaggtcgggctggacccggtaaagctggagaagttcgccaaggcagtcggcgccggggaccctaacagaaactcctgcggctgcatcatccgaaacggctacctggtgtattcctggggcaatcaggacgaacagctcaactgggcgtcatccagcaagcccgttttcagcacgctgctgttcttcgcgattgacagcggcaagctcaagggcgtccacgacagggtcggcgactggggctggaaattctcagataaggacaagcccatcaccttttatcatctggccaacaacatcagcggttacgcctgccaggagccgccgggagaggcgttcaactacaatgacgccgccatccaactgtactatctgacgctggagaaggtcttcggcaaggacatcaattccgccgcgatggagtgcttccagccgctgcaaatcgagggcaaggaccttttcagcgagaaagggcgattggtcgccacgccgcgcgatttcgcccgcatctgctggttgtgggtcaaccggggcaactggaacggcaggcaattgctgccacgggagtatttcgacaagtacatgaaaccacaggttcccgtctccctgccgctttcggtaacgacaaaagccgacgactatcttgagatcggttcctacggtggaaagccgaaaccctttgactacggaccgggaaaatatgggttcaactggtggttcaacggtccacagaaaggcgacaagaaggaccggcctttcctgcccggcgtccccgtcgatacgatcatgaccttcggcagccggggctgcaactcggtgatgatgcccagccttgggctggtagtgaccggcagggttcgctggggcggcctgggcggggccccaagactcccacgttccgcggagacggctcccagctcacagagaggcatttccggccggggcggagggggcggagcgtctaggttgaatgagaacctgaaactattggtcgattcggtcctgccgtcagatgacagccacccgtagcatcggatatgcttatggggcctaagcggaagcagtaaacgacgtttttaaccatcggctgggcgaaccattaggaaaggagtgctgccatgagttggcccctgcatgtcgggtgtgttgtggtggcgatgctagccttatgtggcctgggtcaggccgaccaacccgagagggtttttccgggcgagtcttgggcgacgaagtcccccgcggaggtaggcctggatgcggggaagcttcaggagtttgcccgccgcatgggcgtggacgatcccaacttccgatccagcggttgcgtcgttcgacatggctacctggtgtattcgtggggcaaccaagccgacaagtccaactgggcctcggcgaccaaaccggtgctgagcacgctgctgtttttcgccgttaaggaaggcaagctcaaaagcgtcgatgacaaggtcggcgactggggctggaagctgtcggagaaggacaagcccatgaccttccgccacctggccaacatgaccagcggatatgcctgccaggagccgcccggtgcggcatggaactataacgattcggccatccaactttacttcctgacgctggagaaggtcttcggcaaggatatcaactccgccgcgacggagtgtttcaagcctctccaactccaggacgggaccatcttcaattccaagggccggctgatcaccacgccgcgcgacttcgcccgcatcggatggttctggctcaatcgcggcgactgggccggaaagcaattgctgccgcggaagttcttcgacgactacatgaagccgcaggtgccggggaacctgcccctgtcggtgaccacccaggccgccgactaccttggcatcggttcctacggcggcaagcccaagcccacggcctacggaccgggcaagtacggtttcaactggtggttcaacgcccccgagggcgactccacgacacccttcatgcctgatgcccccgctgacatcgtcatcgccaatgggcgcggcggcaatttcatggtgttgatgcccggcctggacctcgtgattgccgcgcgcggcgactggggcaatgtcatgcccggtacggaacgtgtaaagttcaacgagaacctcaagctgctggtggaagcggcgaagtagaccgactcgcggatcgctcagccggccggatttctggaatcacgccgaatcgcgggtgaggtgcagcgagaccgccgtcagcggccatcggctcattcgagattcaggaaatgagtcgctcgatcctaccgcctgattctcaagttgcggatgtcaaagaccgccggttcgacggggcagtcggtctcagccgggacgggttgcgcgccgcccacggcgcggcaggcgccggtgcgaaaggacaactgccgcaacgcatccgccgggtgggcgaaggcggcgtcgtgcaacacgccttgaccgtcgaggcccagggagaacttccccgccgcggtgtcggcatcgagggccaccgccatccagcgcccggcagggcagggcgcaatatcggccgcctggtcgccgttgacggcgtggaccctgccgtcctcagacagcatgactcgcacgggacggacatgggcgcgtgaaccgagcagttcgatctccaaggacccattgcgaggggtcttcaccaagacatcgaaagaaacgttgaccctccctgccggcgggaagacgcaggtggcccgggcgtagtcgtatgggtcgccatcctccaggcgcaggcacttgcccccgccgtcgggcgactccgccagggacacccgcgcccacttggggctgtaaacattccagccgggcaggaaggagcccgtcgccatgtcctcaagaccaagggaaggcccgtcgctcgcatcggggcgaatgggcaccggaatccgggcgacccagatgtcttccttgttgacgctgtagacgacccacaacgcatcgtccttgcggctcccgtcgctcgaccactcgctgatgccgcggacgtattgcgggcccagagacttggccgctccgacgtaccgcctgatgggcacctccccatggactgcgcacaagtcaccgaagctcacgccatcgtccccgctgacgactgccagggggtagcgctgcttgtggctggggttgtagaccaaggcatagcggccgtcgctggtccgctgaggccagcacttggccgagccgatcaccagcgtcaacggcacgacgggctggaaccatgtttgcccctggtccttcgagacggtgacgaaacccattttagagatgcccaccagtgcaccgtcccggcggtggaaaaacgacatgcccttgccgaacacccacatcggactcgctacccatggcatggtgcccccgggccaactggagccttggtgccatttcatgcggcgcggacccagcaaggctccgtaatcctgctgttccaggaaaggtctgttgtccaggagcttggcgcaagcctcgatgaagctttcgtcatcggcctgcgtgtagagcggcggcagcgcccgtgcgggtgacatcgccggggggcggagcagataaacaggccccatcgcatgatcaatcccgatctgtcgcacgaccagcgaccctttgctcgtctcatcgatctggccctcgatggtccttagcccccccagcaccagcatccgatcattggaggaatgatagaagtacattcgcagcggcatggagacgccctgggggaacaactcactgggtggcgaccaggaggccccgtcggtggaggtgctgtagagttcgcgcgacggccaggtgtcctcgtccttttggcatgaattccaggccacgtacagccgcccccgccagcagcacatgtccacgtgatgactgaaggtgtaacccaacccatccgccaggtccggcctgtcgcgcgaggcgcggaacacctggaagttgtgcactcctattgccggggcaagcccgccatcaggatattccaggtccacgagggattgttccgggccttcgattcgcaggggtgaggcggcgggatcatcggaaatcgggggcatcttactgtcctccgcggtggttgacctgagccgataataacacgttcaataccatcagggctatcggattcgtggaccaatgtcatgtaccaagcccctctccgacgttgactgtgcgaaagataaaccgcttcgatggttcagacgcaccggaagcccctctgtttcacctattgcagaaaaaactggccgccatgcgtgcatgacggccgggtcggtccgtggaccgtggcccgcgacttgttttcgccttgttgcgaaaagcacgggccgggatcgattacactggccaaagtctactttgccccgccagcggctgtcaagtagaattcccgcgttaccgggttggacgggtgtttggttactcttgccagaaggggtcgcacaatgccaacgaggcttggactggacttggggccgaattcagtaggatgggccttgatcgacacggattccgcgtgtgtcgccgcaaccggtgtccgcgtctttcccgagggcgtggaccgcgacaccaagggcggcgagctatccaagaacgaggcgaggcgcgtggcccggggcatgcgccgccagatcactcggcgcgccaagcgcaaacgccgcctccgcaaactcctggtcgacgcgggcctcctgcctcccaccgcggccctgccgcgcagcgatccccaacgtcaggaatgggagacccacgccttcaaggaaaacgatccctatgccattcgccgggcggcgctggacggcaagctggaactacatgaaatagggagggtgatccttcatctttgccagcgccgcggtttcctctccaaccgcaaagccgacaaggccgacaaggcccgcaagaaagaagccccccggatgctcgtggaaatcagcgagttggaggcccagatcgccgccgcgagctgccggactctgggcgaacacctggccggcctggccgacaagaaccctctggctcgccttcgtggaagacacacgcgcagggacatgtaccagcgggaattcgacgccgtgtggcaaacccagcaatcccaccaccccggcgtgctgacggaagacctccgcgagcgaatccaccatatcattttctaccaacgtccgattcgcattcccaagagcctggtgggctgctgcgagctggaacccaaacgccgccgctgcccggtcgccgaccgccgcgcccagcgttttcgtatgctccaggatgtcaacaacctcttgctcatcgacgaacacggggaggaacgcccgctaacgccggaggaacgctcgtgcctgctggaccacctctccacagccgccagccgaaagttcgtcgacatacgcaagcacctgggtttcagcgaccaggtcctctttaacctggaacggggcgagcgaaagagtctctacggcatgcccaccgacaaggccctgtcgcacaaggattgcttcggcaagggctggctgggcatggaggaggaacaaaaaaaccgcatcgtccgttgcctgctggaggaagacgacgacgccatcaagcacaaggccgtctccgaatgggggcttacccgggagcaggctgacaatatcctggatgccgacctgcccgccggatacatgagcttctcccgcgaggccatcgccaagctcctgccgcatctggagcagggcctgcccttgatgaccggcgacgaccggccctgcgccatcaccctggccggatacctccgccccgaccagagaccggtcgaacgcctcgaccatctgcctcaaccgccggacctgcccaatcccatcgttcgccaggccctccacgaggtccgaaaagtcgtcaacgccgtcatccgccagtacggccggccggaccagattcacatcgaactggcgcgcgaggtcagaggctctgccaagcaacgggcggaatacatcttcaacacgcgcaaacgagaggcccgccgcgagcaggcggcagaggaaatccgacaggcgggctttgttcccacccgcaatgccgtcaaccgcttcctgctctggaaagaacaaggcgaggtctgcgcctacaccggacggccaatcggccaaaaacagttgatggaaggtgaggtggacgtcgaccacatcctgcccaagcctcgaagcctcgatgattccatgatgaacaaggtcgtttgcttccgcgcggccaacgcggaaaaaggcgaccgcaccccctacgaatggctggctggttccgacccccagcgatatgaggaactctgccgcagggccagaaagctgccctatggaaagtaccgcaagtttctcctgaaggaactcaagctggacgatttcgtccaccggcagttgaacgacacggcctacatcagccgggccgtccgggaatatctccgccccctggtggccgatccccacgccgacatcctctgcaccaagggccagctcaccgccgaactccgccacggctgggggctggacaccatcctcagcgaactgcccgacagccccgcctggcgcgaaggcgccgacctgggacacggccagaagaaccgcagcgaccatcgccaccacgccatcgacgccgtcgtcatcgcactgaccgaccgctcccgcctccagcaactcgcgcggcagcgggtctgtccgccgccgcgagagcgcttccgcgacgaaatcgtccaactcctcaagggtgtccgcgtctcccaccgcctccgccgcaaggtggccggacaacttcacgaggaaaccctctacggaaagacccccaaacccggcgagttcgcctatcgcaaaccgttggaccggctcaccaccgccgaggtcgagaggatccgcgaccgcgtcgtgcgggaaaaggtgatccagcggctcggcgaattcggcgtccgggtgggaggaaagaagaagggccagtccgacggtgagtccaagattccccccgaggcatggagcaaacccctctggatgaacgaggagaaaaaaatccccatcaagaccgtgcgcctcacaaagccagacaaaaccatccaacccatccgcggcggaaccgcgctggtaaaacccggaagcacccatcacctctgcatcttccaactccccaacgggaagcgagaagcggtcttcgtcaccatgctcgaggccgcccggcgcgccgccaacggcctgcccatcatccaacgaacccacccccaatgccccgacgccaccttcgttatgtcactcagcaagggtgagcttgtcctggccaactggaaaggccaggaacggatactccagatgcagacgagcgtacagacggagaaaaaggtcgagttcacagatccgtccgatgcacgcccaagcactcagaaagccaaatatcgttgtcaagccagtgccattgagggcaagaagatcacgatcggccccctgggggaggttcgctgggccaatgattaagcgcacgatagaaatatcctcggcgggcgtgttcctgtcggtggagatggaccagttagtcatccgttgggaaggcgacgagttgcagcgcgtccccatcgaggacatcggcgtgctgatcatcgacacttacggggcgacgtacacccacgcggtaatcacccgtctcctgtcggccggggcggtcatcgtcccctgcgacgggcgacatctgccctgcggcctgctgctgggacaggacaactgcctccagacgcaacggttggccacgcaggtccaggcagctttgcccctgcggaagcaactctggcgtcaggtggtctccgccaagatcgcccaccaggcggagatgctcggccacgccccggcggttcaatccgccctgaggggcatgtcccggagggtccgctcgggcgatccggagaacctggaggcccaggcggcgcgtcgctactggccggcgatgctgggggcggagttccgccgcgaccccgacggctcgccgcccaacaacttcctcaactacggctacatggccatccgcgctgccgtggcacgggccatcgccggcgccggcctgcaccccagcctgggcctccaccaccacaaccgctccaatgccttctgcctggccgacgatctggtggaacccctccgccccctggtggaccggcgggtcagggctttgcaccaagccggccgatacgacatcgacaaggacgcaaagcgcggcctgctggaagtgctcaccgagaccgtccgcctcgccgacaccgccgggccgctgctggtggccctggaaaggatggccgcctccctggcccgctgctacgccggcgaaatcaggcgcctggagatacccgtcccatggaaatcagcggataccgattcatgtggctgctggtaatgttcgacctgcccgttgacaccaaggcggcgcggaagcaatataccgacttccgcaagaagctgctgaagggcggctttgccatgatgcagttttcggtgtatatccgacactgcgccagcgaggaaaacgccgatgtccatacccagcgcgtcgaggccaatgtgccccccgagggggaggttcgcgtcctgcggatcaccgacaagcagtacgagcggatgcggattttctggggcagaaaacgcaaaccgcccgaaaaaccgcccgcccaactcgaacttttctagaggctcttttggcctaagcctctatccggcggccgcttgtgggcgaggtagtgtaatcgatcccagcccgtaagcaatccgcaacccccggcgagttttttcccccgaccggcatgagtgtaatcgatcccagcccgtaagcaatccgcaacggtcggtcagagggtccggcgcgagagcgctagtgtaatcgatcccagcccgtaagcaatccgcaaccgtgcgggcgtttccccagttggcgtcgccagtgtaatcgatcccagcccgtaagcaatccgcaaccctgacgaactcgtcaccaacgtccttgtgagtgtaatcgatcccagcccgtaagcaatccgcaacattgagcctccattgagcgcaggaccaatccagtgtaatcgatcccagcccgtaagcaatccgcaacatggaactggtggtccatcggattcgagatagtgtaatcgatcccagcccgtaagcaatccgcaacaacgcccacgccataccgatctccccgacgagtgtaatcgatcccagcccgtaagcaatccgcaacctcacgctggcggcgggcaaccccggccagagtgtaatcgatcccagcccgtaagcaatccgcaacgcggagatgaggggattcgcggccgccaggagtgtaatcgatcccagcccgtaagcaatccgcaacaacacctggcgataggcgcgagagattccgagtgtaatcgatcccagcccgtaagcaatccgcaacagcgggttgtgcagcgcgttggcgtccagagtgtaatcgatcccagcccgtaagcaatccgcaacgcgtgggggttgcggtcatgcgcggggcacaagtgtaatcgatcccagcccgtaagcaatccgcaacatgtaccatgccgcccccgtcgccatcgcgtagtgtaatcgatcccagcccgtaagcaatccgcaaccgcatcgccgccggtcacatctccacgccgagtgtaatcgatcccagcccgtaagcaatccgcaactacaactgggcaacgttctggagggatcccagtgtaatcgat

SEQ ID NO: 1612 - DNA, 14899 bp, synthetic construct
  source 1..14899: mol_type = other DNA
  misc_feature 1..14899: note = Synthetic
agtcgggaatcggcaactgccagatatcgacctccatcacggttcgattatagtcccagcgcggcgctacccggagcaggcggccgcgtgcttggcgagcagcaccgatgagcagcgcagggatgcctccagtcgccggcgggggtgacggggactcgtttcagcgcgtgtgtcaccagctcactgggcgtctggccggggagctgcgcacggaccggctcgcccgcacgctctacgcgaccgacgccagcatctaccagatcatcccggacggcgtggtcttcccgcgcaacgtggacgacgttgtcaccacggtggtcgcgtgcaatgagcacagcgtgccgctgaccgcgcgcggcgccggcaccggcctgaccggcgcggccgtcaaccgcgggctccagatggacctgtcgcgccacctcgggcgcatcctcgagatcgacccgcagcggcgccgcgccagggtcgagcccggcgtcgtgctcgacgagctgaacgccgaactgcggcggcactcgcttcaattcgccccggacgtggccaccagcagccgggcgacaatcggcgggatgatcgccaacaactcgtgcggcgcgcgctcggtgatttatggccgcacggtcgatcacgtgatcagcctggacgtcgtgctgagcgatggctcgcgcgttacctggggtcgcgacgcgccgccgcccgaggcaccgctggcgcggaacgtggagacggcgctgcgtggtgtgctcaccgagtgccgcgacgacatcgccgcgcgctaccccaagatcctgcgttccaacggcggctacgggctcgaccggctgcgcgagaacgggcggctgaacgtcgaggccctgctctgcggcagcgaaggcacgctggccgtcatcgtcggcgccacgctgaacctcgagccgctcccgcgacatcggggcctgtgcgtcgtgcactaccacgacctgctcggcgccctggggtcggtgcccgcgatcctgcggcacgcgcccgcggcggtcgagctgctggaccacttcatcctgggagcgacgcgcggccatccacactacgaccacatgcgctggttcctcgagggcgaccccgacgcgattctgatcgtcgagctgttcggccagacgacggaggaactcgacactcggctggcggccctgcgagacgacctgcggggccagcaggtgggttacgcgtggccggtgatccgcgagccggcccggcaggccgacgtatgggaggtgcgcaagggtggaacggggctgctcatgtcgcgtccgggggacgcccagccgtacgacttcgtggaggactcggcggtcgacccggcccgcctgcgcgactacatcgcccggttccaggagatcctgcgcggcgagggcgtggacgaggcggggtactacgcgcacgccagcgtgggctgcctgcacatccgcccggttctcaatctcaagcagcagcgcgacgtcgaccggatgcgccgcatcgcggaccgcgtcagcagcctggcgatcgagttcggcgggaccatgaccggcgagcacggcgacggcctggtccgctccgagtggctgggcaagctgtatggccctcgcctgctcgacgcgtttcgccgcattaagcagaccttcgacccgcgcggcatcctcaacccgggcaagatcgtcgatccgcctcggatggacgtgaacctccgccagggggcggagctcaagtcgcagatgccgctgacggtgctcgacttctcgacgcacggcggcatggcggggctggccggcatgtgcagcgggcttgggcattgccggcagcggctggtcggcacgatgtgtccgtcgtacatggcgacgggcaacgagcgcgacacgacgcgcgcacgggccaacgcgctgcgtgcggcgctgtcgaacaagtctctgctcgacggcttgtccgacccggcgctcgacgaggtcatggacctgtgcctgtcgtgcaaggcctgccggaccgagtgcccgacgggcgtggacatggcccggctgaaggcggagtggctgcatcatcgccatcagcgcgtgggcgtgccggcccgcagtcggctggtggccgccacgccgacgctggccgcctgggccgcgcgggtggcgccgctggccaactggctgatgcaatccacgccgagtcgctggcttctggagctgctctacgggctcgatcggcgcgtgccgccgccgcgcttcgccagcccgacgttccgggactggtgggaacggcgaggttcccgaggtgatgacgcggcgaagccgtcaaggcagggtggagagccggtggtcttcttcgtcgatacgtggacgaacttccacgagccaggcgtgggccgcgcggtcgtgcgcgtcctggatgcgctgggctgcgacgtgatcgtgccgcccacggtctgctgcggccgaccggcgctgagcaagggactgctcaccgacgcgcagcgcctggccgagcgaaacgtcgcgctgctcgagccgtacgcggcccgcggcctgcccatcgtgtgcgccgaaccgagctgcctctcggcgatgctcgacgaatggccgcagcttgtgcggaccgagggcgccaaggcgatcgcgcggcacgccatgtcgatcgagtcgttcgccgcgcgcaggctcgcggcgagtccgggcgccctgcgcttcgcggcgaaggcgccgagcgtgctctatcacgggcactgtcaccagaaggcgctgtggggctgtggcgacgcgctggcggtgctgcgggcggcctcgggcgatcgggcgaccgagatcgacagcggctgctgcggcatggcgggctcgttcggtcacgagaaggagcactacgacgtcgcccgtgcggtcggcgagcagcgcctgttcccggcggtgcgcagccgcggcgacgcccagatcgctatcagcggcttctcttgccgccatcagatcgcgcaccactgcgatgtgcgcgcacggcacgtgatcgagttcgtcgcggacgcgctcggttgagtctcgtccgccgtcgggtcagcgagcaatcgcggcaccccgagccgacaactcgtcgcgcgcctgatttcgtggaagccggacggtgaccgttgtgcctttgcccggctcgctggccagcgcaatgctcccgcccatcgcgccgaccgcatgccgcacgatcgacagccccaggcccgtgccccgctcgacgccaccgctgcgggcgcggtggacctggtagaaccgctcgaagacgcgctcctgctcctcgggcgggataccgcagccggtgtcgctcacggcgacctccgtcacgtcggacgcatgccgcaggacgacagcgacccgtccacccgcgtccgtgaacttgatcgcgttgtccacgagattgtccagcacaaggcgcaggagctgggcgttggcccgcatcgtcacgacatccggcggctcgctgcgcgcctcccacgtcaacccccgtcgctcgacggcgtcggcaaaccgggccgtcaggtcggccaggatccggcggcactcgagcgtctccggcgcgaaccgctgcgtgggcgactccaagcgcgagaggtccagcaggtcggagaccatctgttgcatccgcatactctgccgatcgaccttggccaggaactgctgggccgcgggcgcctcggtccgcaggtccatggacatcagcgtctccacggcggcgcggatcgtcgagagcggcgtgcgcaactcgtgcgaggcgttggccacgaagtcggtccgcatctggaacgtgcgctggagcgcggtgatgtcggtcaggaccgccacgcgcccgaggccgccggtcgtagccgcgccctccgactctgccagcaccacgtcgaatgtacgcaccagcaagtgcacggtgccgctccgcgactggacctcgagccgaacgctcggctccggcggctcggccgggccggatgcggcgggtgccgccggacctgagtcttgcgccggctggcgcggcggggcggccaggagttgctggatcgcatgttgcgggatgcaggcctcaaccggcttgccgtagagtgcttcgactccaccgggcggcaggctcagccccaggagtcgcgcggccgtcgggttgatcagcgcgacgcgcccgtcgccacgcacgacgatgacgccctcgcggagctgattcacgaggtcggcgagcatccgccgttgcctgtcgatcaggtcgacctgggtcgaaaggcgctggcgcagctcgtcgagcacggcggccagcatcacgtccgcaccgcgtgctgcgcggggcggcggcggcgtcgagtccgagagctgccgcgcggcgtcgatcacatcgtggaacacgtcgcgccgcacccgcagcgcgagcccgacgatcgccgcggccagcagggccgccaggcccgcgatcagactcaaccgcacggggcccagcacgggcccggagtccgcgacccatcccggctgcgcgacccacagcgcaccgaccggctggccgtcgctctcgatgcggacggcgacgaccgggcacggccgctcaccgggcccccagtagcgaaccgctcggacctcgccggccgtcagcacctgccgaagatcggcgatcggcgccggaccgcgcggccccccgccgcgctcgtccatgatcaccgctccgtcgatctgggcaacgacgatgtcgatggaatcgtcgcggaccgcgccgagggcctcctggatgatcggttgctcgaagctccgccaatggtgccccaggagggccgccagcgtgcgcgcgcgaattcgcagtgcatcgagggcgcgcgccggctcgcgctcggcggcggcgccgagcacgatccagctcagggccgcgcacccgatccccgccagcagagtcgcgtggagtacaagcttccaggttgagcttgcggaacgcatcgggcgcctgcgtcaacggacacgcgcgacgcctctcccgcgcgacacgagcgtgtgccgagaaacgggcgcgggtcgggtggcgaagcggcgctggcccccgcgagcgcacgcgcgtctacggctcgctcgccgcgctctcggggacgcggaaagcatacccgaccccacggaccgtgtggacgtaatccgctgccgccccaagcttgcggcgaagcgcggcgatgtggacgtccatggcgcggttcgtgatcgcggcgccgtgcccgacagcgctgtcgatgagctgctcacgcgtcagcacgcggcctcgcgcggccatcagcgtggccaatatgcgaaactcggtcgccgtcagctcgagcgacaagccgcccaccaggacctcgtgccgtccgtggtcgagcaccacgttcccaacggtgagcacgtccttgggcgatgccgccgcgctctggcggcgcagcacggcggccacacgggcgaggaggagcttgatcgagaacggcttgcgtatgtagtcgtcgctgccgagcgcgaatcccacgagttcgtcctcgtcggcggccttggcggtgagcatgatgatgggaatctgtgccgtgcgcggatcgcgcttcaggcgcatggccacctcgtccccggacaccttgggcaacatccggtccaggatgatcaggttgggaggctggcgatacgcctcggccagagcgcgctccccgtcctcgacgcgacgacagacgtagccttctcgctcgaggtggaataccagcaggtcggccaggtcgagttcgtcctcgacaatcaggatgctcgagttcgccggcatggtcgctccaggtgtgtcggcacgacacgcgccgcgcgagcctgcggccggagtgtaccgcgcgccaaagcccgctgggcgttgagatcctgccatgcaattcgccggaccgcgttaaggctgcttgtggctctggttaaggggctgcgaaatcgctgcggccgggggcctgccggaacgcgtcccggcagcgggacgcgccgttctgaggcgttttttgacccggattgaaacgtgatctatacttttctcgcacgttgagcacgaaagccgccggaagcgcgcggactgctctgggcaggccgccgccgcttgtggggccggctacaaagctgcaatacctgatggacacagcacttagggaccgaattctgcaggcggtcgacatcgtcgccctcatcggcgaacgggtcaccctcacccgcaagggcaaggaattcgtcggtctgtgcccgttccacccggatcacaagccttcgctctgggtcagtccggccaagcagattttcaagtgcttcgcctgcggagcaggcggggatgccatcgagtttgtccgccgctcggaccaccttgaatggcgtgacgccctggcgtcattggcggaacgcgcgggtgtcgagctgcgaagctcgccggcagaccgtctggcggcacagaggcgaaatcaagtcctcgaagtgctcgcctgggccaagctccacttccttgccaacctccgcggcgaggctggcagccaggcccgcaagtacgccttgggccggggtctgacgccggagtctctggagcggcacgagctcggcttggcgctcgacgcctgggacgatctgctccgtgccgcccgccgccagcggctcgacgaggccgtcctgcttcaggccgggctcctcagtcgcaacgaaagcgcccgcgtgttcgaccggttccgcaaccggctgatgttcccgatttccgaccccttgggacgcacgatcgcgttcggcggccgcacccttggcgacgacccggcgaagtacctgaactcgccggagtcgccgaccttcagcaagtcacgggtcctctacggactgagcatcgcccgaaaggccatcgagcaatccgggcgctctatcgtcgtcgagggctacctcgactgcgtcatgctgcaccagcacggcttcgcgaacagcgtggccacgctgggaacggccctgaccgacgcccatgttcagttgctcgcgcccctggcgccgatcatctacctctgcttcgacggtgatgcggccggcgagcgggcggcggatcgcggcgtcgaaatcgcgcttcgcagttccagcgacgtccgcgtcgtccagcttgcggatgccaaggacccggccgaccgcctcgtgcaggcaggcgcggaggccttcgcgagtgacctggaacgcagcacggatgccctggagttcaagtggcggaagctccttgcccagttcgggggcggcgtgcgggcgcggcgacaagctgtcgagagctacctggctttcgtggccgaagcggcccgcgccggcgcggtggacccgctggctcagaacctcatgatcgggaggctcgcggacatcatgggcgttggggtcgagaacatcgtcgacctgctcgccgagcaccagcgccgccgcatgcgagtcggatcgggaggcggcggcggagccgccgcgccgccaagcgaacagagtgaccggccgactgtaccgccggggttggcgggtggggtggagacggtactcggcctgctgagccggtcccccgcgtgctgggcgtgggtggacgattcggttgtcagatctctttcgtattatgagacctgggaagcgctgtatcggttgctccttgatgttcgcgaagagcttggtgaatactctgttacggatgtgatggcacgctgcgatgaccgcgcgctgctcgagcttctttctcgggcacaggagcgcatcgcggagaacgtgccgcagcgggagcagttcgaccttgcccgccaggcgctggcgatcgagcttaactctcttagaatgatggagataaaggaggaggccgaggctggaacccagtctgaggcccaggcattcgaggctttgcggaccttggcgcgcgggcgccacgccgtactgccggcctacgatcgctggccggtatcgcagcggtagcgctgatcggcctgcggccgtgcgcaatcgttgcccgcgggcgaagcgctcgctctgagcgggcgaaaccggacttcggagtcagcacgcggcttccaagggatgtgtacctcggcggctcacgcgtcgtcccgccgtggttggagaaactgaatgtcgctcgtgacaccggacatcgacccgatcgagcagaaggtcaacgaactcatcgagcgcgggcggaagcgcaagtacctcacctgggaggagctgaatgaggcgctcccggacgaggccatttcgccggagaagctcgagagcgtcctgaaccgcatcgagtccagcggcatccagatgatcgacgagatcgaggcggacaagctgcgcgaggcggggatcaagccgggaacctcgctcgagtcgggcgacgcgctggaggaggtcaccgaggccgacctgacggacagcgcatcgcggcgggttgacgaccccgtgcgcatgtacctgacccagatgggcgagatcccgctgctgacacgcgagcaggagatcgcgctggccaagaagatcgagctgacgcggatggcgttccgccggcgggtgctcgagaacgactactgtattcagcaggcggtcgagaccatgcaggccgtggccgacggccgcatgcccttcgaccgcacgatgaagatctcgaccaccgagagcatggccaaggcgacgatcatgaagcgcctgccggccaacctcgccaccgtccgcaagctgatcgagctgaaccgcgccgactgggccacggttcgcgacccgcggaccgtttcggccgcccgcaaggccgcccagcagcggacgcaccagcggcgccgccgggcggtgacgctgctggaggagctctcgctccgcaccagccgcatcgtgccgttcatgcggaagctggcctcgttcagccagaagcttgagcagcttcagcgggagctggcgcacgacgacggccggctggccccggacgagatcgaggccatgaaagacgagcgggccgggctgatcgacctggtgatggaatcgcctgacgagttggcccgccgcgtcgccgaggggaagaaggttttcggggagtacgaggaggccaagcgcaagctggcggggggcaacctgcgcctggtggtctcgatcgccaagaagtaccgcaaccgcgggctgtcgttcctggacatcatccaggaggggaacacgggcctgatgcgggcggtggacaaatacgagtatcgccgggggtacaagttctcgacgtacgcgacctggtggatccgccaggcgatcacgcgcgcgattgccgatcatgcccgcacgatccgcatcccggtgcacatgagcgagacgatgagcaagctgcgcaacatcagcaagaagctgctccaggagctgaagcgcgagcccagcatcgaggagatcgcccgcgaggccaagatgccggtctccgaggcccgccgggtgatgaagatcagccgccatcccatctcgctggaccggccggtgggcgagagcgaggacagctatttcggcgacttcatcgaggacgagaaggccgagagcccggtgatcaccgcctcgagcgacatgctcaaggaccgcatcgaggcggtgctcaagacactgacctaccgggagcgcgagatcatcaagctgcgctacggcatcggcgacgggtacacctacacgctcgaggaggtgggcaagatcttcaaggtgacccgcgagcgcgtccggcaggtggaggccaaggcgatccgcaagctccagcacccggtccgcgcgcggaagctgcagggcttcctcgacctgtccaagagcagcgaagagtaacgccgaggggcgcggtgcacgtcaggacggggggcgctgccaaaaaagaaagctgcctaggctctcgccgggcagcccatagctccgtagagcgtggcctgcagatgtttcgccattgttgcgaaaagctgcgggccagggtcgattacactggcttgaaagatacggtccttcgcgtaatctgtcaagtcgaaatgtgatcaagtcggcacgaatggggttgagagatggcgaagctcacgttagggctggatctcgggcccacgtcgctgggatgggccctgatcagtgagtctgaccaatcgctcgtttccgccggagtgcgcgtctttccggagggcgtcgcgcgcgatccgtccggggcggaggtgcccaagatggcggagcgccgcgttgcccggagcatgcggcgccagttggcccggcgcgctcgccgaaagcgccggcttcgctcgctgctggtgtcggcggggttgctgccgccgtgcgctaatcagccgcgattcgccccgtcgcgcgtcgagtgggagcgcgagtcgttccgcgaggccgatccgtactctttgcgagaacgcgcacgctcaagccgtctggagctcgtccagctaggtcgcgtgctgctgcatctcgcgcaacggcgcggcttcaagtcaaaccgcaagaccgacaaggcacggcgcaaggagcaatccgagctcctggctgagatcggcgcgctcgaggcggaactcggcgagcgcacactcggtgagtaccttgcgtcgctgcgtccgagtgacgcgaggctccaccacacggttcggctccgcggcaaacacactcgacgagagatgtacgagcgcgagtttgaagcgatctggggcgcccagcgtgcttaccacgcggacgtgctgaccgacgagttgtacaacgccgttcggcgcgagatcttcttccaacggaacctgctccctccctcgccgtcgctcgtcggtcgctgcgagctggagccacggctgccacgctgtcctcgcgcggatcgtcgcgcgcagcgattccgcatcttccaggaagtgaacaaccttcgcgttctggagccgtcgacccggtccgagcggccgctgaccgcggtggagcgggcgaaggtcatcgagctccttcgtacgaaaaaggagcgcacgttcgacgagctgcgcaagaagcttttcgagcagtacgagggagtccgcttcaacctggagcgcggcgatcgcgacaagctgaagggcctcacgacagacgcggtgctggcgcacaaggaactctgcggcaagtcctggcacaagctcggcgaggacatcaaggatcgtatcgttgctgcgatcatcgacgataacgaggaacggctttggtttctgctcgctgaggccggcttggacgtcgatcgggcagaggctctcttggacgccaacctggacgaggggtacgcgagctacagcctatccgccatcaagcgtctgctgccgcatcttgaggcgggtctcccgctgaccagccgggagccgtcgattccctgcgcgctgcgggcagcgggctacctgatgccctgggagcatccggtcgagcgtcgcccgttcctggacgacccgcccagcgtcaccaatcccctggttcggcaggcgctcttcgaggtcaagcgggtcgtcaatgcgattctgcgcgaactggtctaccgccccggtcacacacttcaggcgatcacgatcgagctggctcgtgaagtccgcggcacccccgagcagcgccgccagtatcagaaagagatcaacgaacgccgacgggagcgcgacaaggccgccgaccaaatccgcgaactgggctatcgcccgacacgagatgccatcgatcggtaccgactatggcaagagcaagaggagcgctgcctgtactcgggacgcccgatcggcgtgcggcagttgctcgaaggcgaagccgacatcgaccacatcctcccgtactcccgcagcctcgatgactccttcatgaacaaggtcgtcgccttccgcgccgagaacagcgccaagggagatcgtacggtctgcgagtggctcggtgcgacggatccgacgaagtacgagcaaatcctccaacgggcagcgcgcctgcccgttccgaaggtgcgccgcctccaggccgagtcggttcagctcgacgacttcttcgcgcgacagctcgtcgacacaacctacatcacctcgcgcgtgcacgaatacgtccgctgccttgcacccgacgtaatctgcgtcaagggccagcacacggcggaactcaggcgacactggggcctgaacacgattctctcggaactggcggacggccccgcctggcgcgaagccagcgaccttcctcccggcgagaaggaccggtccgaccatcggcaccacgcgatcgacgccatcgtcatcgccctcacgacgcggtcccggctccagcaattggcctccatccgccgggccggcggcacacaacgcaccggtgaagtgctttcggagccgtgggcggacttccgtgcgagcgtgcgcgagtgcgtgcgccacatcaatgtatcacaccgtgtgcgccgacgcgtgcgcgggcctctgcatgaggacacggtctacggccctacggacacgccggggacattcgtctataggaagcccgtagagctgctgacggctgccatggttcatgacatccgcgacccagccgtgaagtcggcgattgtccaacaccttgcaagcgctggagtggagttgagcccgggcgtcaagattcccgccgaggtttggagaacgcccccacgactcccgtctggtgtgccgatcaagcgtgtccggctgctcaagcgcgacgagtcaattcgatcgattcgcgccgggacggcatatgtaaagccgggtcgaactcaccatgtctgcatctttgaggtgtcccgctctggcgcgaacgccgagcgcgacgcagtgttcgtgacgctgctggaggcgtatgcgcgcctccgatcgcgacaagcggtcatctcacggaggcaccccgaccttcacgatgcgcgattcttgatgagtctcagccccggcgagatcgtcttgctccggcatggagatcggctcgaggcgtaccgattcgaaacgggcgcttcaaccactaaacagatgtggttccgtcacatcagtttcgcgggcaggtcatccgacaagcgtggtcgcgtgagcaagaatcccaatacccttgatgccgagaaaatcacgatcgatcccattggccgcgtcaggcgatctcgcgactgactccatggctgctcgctgccgatgtcgcaatagtcatcgacagcggggcggccatgatcaagcgcaccatcgacatcgcccagcagcccgtccacctcaccacgcgcgaccagcagcttctcctgctcgccaaggacaccgagccgcggcggctgccggcgcagccgcccaatctgctggcctcgattccctgcgaggacatcggcgtcctgctggtcgaccagccggccacgacctacagccacgccgccctcgcccgactgctcgagcacgacgccgcggtcgtcatctgcggccgcaaccacctcccggccggcctgctgctgcccatcggcgagcactcgcaggtcgtctggcggctgcgggaccagctcgccgcccccaagccgctgcgcaaacgcctctggcagcaactcatccgggccaagatccgagcccaggcggccaacctgccgtccgggcacgccacacgaacccgcctgctggccatggcccgcgaggtgcgttccggcgaccccgataactgcgaggcccaggccgcccgctcgtactggtccgcctggtaccaggacgcgtcggacgacccacggcacggcttccgccgcgaccctgatggcgacggcatcaacgccctgctgaactacggctacgcggtcgtccgggccgccgtcgctagggcggtcgtcgccgcggggttgctgccggcgctcggcatcaagcatcgacaccgggccaacgccttctgcctggccgacgacctggtggagccgctgcgccccttggtggatcgcgccgtggccgacctcgtccgcgcggggacgctcgaaatcgggccgcagaccaagcccgccctgctggggatcctcacgctggaagtggcctgcggcgggcagtccgggccgctcatggtcgcgctgcaccgctacgcggcgtcgctcgtcgcctgcttcgagcggacggcgcggcggctggccatcccgacgccagccggcccggcggatgcaccggaagcggacgaaacgccgtgcatctgagcgggtaccgcttcatgtggatcgtggcgatgttcgacctgcccgtggacacgaaggcggcccgcaaggcctacgctcagtttcgcaaggcgctcatcaaggacggctttcagcggatgcagtactcggtgtacattcggcactgcccgagcgaggagaacgcggccgttcacgtgcagcgggtccaggccgctctgcccgacgacggcgaggttcggattgtcacgattaccgataagcagtttgagcggatgcgcgtgtttctcggaaaagcgcgtcgggcgccacagaaggcgcccgagcagcttgcgcttttctgaggctcgcgtcgcacaggtcgttgcggtggccgggcttacgggggcggtagtgtaatcgaccctggcccgcgagcaatccgcaactgcctgatgtgcgcgacccgcgcgggcggcagtgtaatcgaccctggcccgcgagcaatccgcaacagggaccagtgaccctccgtgctggccgtgagtgtaatcgaccctggcccgcgagcaatccgcaactgtggaaagtagcgactgggtggccgggttagtgtaatcgaccctggcccgcgagcaatccgcaacagcgccgcccgactgctgcgcaaaggtggcagtgtaatcgaccctggcccgcgagcaatccgcaactgctccgccaggccacaggacacagccagcagtgtaatcgaccctggcccgcgagcaatccgcaacccgaaactggccgggatatctataacgtctagtgtaatcgaccctggcccgcgagcaatccgcaacgcctc

SEQ ID NO: 1613 - DNA, 12718 bp, synthetic construct
  misc_feature 1..12718: note = Synthetic
  source 1..12718: mol_type = other DNA
gtcctggagcgttcgggcaatcccggatacctcgaccgcttcaaggtgctggtgctgtcgtacgaggccctcaagcccttggacgagcagacgcaccaggccctggcaggctgggtccgccggggcggcgtactggtgctgctgggcacggacggtcaactggatggcccggagttctggtggaacaggcaaggccgctcttcgccgctggaggacctgttgggcgaactgggcctggaggccgccggacagggagactaccgcgtgggccagggggcggtgctgcggcgccaagactcccccgcaagttacgccgatccccagcgcgcccgccaggtgtacctgccgctgatcgacctcgccctgcgccaggctggctggagcaggggtctgcccaccgcaccggggttcctagtgcggcgcggaccctatctcatcgcccacgcgatggccgatcaaatgacgattccagggcctgtggttgacgtgcttgaccccgagctgcccgtgctggatgaagcgcggctggataggggcggcagcggtctgtaccgggtggtggaaccacccgccgatgggcggatggaggtgttgcatgcgacacaccggctcacacggcaggcgtggcaggacgccgtgctgagattcgagattcgtggcccagcgggtacgccggcggtggtgcgcgtgttcaggccccacgagtgctgccctgatattcaggcccaagacgcagagggtaaggccgtaagcgtcgaacgccgcgtgcaaaagcagacggtacagctccgcttcgacaaccgccccgcgggcgtcagggtggaagttcgctgagcgccgccggcaggtcgcaggaggccaaagccaccgctacagtcaataatggcggttgtctgctccacgacggagaattgcataagatcaaatgggacattccgaacaaaggacacctcggtgactggccgaccaacaaaccacggcaggatcgacttgacggcactgaacctcgacgtcattaccggccacggaggcgggcgcatcctctggcaaccgcggattctggcctggtactacgacaaacagttcgcggggcaacctctgccggaaccctacgtgggcatgacgctgccggagttgtaccgggcgctgggcgtgtccaatcgcatctacgatttcggcgactgctatcgcagtcatgaagacccaagggtccacatcacccagcgcgacctggacgagaccgattacgaggtcctggttgagacacccgtgggcaggcagcgggccgtataccgccgcagtcccaacagcccctggcacatgcccgtcaagtggcccgtcagcgacgaggaagagatgaaggtcgccgcctggcgcgaggagcggcggacgtggacgtgggatcagggcaggtacgacgacctctgcgccgtgtggaagggactgggcgccccggccacatgcataccgcgcacgaacgtccagaaactcttcgtagaggacatgggcgtcgaagaggccgtcttcgccctgcacgactacccggccatctgcgaacagtattttgaggcgctcgccctcacgcaaggacggttgatcgaggtcgtcaatgccagccccattcgatacgtcgactttggcgacaatgtccatgcccggatctgcacgccggagctgttccggaagtacatgctgccagtctaccagcaccgctgcgaaatgcttcaccgggcaggcaagttcgttcacgcccattgggacggcgattgcgggccgctgcttcccctggcccgcgagaccggcctggacggaatcgaggccattacgcccgttccccagggcgacgtgacgctggaggagaccaaatccgccctgggagacatgttcctcctcgatggcatccctgccatctactttgaccgcaccttcagcggagagacgctggtgaattgcgccaagcggatcatcgacctgtttgcccccaatctgatcttgggaataagcgacgagatatcatccaccggcgacattgaacggatccgcctggtcactcaggttgtcgacgagtacaacgcttcgttgtgactcagcgtcttgtcgtagcctcaagaggccgtccgggtccgccaattccttggctcggcgcgccgagggcgataggatgcgcaaggcggatcggattgagcgtcatcggtcccacggcctttcgcaggtcaagatgacccggcaaatggccccgtccgcgctgagccgacgggccatcaggcaaggcgagcgggttacgttaatgggcaagagggaagaccaattcaaggcgatgcggtttgagcaccctcagcggattccggtggaggtcagcctgctgccggggacctggcggcgccacggacaggctctcctggaagtaatgcgccgataccccgtggtctttgagggagtcatcgctcctgccgatccggcccgggcgggggaagagaaccccatgtacttgcccggcaagcacgtcgatgagtggggatgcgtatgggagaacatcgcagccggcttgaccagcatggtcactgggcatccggtgccttcgcgacaggacgtacgcaccctcaagccgccggcacaggtggcgccctggttgccgcacgggttcatgttcctgcgactggcggacctgcggggtttcgaagagatcatggtcgacttcgccgagcagccgccggaattgcagatgttgatcgacattgtactggcacacaatctccggacgctcgacgtgacgctgcctctgctggagccaggcggtttgacacggttcggcgacgacctgggcacgcagaaggccctgcccatcagcccagccctgtggcgcaagtacctcaagccttgctaccaggcgatttacagccgctgccaccgggccggtcacgacgtctacatgcatacggacgggtgcattcatgagatcattccggacctgatcgactgcggggtcaatgtcctcaacccgcagatccgggccaacggcttggataatctggtgcggacctgcaaaggcaaggtctgcatcgacctggacctggaccggcagctcttcccgttggcgacgatcggccagatcgaatcccacatcagacagtgcgtcgaggcgctctacctgcctgagggaggactgtggctgctggctgaatgcgacccggacgtgcccctggaaaccatcgacgggatctgccgcatcctgaacgacattggggcttatatgcccctaatgacgccgaagtcgccttcggggtagaccctctcgatgtatatcgggaatcacggagattggttcatggacgggaatatgcggcagcagatgatccggctgtgtaccattaggaactcagtcgagagccgccgcacttggtcgtccacttcgtaccatgtacttagcggtgacggatacagccatgatgacgaaacagaacccgtaaggacagacaaccatatccatccgcttgggtgcagacacatatactcacgggccgagcgaagagaggccgcaaccgaactgaaaagagttctccggacatcgcctgacccggacgcacgtgattttgcgcggagagctttgcgccactgccgcctaagatcttgggttcaaaggaaccatgttgccgcaatcctggcaggcccgggcctggcgcggaagccttgcgacctgggccgcggtgccgggcggcttggttgatttcgattgtccccttggccgcccctggggatggaggcccgaaaggcaggaagaacagcctgtaggctattcggctgttaggccggatgccgcgccccaaaggggcgaagcgcctaatagtctaacagtccgacagtctgacagtcttcatgggaatcagccttccaacgcaattccccccaacgcacccgctctctgcctgaactgcgaacgtaaccgaagttgcccaaacgtcaccacctgctgcggcggccaggttgaagtgaacatcaccaccccctgccggcgaggaaagtggtaagtacggcaaagccacccgctggtgggcgtctatgttcttgacggagatggccagggccttatgggcgccgaccagccatctgcctagtcctcttgcagtgcttccaaggccagcgagacgacctcactgagtttgtccgtgtcatgtggaacgaaaagcccggtgagccagccggctttggcctgatagttgtcacgaggacgcaagtcaaagccccgacggcgcagttcgtcagcgcggtcagccggtactcttacgtcgatgaggatggctcttttctggacgtagacgtaaagagcatcgcttccatccgtgagtccataggctaggtaccgggtgttcgtattgagcttctcacgcagctttgggcaggcagccgccagctgagaacgcaaggcaacaacaaggtcgattgcgaacccgcgaaggccactccttagccgatcatcgggcaacaaccccttctcttggagcgccaaattgcctggtgctttggccggtttcccaagaccgcgattctttcggcgcctgtcttgagcgtcgtctgttggagacgccagtgaataaccgacgatcaagatgtcctcaacgtgcagcggatgaacttgggccaccaaacggcacaatcgcttcagatagcggaacgaagactcgcgggagttacccgaaatatgcctggcgacaaggttatcatcgggcaccacgaacgctccgaaaaccggcttcccaggatgctggagctgtcgtgagctggcgaaggcctgcatcttcaggatgtcgaattcaaagcgtgacaggcatcccttctcgatctcaacgcacaccaatgcctcatccgcatcaatgacgaggtcattgtcgaatctggtgcggccggagacgaggcagtttgccttgatggtaagaagcggatcgagttcccgtaggcccgcctcgattcttccatcgaagtttccccgatccgtctcccgcttggacagcaggtcaggcatggcctcggcgtcaataccctcgaccacgctgcaaagcagttggcgcagccgcttcggaaacgggctcggctcgccattcgcctccagaagtgtcacggtgcggacaaaaaggttcatttggtgggtccttcattcgccagcgcacaccgcggggtgtcggccgtgccatcggccgtctgctgcctcgccttcagcatcgtcacgcgtcgccggggggccatgttcttgacgggactctgaggatcgccctgaacgaccttagcttacttgaagcaggcttgccaattccttgaggtcttcgcctgatagtggctctcggtacagtcccttgaccagccacaagcctccctccctgatcttctccactggcgaagaccgtccgaaccatgttcctgaaggcaggcactcgtcgcacagggacaccgtggagatcagtttagcctcgagggataggcgtttcgctttgttcgtcacctcgaaaacgacgaaactgcaccgagtctgtatgtactccgtgacctgtcgttcaacctcggttttccgtgtccaatcgacggcggtgacgtgctttctctttgcggccgcggctgtgagatccaagtcccatcgatccaggaacggatcgcctgccttgttcagaatcgccctgccgatattcttgcgaaagatactgcggtccttgttctccttgatgaaatgttccatcaggcgtgcaggaaggttgttggggccggtgtgcgtgcctacccggacgatcctgtctgcaccatgtgctgtttcaccctcctcgaagaggaggtagatgccgttgcgggggattacgctcctgctaaacgggaaccgtaggcgaggcaggccgttggcgatctgatgcactctggcacatgcttcgctcatgcgcccacctgcctcttgagaaactgcctctgcttcccaatagccaggccctgcatcggaacctcgaaggagcgcacatgaggcacgatgtatttgcggtattcatcggatgccagaaagatgaagtgatcccgctccaaatcggcacatgccctgagttggccaactacctttgccgcccacgactcgatctcgtgcatcggcatggttttaagggtcttctcgtaaggctcgaccacgacatcgaggttcaagaggccgtacttggccgaaaggacgaacacctcgtcgggtttaatcatctcggcgtatcggagggccagccggaaccagaggcttgtgtataagtcccgtgccttggcggcatggtctgccttgctcttgacgcaagagatgaggacgatctttttcattcgctaattccagcggaaggcactcgacagcagccccctgatattctgcgatgggcaagccgccttcgctagcgtaatggccagtatattgagtaacctccgcaggacctgacccgcgcgtcgcgacaggcctgtcccaccccgaccttcgcgttgcgacctgcctggtctgccgcgacagccgcgcctgccccaacgtcaccacctgctgctgcggcacccccggacctggccgaggtaatcgccacctggccgagtctgccggaaccgatcaaggccggtatcgtggcgatggtcaaggcgacagggggaaggtcccctagagagtgaggggcgatgtccaaaggttgccctatccaaatataatgcgttggggagcggtggtcagggaagtgctgctcagcccccaggaaggcaacggcgctcaaaaacccccgcgccaggggcacttttccgacgatccccttcaagcccgacctttcccccccctcccggccatctgagacaagatcgtcagaagaatgcctgttgccaggggggtaaacggtggagggggtacatgggtaggggtcaggggctttcttcaaacgcatccaagccgtagctggtgtccgcgatgctcctgggcatcctggcggcggaccaccaggcggcggcggacgggtcggcaaccgcgaccaccaggggggagggggtggccatcgaccaaggggggtcggcgatttgacacccaccaccatccccagactttgacggggttgctggcccgttgcagaaagactcggacgaacccgtgaccgctcagtcgcaactaacccatcccggcgcaatcacacccgcttcccgccccgcgccacaatgaagctgccctatgacagtatctggcggctgccacgataccatgggctgaacagaacgggcggccccaagctcacactgcctaatcggagagccagaagcatgggtttgagggaccggctgtaccgcaaagggcagcaagaaacgagcaaatagatgtggttgaggcagtatgccgcgccgtaaggcgggcctggaaggcccagcacaaggggtctgagcgacacgaaataaacagccgccatgcagtgcatgacggccgggacgctccgtagagcgttggcccgcgacttgttttcgccttattgcgaaaagtctagggaccgggatcggttacactgctaggatgttactttgacactgttcccccagtcaagtagaatttgtttagtacgggctgtttttctcgattcctggggatcggccaatggcgatcagactagggctggatttggggcccaattcgatcggttgggccttgactgacaccgactcttcatccgttgtcgccgcaggggtccgcgtcttcccggaaggggtggaccgcgacaccaagggcggggaactgtctaagaacgaaacacgccgcttggcccgtggcatgcgccggcaaaccaaccgccgggccaagcgcaagcgccgactcaggaagctgctggttaaggtgggcctgcttccgccttgtgcggccatgcctgctcaccaccccgagcgcatcgcctgggagaaccaagcctgccagagcgctgacccctatgccttgcggcgggccgcgctggatcggaaactcgatccccatgagatcggcagggcgttgctacacctctgtcagcgccggggctttctttccagccgcaaggccgacaaggcccgcagcaagaaggaagcctccgaaatgcttcaagccatcagtcacttggaggccgagatcagctcagccggttcaaggactctgggcgagtatcttgccaatgtgggtactgcgtcgccgcttgcccgcgtccgcggccgccatacccgccgggaaatgtaccagcgcgagcttgaggccatttgggaggcacagcgaaggcaccacccggacctgttgaccgatgatctcaaagccaaggtccgtcacatcatcttttaccaacggcccatacggatacccaagagcctggttgggacgtgcgaacttgaacccaagcgccgccgttgtccgcgcgcggataggcgcgcccagcgattccgcatcctccaggatgttaacaacctcctgcttatcgatgaacacggggaggaacgaccgctaacgcaggaagaacgctctcggttgctggaatacctgtccaatgccgcgaggcgcagctttaaggacatccgcaagcacctgggcttcaccgaggccgttgtcttcaaccttgaaagaggcggacgaaagtatctgctgggcatgccgaccgacaaggccatgtcgcacaaagactgtttcgacaaggcgtggttcagtatggacgaggagcggaagaaccagatcgtccgttgcctacttgatgaagaggatcccgtcattctgcaaaaggccgtctcggagtgggggctttccccccaacaggctaggaatgttctcaatgcagagcttcccgccggttacgccaatctgtcccgcgaggccattgccaagctcttgcctcacatggagcggggcctgcctctgatgacaggcgacgatagaccctgcgcactgaccgaagctggctatctccgacctgaccagcggccagtcgaacgcctggagcgggtggctcagccaccggacctgcccaacccgctcgtccggcaggccctccatgaggtccacaaggttgtcaacgccatcattcgggaatacggttgtcctgagcagatacacatagaacttgcgcgcgaggtaaaggggtccgccgaacagcgcaaggtccggaccaaggcaatgcgcgaacaggaacagcgccgcgatcaggccgctgaggaaatccgaaaagctggaggcatgccttcccgcgatgcgatcaaccggtatctactttggagggagcaggagggaatctgcatctacacgggccgggcaatcagcaccgctcaactgctggccggcgaggtggatattgaccacattcttcccaagccgcgcagcctggacgactcaatgatgaacaaggtcgtctgcttccgccaggccaacgcggaaaagggcaaccggacgccgtacgagtggctggcccagaccgaccctcagcgttacgagcaggtctgccagcgcgcacgcaagttgccctatggcaagtatcgcaagtttctccagaaggaagtgaagctggacgatttcatccaccggcaacttaacgacacggcttacatcagccggaaagttcgtgagtatctccaatgcctggtgcctgacccacacagggatatcctttgcaccaagggccagctgacggcggagctgcgccatggctggggcttggacacgatcttgcgggaacttcccgacagcccggcctggaaggaggaccatggggatatccggccgggacagaaggatcgctccgaccaccgccaccacgccattgacgccattgtcatcgccctgacggaccgctcgcgtctccagcaactggcccgcgaacaggtctgcccacccccgctggaacacttccgccaagaggtgaagaatcttatcagcgagatgcatgtctctcaccgcgtccagcgaaaggtggccgggccactacacgaagagacaatctatggcaagaccgacaagcctggggagttcgtctaccgcaagccgcttgaggcactgacgccctctgaggcacaagacattcgcgaccccgtcgtaagggagaaagtcctggagcgcctccgcgcgctcggtgtcaggtccgggcgaaagaagaggggcgcaggagccaacgaatccacgattcctgcggaagcatggagagagcctctctggatgaatgaggagaagcgcattctcattctcaaggtccggttgatcaagaaagagggatcgatcttggatatacggcaaggggccgcctgggtcaaaccgggcagcacgcatcatgtgtgcctcttcgagatgcctgacggcaaacgcgacgcggtgttcgtcaccatgctggaggcggccaggcgggcagcgaatggagagccggtcatccggcgccagcatccccatcagcccaacgcgaggtccgttatgtccctcagcaagggcgaactagttctcgccaactgcgaggatggccaacgaatcctccaatacaacacgggggcttcgaccacgaagcagctacggttcactgatcccaaagacgctcgaccctcccgtgacaaggcaacattctcgttttcccccaacaagctggaagcccggaagataactatcgaccccctgggccgggtccgatgggccaatgattaagcgcaccatcgagatatcaagctccggagtcttcctgtccgttgaactggaccaattggtccttcgccgggaaggccaggagttgcagcgcatcccgatcgaagacgtgggggtgctgatcgtggacactaacggggccacctacacccacgcggtcatcacccgtctcttgggcgctggagccgtcatcgtcccatgcgacgggcatcacttgcccgccggactgctgctgccccaggacaattgcctgcaatcacagcgcctggcggcgcaagtggaagcgtccaagccactccgcaagcagctctggcgccaagtggtcacggccaagatagtcaatcaggccgacatgctgtcccatgcgccggccgcccaatcggcgctgcgaggtatggctcggcgcgtccgctcaggcgatcccgacaacctggaggcccaggcagcccggcgctattggcccgtcatgctcggagcgagctttcggcgtgatcacgacggtcctcctccgaacaacctgctcaactacggatacacggtcctgcgcgctgcggtcgccagggcggtcgcgggcgctggtctgcaccccagcctcggcctgcaccaccacaaccgctcaaacgccttctgtctcgctgacgacctggtggaaccgctccgccccctggttgacagccgggtccgaaagctgcaccaagccgggctgagccagatcgacaaggaaaccaagcggcagttgctgggagtgctgactgagaccgttacgttgggcgacaacgccggcccgctcatggtggccttggagagaatggccgcctcgctggttcgctgctacgaaggccagtccaaacgcctggacatacccaaaccgtggaactcagcggataccgcttcatgtggctgttcgtgatgttcgacctgcctgttgacacaaaggccgccaggaagcactacgccgacttccgcaagaagctcttgaaggatgggtttgccaagatgcagtattcggtgtatatccgacactgtgccagcgaggaaaacgccgatgtccacaccacacgcgttgaggcaaacatcccccctgacggggaggttcgcgtcctgcgagtcaccgacaagcagtatgaacggatgcggatcttctggggcggaaaacgcaaaccgcccgaaaaaccgcccgctcaacttgaacttttctagaggctcttattgcctaagcctctgttctgcacccgcttacgggacaggcagtgtaaccgatcccagcccgtaagcaatccgcaacgccttgccctccggccccatgcggccgaatagtgtaaccgatcccagcccgtaagcaatccgcaactcggccccgaacgggcagacgaggcgttcgagtgtaaccgatcccagcccgtaagcaatccgcaactctccagaaaggatggaaggtcacatgtcaagtgtaaccgatcccagcccgtaagcaatccgcaactacaggtcaagcggaccttcacattgcctggagtgtaaccgatcccagcccgtaagcaatccgcaactggcgcgtgctttgggttgctcgccctccgagtgtaaccgatcccagcccgtaagcaatccgcaacttctaccgcggtttcgatcttggtgtatgcagtgtaaccgatcccagcccgtaagcaatccgcaactgttccgtgaggcttcgcaggcgtctggcgagtgtaaccgatcccagcccgtaagcaatccgcaactggccggacccgatcaacggcctgccctgtagtgtaaccgatcccagcccgtaagcaatccgcaacggagcaaccgccggggcagggatcgttctcagtgtaaccgatcccagcccgtaagcaatccgcaactggaacaggtggtcgagggcggcgaggagttagtgtaaccgatcccagcccgtaagcaatccgcaacgcagcggcaccgggatgtatagctggttctagtgtaaccgatcccagcccgtaagcaatccgcaacctatggtgccgcgggcgtctcgcccgcggagtgtaaccgatcccaggccgtaagcaatccgca

SEQ ID NO: 1614 - DNA, 14644 bp, synthetic construct
  variation 13741..13742: note = n is a, c, g, or t
  variation 7518..7519: note = n is a, c, g, or t
  misc_feature 1..14644: note = Synthetic
  variation 14145..14146: note = n is a, c, g, or t
  source 1..14644: mol_type = other DNA
  variation 11300..11301: note = n is a, c, g, or t
ttgaagttcgcggccgtcagcggggtgatcctgccgctggttcccgatgaatcgctcggtccttacggggcattcaacccgcacacaatctggttgatggtctccttggtaagtggtgtcggatttctcggatatctcgcggttcggatgctgggacaaagtgttggcatttccgtgaccgggttgctgggggggctcgtttccagtacggccacgacgttgaccatgagtcgtcagagtcgggaacgccctgccgaatcgcgtgattgctcccttgccattctgctggcctgcacggtgatgaacttgcgggtcggattgcttgtcgtgatcgttaatcctcaagcgctcagttccctgtggccttccctgttggtttccagtttgccggggacgatttggtgtgcctggcggctgatgcacggtggatcaggttgtgcgaacggtactccctgtgagatgcctgaaaatcctctccgtttgcgcgtcgcctttcaatttgggctgctttatgcagcgatcatttttttggtgaaagtgacgatcgccaagatcggcactgaaggggtgctggtgttgagcggactctctggattggtggatatcgctgccatcacgctctcgctttcacagatgttcggaacggggtcgctcgatgccatgaccgtgtctcagggaatcctgctggcggttctcgccaataccctcttcaaggccggaattgccgctttcttcgggacaccaatcctccggaaagaggtgctgatcgtccttggggtgacctccctcgtggtgattgcctgctgccgctttctggtacgctaattcttgcttgcgcccagaatcaatttttcgaccactcgggcgtcttccggagtgtcgacgccgatgccccggtgcgaggtttccaaaacacggatcggaatcccgtgctccagcgcccgaagctgttcaagtttttctgagagttcgaggggtgtgggtgccaggcgtacaagcttccgcaggatgtcgcgtctgtatccataaatgccgagatgcaggaggggatcaaccttgcttgcaggatcgtgggcatcccggtgaaacgggatcagactacgcgagaagtagagggcgtcacctttgcaaccaaggacgactttgaccgtgttgggattttccgcctcacgaggattttcaaagcgggtggccgctgtgatcatggcaatctccggcttgcggattagggtcgtggcgaggcactcaatgagtttgggatcaatcaggggctcgtctccctgaacattgatatagtgggtgattccccgcattttggaggcgacttcggcgatgcgatccgtgccactcggatgatccggagaggtcatgacaacttcagccccgaatttttttgccgctgaggctatccgcttgtcatccgtggcgatcaagacgcggtcgatatttcgggccaggagggagcgttcccagacatgctggacaagcggtttgccggccagtggatgaagggattttcccggaaatcgcgtggagccccaacgcgccggaatgacgagggcgacggaggcacgggtctgtttgagctcggaatgcttaggcattggaaagggcggtctgaatggcttccctgatggtgggtgtacgaaagtgtggatggcagttcgagaaatcacggccataacccgtctccacaagaatggtgcggacacccgcattttccccgcattcgatgtcgatctgtttgtcgccgatcatgaaggaacgagcaaggtcgatgcggtgttcttctgcggcctcaaaaatcatgccgggcgcaggtttgcgacgcagagaatccgagtttggaagatcgggagacatgtagacgccgtcaaccggaactccgagttggcggtagacttcttcctggacggcgtgaaactgatccacggtgaagtagccgcgcccgatgccactttggttcgtgatgatgatgatggcccatccgagggcgcgtgcgcgcgccagttcctcggaggcacccgggtagacagagacatcggcgggatcgcagcaatgatccacctccttgatcagggttccgtctcggtcaatgaacagggccggtctcaggagttgctggatcatgaaaccaagtcgttctgaaagctctgttcaagctcctcgcgtgagcaggttgctgtgccgagttttccgaccacgatgcctgctgcatgattggcgatctccgccgcctcttcaggcgtggctccggctgccagcgcgagggtgtaaagcgagatgaccgtgtctcctgcgccggaaacatcgtagatttccctggcgcgggtcggtgtgtggtagggggggtgatccttgcggaagagcatcatgccctgttcactgagggtgatgagcacagctcccgcctgccagcgttccagaaggatgttgcccacgcgaagcaggggttcatcgttttccacgggatggaccggcggggtgaggggaacacctgccacggtgaatgcctcggaacggtttggcttgatcgtggcgatgcctggccattcgaggggattcttgggattgggatcgcaggtaaccaggattttatgggccagagccgtctccatcacggcgtcgacgaattcctgatccaaaaagcccttgccgtaatcttcaaaaaggatcgcatcggatttggcaacaagagcccttgctttttccagaatgtcgacacgccccgatcctgtgacggtgcgctgctcgcggtccacacgcacaacctgctgacgctgtgcgataatgcgggtctttacaatagtgggggcttggctgtcggtaaagattccttcgggcgaaatgccctcctcccgaagcagtgatgtcagtttctccccggcctgatcggccccgatgacgccaagcatggtcacggagttggtgaactccctgagattgcgggcgacattggcagcgccgccggggtaactcgactcacgctggacctcaacaatgggaaccggagcctccggtgagatccgtcctacatttccccagacgaactcgtcaagcatcagatcccctagaacaaggagatgcttggaagtggcggaatcaagaatgtgttgtaatctttgcgggtccataacagattgaattcaacaactagcgtgtgttcaacaagccgcccatgtttcatgacaagcccctgcactgcgagggtaattttcccagattttccatgaagaacttccccctactccgtttccaagcattcgttctggccgccgccctcttggcgattattcctttgcgtgccgacaatcccccaaagaaaatcgccctgtcagattttccggcagcagccgtggatgatgtcgttgttcccgtacctagcgaaatatttgcagtgctcgacaagttgggaaatcccaactggaaaggccagcttcgtgatggcaaggtccagacccccgaggatcgggcccgcaccgccctcctgcttggcaatgtgatcgccgaaggatttgtcgccgttgaggccgaagatgccgaacgggtgaaggatatcgggcgtcaggtgttgacactggccaatgccatcaatgttcgcaaggcggtcatcacccgatgcaagagcatcacggacaaggctgatgccagagactggaagggagtccgatccgaatttgatggagcccttcaggatgtacgggcagcgatggacgaactcaatgatcatgatctctcccaactggtgagtctcggaggatggcttcgtggcacagaggtgctgacttctatcgtccaaaatgggttttcaaaagatggggccgaactgctccatcagccggaactggtgaattacttcgaccgctgcatcggctcgatgtcttcgcgccttcgtaaaaacccgcttgtttcccatatccgcgatgtgcttcgcaagatcggtccgattgtcggcgaaagtggggattccatcacggcagagaatgtgaaaatgatccacgacttgacccgggaggtaaatgagcaggttattggaggaggcaactgatcatgaaactttccaccgcctcatcgttcatgttttcacgaattgctttccagcactgttgccttctgggtgttgccgtcatttgccttggatctccctcgttgctccgggccacggtggatgattcggtctcgtttgcctacgaggccgctcttccctactacaaacagggattttccatccgcaaggatgcctggggtggtgatctgggagtgcgcgagaagaaggctgtcagcattcagctcttcaaggggaacacctactggttcctgatggcgacagaggtcaagggtggctcgctttctgtccatctctatgacgacaagggtaatcttgtggaggatgagagctggcagaaggggcgttttgccggtgcccgtgtgaatcccaaatcaactggaacttatttcgccatcgtccagatcctcaagtcccccgaggagcgtaccacgtgggcgttggtttacggctacaaatagccgtttcttattgaagacggacgaacagatttttttaccaagcaagcggaaggaagtgggttcttccgggagtgtcacgctggagtttgcaaacgcccgcgcccttcaggagcattttgccggtgacgagacactcctccgccgagtggaggaattgctttccgttcacatcacgagtcgtgacgggtggttaaaagccacgggctctgcggaagggttggaaaagctccaaaccctctttgccgagctgggtagagtccgcgctgcgggaggagagatcggccgccaagaattcctgtatgctttggaaaagtatgcccggacgaaggaaaatcttgctgcgggctctggattggaaggtctctatggtgagcgcatccagtgttcccctcggaaaccacccgtgattcccaagacggaaggacagcgcgattatctgcatgcgatcgaagcccatgacatcaccttcggcttaggccctgccgggactgggaaaacctatcttgccgtcgccaaggcggtggctgccctcaaggctgaaaaggtgaacaagatcatcctgacccgtcccgccgtggaggcgggggaggcgcttggtttcttgccgggggaattgcaggaaaaaattcttccgtacctgcggcccctttatgatgcgctgcatgatatgatggagcaggaggagatccagcgcgccattgacagaaatatcatcgagatcgctccattggcctacatgcgcggacggacgctcaacaaggccttcatcattcttgatgaggctcagaatacgacgaccgagcagatgttcatgtttctcacccgcatcggcatcggatcgaagtgtgtggtgacgggtgatgtcacgcagattgatctgcccagaaacaagccgagcggtcttgtcgaggccatcggagcactccgggagactccggcgatcgcctttcatcattttggcgagcaggatgtggtgcgccatccgctggtgagggccatcatcaccgcctataaggagcatcgtggcttgcgtgaaagccgattctaacagccaaccttttttcccatgattcgtttcttaaaaaaacagcgccttgcggcacgaggaatgagctgtggcaagacccggcttgcgaccagtgaacatcatgtttttgatgctctggagaacggcttgctgatgcgtgcggtcaccatcgttgcggctgcggttgttctgctgcttttttccctgagcggaaatcacgccgagccgctgaaacattttctctatgcctcgatcatcctggcgctggcggtgattcagccattcgtccagagagattcattacttcaggggaattcacgcctcgccctcttccttggcatgattctgctgcagatcggcatcggtaaatttctccaggcccaggtcctcgccagtcatcttgacatcagtttgcttccgctccttattccctacgccttggctccgctgaccctctcggtacttctcggttctacggtgggattctcggcctgtctcgtcggggcgctttggtgggccgttcttcaggacaaggttgatcaggtgccgcttctgatggtgttgacctcgggagttgtctccgtccttgcaaccctcagggtgcgtcgtcgttcccggttgctcagggctggtttatattcaggagtggcggtttgtattctgggtctcctgaccgagatgatcggaccgatcgtctgggaagcaccccagatcaacgactggcagttgctcggtctcgaatgccttgccgctgtcggcaccggggtcatcacggccgtcgtggtgagcggttcgctgcctctgctggaaaaggctttcagaatcaccacggaaatatcccttctggagatggctgatctgaatcacccgctactgcgtcgtctcagcatggaggcacccggcacctaccatcactccctggcgatggcgaatctggccgagacatgtgccgaaaaggtgggtgcgaattccactctctgccgcgtggctgcctattaccacgatattggcaaactggtgaaacccgaatatttcgtggaaaacattcccgcagggacgaatccccatgatgatctgactcccaccatgagtgccctgatcattctctcccacgtgaaggacgggatcgatctggcgatccgcaacaaacttaacagccgcattgtcgatggaatccagcagcatcatgggacaaccctggtggagtatttttaccagcgtgcctgccgtcaggaacgcgatgcccgcgcaggaggggatctcatgaagatccggcaggaggatatccccaaggtcagtgaggaaaacttccgttattcaggaccgaagccccagagcatcgaggctgtcattctcgggctggcggatgccgcagagagtgctgcacggagtctggagcggcctacgctccaacgcctcgatgatcttgtccatgatctgctgcaggatcgcattaacgacgaccagtatgacgaggctcccgtaacgatgtgccaattgcaggagattgcggctacgctagtctcctgtctggcgagcatgcatcacacgcgcatcggctaccgccgtagggatgagtcagcgacaccttccgttgccgttgcgaaggggtgatattactcccttctaattcctcgtggttgagggcgattttatcagaagggtcattgctgctccgatcagcagcagcaccgctgcggtgataaaacttgagttaaaagaaccgcttccagccttaagcatctgttgaaggcggctgaggacgaaaccgcccactccccaggccgtaaagaggcagccgtaattcatcccgaaattcttcaggccccataaatccttggtgaaggaggggaagagcgaaagattcgctccgtaattgaatccaatgaacgtcgccacaaggacgatgacatattttgcaccgtcgatggaatttgtgacaggaatggcgaggaacatcaggnngtcccgcgacaatccggcccgccgcattaccgagggccatcaccgccacggcaatgaatgcggaatcacccatggtctttttggccatcccgctgatgctgctaatgaccatcaggcctgctcctgctccgatgaagtagagtatccagagcagccagaaggagggggtgcgtacaatctgaaccggagacagattgaccgtttcgaccggttttgagtttgaaccgccagctaagtctacggaataaccggcaggagggttgacaaggagttgtgccaatccgcaaacaatgacggcaaaggccacgccgaagatcaacatggccttgaggagaccgaaatttctcaggaggaagtccgaggtcggggcgaggtaaacgggggcaaggccgaatcctgctacgaccaatcccgcgatgagtcctgttttggatggggggaaccatttcagtgctggtggtgtcgccgaggaatacccaaagccgataccggtcccgaccaggactccgaagcccaacacccagacggtatagctgttggtcgtcgaaatcaggatcatgcccgcagccaccagcagtcctccgatggatgctgtcagtcgggggccgaatttatcctggcagcgcccggccagaatcatcgcgaaggcgaaaacaaggcagcagagcgcgtaaggatcattcagctgggagcctttccaaccgaagtctttttcaatcgccgccttgaacatgctccaagtatagagcacgccgagggcaaggttgatgccgagtccggctagcgcaacgcgccagcccttgtggggggattcaagggaagtcacaaccggtctttagacacaccggaggagggcgcaaagaaaaaagaaccagcaatagatctctaaagtttaaccccgaagcgttcacctttccctgtatcgagtgcgaatgcggccagcaactcagccgtgcgttccaaatctgaatactggatcatctcgacgggcgagtgcatgtagcggttgggaactccgatggaaacagttgggatgcctcccttctgtttgaagatcgcgtcggcatccgttccggtccagcggggattggcctcggattgtagggaaattttggatttcttcgcaacctcgcgaaggcgtgcgttgaccacggggtggttgacgctgccaaggctgagcactgggccatcacccatgaccacatcgccatgcttcggcttggagcagttcgggatatcggtggcatgggtcacatccacgacgagagccacatcgggatggacgctgtacccagccattgaggcaccgtagaggccgttttcctcctggatggtggagacggcgacgatgcgggccttgagattttttttatcgagcgaggcgaggcgcagtccttcggccgccgtccaagctccaatccggttgtcgcagccacgggcggcaaagcgtcctcctgcaagctcctcgaaggccgcagtgtaggtcaccgggtcaccaacgcggacgagtttctccgcctccttttttgaggagacgccaatgtcgatatgcatcgtgtgcatttcgggtactttgttgcggtcatccggttcctgcaggtggatggcgaggaggccggtcacgcctgggacgggtccttgtgccccgtgaatggtgacacgctggcccctgatgagggtgcggtcgacaccgccgatccccttgaagtaaagaaatccctcggtggaaatatgcgaaatcatcagaccaagttcatccacatggccactgaagagcacggtcggatcgccctttccgctggcgggattgagcgtggcaaaggcattcccatacgcgtcgatctccacggaatcggcaaagtgcttcacataatcgacccagaccttctgacctcgggtctcaaaaccggaaggggagggggtgttgagaagagtcttgaggaactcgtagggggcggattttttcatggggaaacgatgaggtgaaaagctgcaacctgaaagctgaaaaggtgcgtgggaacgcagcttagtcattcgaggccgtagggccgagaagtccgaggatcagcaggtccgaggatgcctgatccgggaggatcggcagacaaaccgagtttgggaaaaggggaggattctcgcgcaagacgcaagactcaaagagtagatactgtgggaaagagagggggtacaagtctaggagattgcggatcgctttcttaaccgagcggaactgcggctcgggaaactgtccgagctttcggagcagggtatgtctgtcgatgctgggcagcccttgcatgttcagcccctctaaggttaacaattttaccgacaataaaaaacggcgacttcagagtttgtctcttggtcgccgttttgtttagaagcgctattgatccgatgtatgaccttgggtcacagtgaagcgggctgcgctaccaactttgtcttgattccgaccccaaaataaaaccctccatgaaaatcgcaatacaaaatcttcagtttgcttttgatgtcggtcataattctatcggatggtctgtacttgaagtaggtggtgaaggccctgacatccagggatgtggaacggtgatttttgaaaaagatgggtgtctggcagtcaagagacgcacttataggaggcaacggcgaaatatccgtgcgacgcggcaacgaattgcccgcatgaagagactactgttccagcttggagtattgagtgaatatcaactggattcagtgacatcatccagtccctggttccttgcagcgggggttctcaccaccggacgaaatctcacatggccagagctttgggatgtgctccgctggtatgcacataaccggggttacgatggaaataggggatgggcagacaattctgttcatatggaagatagagaggatacagaaaaggtcgaaaatgcccgtggtctttatgataagtatgggacgcggacaatggcggagacgctctgtgcggaattgagtattgatcttgcgagcggaaaactttcatccatcaagcggttcaaggggctcaatgcggcctttccgcgagaagatgttatggatgaaatcaggcgaatcctggcagctcaccgaggagtccttcctgctgtagatgatgctctcatcagaactctcattggcaatggacccgctgatgccgatgcatggaagacgattcctgtggaaggaatgagaatcccccttcgctatcgcggaagcctgcttctcggtcaactcgtccctcgatttgataataggattatttcgcgatgcccgatcacctatcagcgggtgcttgttgaaaaattggacgaagggctggagcaatccgaggcagaacgggaagcatcaaaactttccaaagttccctcaaaaaactgtattgagtttttgcgttaccgatgggcgatgatacttgccaatgttgtggttggagggatcgacgggaagatgcgcacactctcgattaccgagagaggcgaggtagatcgtgagatgaggttgaaggggaagttgactccgacaccgttcaaattttgcgtcctctctgttactggtgcggtaaaaagtaatcttgaggaaatgtttacccatcctgatgcgggtgaatcacttgtgctggatgaagccacttaccaaacacagcagggaaccgtagccctcatctggtcatctcttgatggggcgatgcagaagaggatccagggcaggatgcgtgagggaaaacaaatttctatcgctgagatcgtgcagggaaatgaannactggaggccctcaggcaatctctgcattccatttctggtcggaaagtttctaccaaaaaagaggtgaattcattggaaaacctgcttgcggagatcgtgtctatcaaacccatcattggtcgtgctccctatagcaggacggtgatgaaggaggttgtggctgatgtgatggaacgggggattcatcccacagcggaaggaggagttctttatcgggacgaggcgattcgcttggctcaaataactcgtcggcttgacgatcagacgaataatcaccttgtacgtcaccgcctgttgatcctggaacgactgcacaacgatttgattgaagaatatgccgaaggcgacattgagaggatcggacgcatcacgattgaggtgaatagtgagcttcgggagatgtcgggaaagactgcaaaagaagcagcgcaggaagaggggttaaaattagccgacttcaaatcggtcaccaaataccttgaagagaagcttgtggggacaggtatcacaatcaatgctgggctgattcgcaaggctcgtatcgctcacgatcagggatggaaatgcccctacacaggaagagaatttgatgtctttgatctcgttcatcggaaagtggataaggatcacattatcccgcgtagcatgagacccagtgacagtcttgattcgctcgcaatcactttttccgaagtgaatcggatgaagggccaacggacggcggcagccttcatcgaggaatttggcgggaaggaagtcgagggaaagccggaactctcgatcatgtctttagggccgtaccaagaagcggtcaaaatgctggatgagcgccgaggacacgaggcggacaaacgccgaaaaaagaaccgcaaacggcttctgctgctcaaggagtatgtagagaaggaatttacgcccggtgatcttaccagaacctcacagcttgtgcgtctgggggcgcagttgctctccagaccctatttggctctggaatctcaaccaacgatcacttccttgcctggtagtgtcaccggagcagtccgcaagagttggagagtcttgggatgtctgactcaggctaattcgcaggtgacgaatgaaacgaccaaaacggaagttcgttccatcacccatcttcaccatgcccttgatgccacggtgcttgctctagctacctatttcctcccaagagatggaggaatctgggagttgattatcaaaagaaagctcacgagtgcagagcaggagcatctccttgcaaagggaaggcaatttgcccgagacagtgagggaagagtttcgttgattgatctacccacctatctgaaaaatcagctcagtgcccgtttggctgaacgacgagtcgttcagcatatctcagcagacatgagtgggttggcaaccgaggagacagtctatcgggtactggatccgcgggatcagcatccctctgctcagaagcttagaaaatggtgtgcgctttcaggtgtcgaaattcctgatccgaaggattcacaggtattgctgatctctcggaagcgaagaggagagagcgagagtggcaagctaccgaaaaacattctccacgagacgaagacttggcgatggacatggcagcatgaaaagagatcgaagctgatcgggctggaacagaaagatggtgaaaatggaaaacttcagtcccttaaggcggtgaaaatcattggcgaaaacttcggcctcgctctagatcctgaaccagaagtgatccagttgagcaatgtatggaagaggctgcgagaagtaagacaacagcatggccgacctattcgcgtgcttcgtaatggtgatctgatcacgctgacatcccccgatgttgacgaaaaacgccgaggactttggagggtgatgtcggttaagaataattcgtcaggtcttgcactcgatcttgcaagacctgatgaaacgcagtccacatggataaatacattggtgcagagccatttgaaaaatggtttagtgactattagcactagcctttctggattaactcgataaaaccatttccttctaatattctttttccgtgggataccacacggtcaccattgacgcggcagattgctttctcggttgcaaatcgggtcagttgatctgtcgaaccaaggagggagagaagagtctcccgcttgaggatgtagcaagtattcttgtaacgggtttcagcggtaccgttcatagtgagctgctcctggagtgtgccgagagaggagtgccgctgattttttgccggtccttccgtccgacggcgctcgtttatccctccaatcgttccacggacactctgttgactcgtgctcacttggagctggggcgtcgggataaactcctgctctgggaatgcacggtaacagccaagtgctgcaatcaatggatgactgctcgagacttctcgaatgnnggatgggaatgccataaaacaaatggaagtaaccgcttttggccgacatccgcagaaagagggaactatcgctcgtaccttctggaagctctggggagaatcactgaatatgccagaatttcgcagggtgcgttccatggagggtgcaaatcagatgcttaactacggatacgccgttttactctcagctgtgcttcaaaaactttttgccgtgggtatagacccatccattggcatttcccatgtcgtcagagagcgaagtgatccgctggcctatgatctcatggagccatttcgggtgcttgtagaccgccgtgtggctggatggataagagaaaaaaatggcgaacctctcgttattgataaatcatttcgggcattcattgtctcttttttgatggannccctacgaacatctcaagctggaggtttcttcctgtatcgagtcagtcgtccgatcttttagaagggcagtcgtggaggaaaaaccgggactctatcgtccatggatactcaaacactgaaaatgggctggcttgtcgtagcctttgatctgccggtcggcaccagggagcaacgtaaatgcgctaccaatttcagaaagtttctgttggaggatggatttcaaatgattcaatggagtctttatgcaaggagttgtgtcagctcggcgcgccagaaaacacacatggcgcgagtccgtcagaacctccctcctgaggggagtgttagagcaatctttgttaccaggtcacaatgggatcattctttcgtgatccacggggcccctgctgagaaggccatgccggagaatatgccagaacaactcatgatctggtgatcagcgtaactccctctgctgaatgaacttcagcagagggagtttctcagcctgtgaattg

SEQ ID NO: 1615 - DNA, 11162 bp, synthetic construct
  source 1..11162: mol_type = other DNA
  misc_feature 1..11162: note = Synthetic
gaaagagaatgcgattaccccaaggtttcgcaggaatgtcgagtgattcaaactgaaactagaactgtcattgtcgatccttccatcatcgcgcgcctgaaagcgtatgagcgagttccatcgatcgaagtcgttcggcatagcgtgcagatgtttaatgccaaaattgagaaattcggtcttagcccagtgactagcgaatctgatctgttctatctgcccgaatcatggaactatgatccggattttttagggtatatggctgaaattgttaaacaatctaaggcagcaatacccggaggtttctttctctaaccctcatccgtcgcatctaatcaatccccatctcatcaggatgccttgttcgtctttcttcgaagaggcaaggtattcttcttccttaatcctcatgaaagcatatcacttcatcatcgaatatgaggatttcgaggcgaccatttgcctgattggcgaatggtctctttatgatctggctgagtctttgatcgatgcggttggatttgatttcgatcattgctttgagtttcgcgacaatctctcccgccgcactcaaagcaaggaacggtacactctctttgccgacatgggtgaggaagcggatgatcccggtgtcaagaagacgcttctctcctcggtcttttcggtcggcaagaagatgctgttttatttcgattatggagatgactggcatttcccagtcacctgtacggccatcgaggattccgtggcaaaacggagatcccggcagttcatctcccaaaatggaactgctcctattcagtatcctgactatgatgaggaggaatagaattggatgattgatccgaaatctgctaggatatgactcatgactctgaaggaaaatttcgcccgctggcgtcagctgactccggaggagaagctgcgtcgccgctgggaggcgattccgcaggatgtggctcagagcatggccttcgagggggaaccggtgccgctggagaggatccgcgaacgactcgccctgatcgagccacccgctttgttgagaccacgcggggaatcctgagttatcaggaactggctcccctgctggcggagcgggtgaccctggcggaggcggcaatttactcgggggaattctccgaatgctttctcgacgagaatctgattctagcgattcaccatcgcatctgcatggatctggttcccgactgggcggggcgctggcgttccgtcgaggtgagggtcggaaacctgcatccagcccagtccttccttcttccgatgttgatgcgcgattatacgctcgatcttcgcgcccggttggatggggcgaccggaggtgatgagacagcgcttttggagtgtcttgctttcgccgagggaaggttcctcacaatccatccgtttcaggatttcaacgggcgaacgatccgactgctgctcactgaattactgagaaggttagatttgccgatggtctccttggctcccgagggggaggaggtccggcagtgttactttgcggcgcttgaggctgctgatgtgcacgactggcgtcctttgatgaaggtctgggaggggcggtttgtcggggagtaggaatgaacccatcatggatcttctccccatctccgcgctccagcattacctcttctgcccacgtcagtgtgcactgattcatctggagcaggagtggcgtgaaaatcgccttactgcggagggaagggttcttcataagaaggcacatgacgggcccgacgagtcgagacccggaatccggatcacgcgtggcatggcagtctcttcttacctactgggactctccggccaatgtgacgtggtggagtttcatatggatggaactgtcgtcccggtggaatacaagaggggatcacccaaggctcatgaggcagatgagatccaactctgtgcccaggctattgccctcgaggagatgcttggactttctgaatacgggatcagggaaggtaggattttctacggaaagcacaggaggcgccacgctgtgatctttgatgaggagcttcgggctctcaccttcaacacgtcggttgctctgcactcgatgatcgcctcccgtaggacgccagcccctatctatacccccgataaatgcgatgcctgttcactcaatgagatctgtaatcctgaagcctgctcacccaagagttcgactcaggagtggtttgaaaagcaggctctatcaatgcgccaatgaaaacacatctcaacaccctttttgtgactctggaaggctcctatctccgtaaggatggtgctgctgtcgaggtgcgccacgagggggaatccaaactccgggttccgctacataatcttgagggcattgtctgcttcggatacgatatctccgcaagcgtctccctaatggcaggatgctccgaggccggggtatctctttcctttcattcaccaaccgggaaattcctcgccgcaacccggggattcacctcgggaaacatcctccttcgcagggagcaataccggagggcggatgatgaaaaggcctccgcaaatctggcgaggaatatcattgctgcgaagatcgccaattcccggaccgtgcttctccgggcagcccgcgatcatggagacaaggatcccgttggcacgacggccctgctaacagcatcggactttctcgatcaccgcttggcgatgacattaagaaccgagtcattggatagccttcggggtatcgagggcgacgcggcggcggcttacttcagcgtcttcaagcaccttgtgacggtgagtcatggagggttttctttcacgggacgaacacggagaccgccgtgatcgcggttgatcagtataatccggcagcccttcacaaggtcgacctgaagggactggaagcctccctcaaggaactcaaagccaagggagtgaagaatatctttgtcttcgcccacgaggaggcattcaccgcaggttgccatcccgacgctgacaacatggccgcccatccgacggatcgtgacaagttcctggaactacttcgcgagaacggatgtgagtacttctttgtcggccatgaccacttctacgattggatggagatcaagaactggcgttggccctccgattacgcgctcaatcagattgttgccggcacggctggcgctcccttctatcctgacaagacctactttggagggcacgacgggtacgaactcgtgcgactcgaccaccggcagaacacctacggatacctccttgtcaccgtgaatgatgccccgaaggccgacgagaaggccgtgagtgtgaagtatgtgccacttgcactctgaagaggcttgggattaaggcgccgcggggtgttcgactacgctcgcaacgccgagtgctgggaagcacggagtagcctgtgcaaagcacagccccgtaggggtgaggccgtcgggagacgtcgaggcaatatgattcattacagcttcgcttgtcggcttaccgcagcatccttaattccaagccttcgaagaaaggtcaaatggcactgtgttaccgttacaccacagtttgatttattaaggcctaggaccttgatggggaggtagggttaacacatgaaattagcccatgtgactgataaaaccacaccgtgtaatccccctttctagcttcccatggacgaccttacggccacaaatcagatcgagtcacttatctataatgtcctgtttaaccatcttcccagcttcgacgagattgttaaaagtagtagccctccctactggtggtatgccgagatcccggaactcaatacctttctgatcttgcagcagaagagtgagccgagtcctcacccagtctccgaatatgtttgggaacatccgaatgatgtcaccatgggagaatactacctcttgcttgagtttgaccccgattcgatcggagaagaagtaaccatctcaatgctcgaagcgatcaaggaactcccggtctacgtgcgatttgttgaggacctcattccttacgcccccaccgaggcgattgagattatgaataacttgatgaaataaatcatggcatactcaaagtctcatagcctctgcagtagggtgatgtttgtgaacgggtaacttttaacaagcctaggacacttggtgtcttgatggggaggtagggttgaatgaaatgaaagatgttttatcacaaaaaaaacggcgacctgaaggtcgccgttttcttagaagcgctattgatccgatgtgtaaccttaggtaacagtgaaacggtctgcgctaccaactttgtcttgattccgttagtactctaaaagttcccttatgaataacacaactcaaaatctcgatctggccttcgatgtcggccatgactccatcggttggtccgttctctcacacgaaggggatgcgcctgacatcaagggatgcggtgctgtgatcttccaaaaggacgggtgccttgctgtcaagcgaaggggataccgtcgtcagagacgacacattcgctcgacccgccagagaatcgctcggatgaagagtctgcttcgtgccttgggggtccttgatgacagggcactcgacgaggtctcctcatccagtccgtggttcctggccgccggtgttctggtgggaagcaggacgctgacatggcccgaactctgggatgtcctgcgctggtatgcccacaaccgaggatacgatggcaaccgaggatgggccatcaacgacagccttgaagaggaggatgacacaatcaaagtcgaaaacgccaaggggctctacggaaagcacggcacccggaccatggcggaaacactctgcgcggaactcaaaatcgatccgaagggagagaaggcttcctcccggatgcgcttcaagggtttggatgctgccttcccgcgagaggatgtcacggccgagattcgccgaatcctagaggcgcataaagatgtgcttcccaagatcgatgacctgctgatccgttcactgatcgggaaaggccccgatgactacgaagcttggaagacgatccccgtcgaggggatgagaataccgctccgctatcggggtagtcttctcatggggcagttgatcccgcgatttgagaacaggattatctcccgatgccccgtcctctatcagcggatcctccagaagaggttggacgaagggtgggtacgcgaggaggcggaggccgatgcggaaaaggggtccaaggtgccggccaagtcggtcgtcgagttcctacggttccgttgggcgatgcttctggcgaatatcctcatctccgaacccgggggaaaagcccgtcccctcaacatggcggaacgctctgcgatggatcaaaagatgagggaggccggatcgatgacggcgaccgagttcaagaaagccctcattgaggtggtcggtccgctgaagtcgaatgcggaggcaatgctcacccatccggacgccgacaaggccctcgtgctcgatgctgcgatgagggaaatccgcaagggggccttcggaattatctgggaacatctcgacgagcaaacgaggaagagaacgctggggcggcttcgtcacggaaagccggtagatctggtcgacctcgtcgcaggaaaccagaaagccaaggaggccttggaacagcatgtttccaaagcatcgaagagcaaaggcaagggagccaaagtcgcaaaggctcctatcaccctggagagccttctttctgagacgatctcggtgaaccctccgcaaggaagggctcccttcagcagggaggtgatgcgggaggctgtcgccgatgtcatggagaggggaatccatccgacagccgaaggaggggttctttatcggggtgaggagatcagaaaagctcaggtcgaaagaaggctcgatgaccaaactaacaaccatcttgtgcgtcaccgcctcctgatcctggagcgactgcacaacgacatcatcgaaagctatgcggacggggatcccggacgcatcgggaggatcaccatcgaggtgaacagcgaactccgcgccatgtcgggcaggacggccaaggaaatcgcccaagaggaggggaagaaattggcagatttcaaggatgtcaccaaggagcttgagaagcgtttggagggcaccggaatcaccatcaccgcaggtctgatccgcaaagcccgcatcgccaaggatcagggctggagatgcccttacactggcagggacttcgatgtgatggatctagtgagccgcaaggtggacaaggatcacgtcatcccgagaagcctgcggccgagcgacagccttgattccctggtcatcaccttctccgaggtgaaccggatgaagggtcagcggacagcattggctttcatcgaggagttcggaggaaagcccgttgatggacgcccggaactcagcatcatgagttcttcttcctatcaggaatccgtgaaaaaactggatgagcgcaaagggcacgacgacgacaaacggcggaaaaagaaccgcaagcgcctcctcctaatgagggattatgtcgagaaggagttcactccgggggatctcacccgcacctctcagttggtgaggttgggagcccagttactcgagcgtccctacatggagcaggagaagagacccgtcatcacctctctgccggggagcgtgaccggcgccgtcaggaaaagttggcggcttctcggatgcctccaacaggcgaactccttggtgaccgacggaatgaccaagaccgatgtccggtcggtcacgcatctgcaccatgccctcgacgcctcggtgctggcgctggcctcgcacttcctgcccggggacgggggaatttgggaattgctcgtgaaaagaaagctctcccccttcgagcaggagcatctcttgaaaaaaggacgccagtttgcccgggacagcgaggggagggtctctcttatcgaccttccctcctatctcaagaaccagctcggggagcggcttgccgagaagcgggtggttcagcatatccctgccgacatgagtggattggctgccgaggagacggtctaccgcgtcttcgatcccaaggacactcatccctcggcgaggcggattgccaagtggtgtgcggctcgcgggattgagatcccggaccctcgggatgaggaagttctactggtctgtcggaaacgccgggccgagcaggagagcggcgaggtgcttcatgagacaccgacatggcgctggatctataagatcgaaaagcgttccaagctcctcggcttggagcctgcccacggctccaatggaaaactgaaggcccagaaggccgtgaagatcatcagggagaatttcggactggccttggatcccgaaccggaagtcctccaactgagttccgtatggaagcgtcttgccgagttaaggaaacaatgcggtcagaagatccgagttcttcgaaacggtgatctgatcacattcacgtcgccagacactccggaaaaaagacgtggaatctggcggataacctctgttcaaaatgctgaaaaaggcatcaagatagacctgttccgaccagatcaacttgtgcgtagcaaggagtcatggagggaagttccaattggtaatttgcataagtatcaggtcaaaattataaaaccaaagctcacgggtatttagatttgtgggcttccataccgtcactgttgatgcggcggaatgtttccttgggtgtaagtcttcccaactgatctgccgaaccgacgagggggagaggaccctccccctcgaggatgtggccagcattgtggtgacgggttttagcggcacggtgcacagcgagcttctgttggaatgcgccgagcggggtatcccgatgattttctgcagggcctatcgtccgagtgcgctggtctatcccgcgaaccgcagcaccgacaccatcctgacccgtgccgtcctcaggttgagtccaactatcagaggcagcctctggcgtgccacgctcgatgccaagtgcctgggccaatgcacggccgctagggagtatggagctgatccagcagaccttgtcccgatggaggccatggcccgtggaaaaaatcccgctcgggaagcagccgtggcaaggtcctactggggcctctggggggcttcggccggtcttgggaagtttcaccgggaacgatccctcgacggggcgaatcagcttcttaactacggttatgcggtcctcctatcctgcgtgctccagaagctcttcgccgtggggatcgatccctccttcgggatcgcccatgtcgttcgggagcggagcgatccgctggcgtatgatttgatggagccgttccgcatgcttgtcgatcgcagggtgcgggagtggattatcgaactgggagattcggaatgcgtggtggacaaggcattccgagcccatgtgatccgattcctcaaggatcccatcgaataccaaggccgcccaatggagactgcctcctgcgttgaggcggtagtacgatccattcgcgcggcaatccttaggggaaagtcttccctctaccggccatggaccttcacacgctgaaaatgggatggctcctcgtcgccttcgaccttccggtcgggacaaaggaacagcggaaagccgccacggggtttcgggagtttctgctggatgacggcttccagatgatccagtggagtctctacgctcggagttgtgtgaccatcgccagacaggagacccatatggccagagtgagggggaatcttcctcccgaggggagtgtgcgtgcgatctttgtcacccgagcccagtgggagcgttcctttgtgatccatggatcgcccgcgaagcccctgtctccagaggagatgccggaacagcttctgatctggtgatcagaagcaacccgctccgcctaagggagttcggcggagcgagtttctctgcccctgaattggaatcaaggcaaagcctgctcgaggggtaccgcatgatgtgcataagtttctctgcccctgaattggaatcaaggcaaagctgtagaaggcctcgatgccgtacggagattagtttctctgcccctgaattggaatcaaggcaaagcgaataccagctcagattgcgtgaagggtatagtttctctgcccctgaattggaatcaaggcaaagcaccaattagagcgtactacatactcacgatagtttctctgcccctgaattggaatcaaggcaaagcatgatggtaactctcaccatgccacatactagtttctctgcccctgaattggaatcaaggcaaagccagcgatcatgtgcatattcctaccatttaagtttctctgcccctgaattggaatcaaggcaaagcattagtggtggtggtgtgggtttcatagagagtttctctgcccctgaattggaatcaaggcaaagccgccaccacggtaactaatctggaactcatagtttctctgcccctgaattggaatcaaggcaaagccgcatcgggggggggtactagctgggatgcagtttctctgcccctgaattggaatcaaggcaaagcatctgcgaggaagcaccaaggttctgagaaagtttctctgcccctgaattggaatcaaggcaaagcgctggaatggctcatgcctgcgagatcgttagtttctctgcccctgaattggaatcaaggcaaagctaccacagtttgtgctgtcgagattgaaccagtttctctgcccctgaattggaatcaaggcaaagcacgaacatcgggcactcttggatcggacgcagtttctctgcccctgaattggaatcaaggcaaagcgacgatgccagtatcaccgagctaaatgtaagtttctctgcccctgaattggaatcaaggcaaagcagtcctagctggcgttcaatttggctgtggagtttctctgcccctgaattggaatcaaggcaaagctgtgaaccgataaactagcttaatgtgattagtttctctgcccctgaattggaatcaaggcaaagctgttgatgtataaatcaatttgttatacatagtttctctgcccctgaattggaatcaaggcaaagcctgagaactatgttggtgagggaacattccagtttctctgcccctgaattggaatcaaggcaaagcgcccgtcttgctgacaagcacatccgacaaagtttctctgcccctgaattggaatcaaggcaaagcaatgaaaactacaggaaatcgatgcacggcagtttctctgcccctgaattggaatcaaggcaaagcgcagatcgacgcatcatggagcgtatttgaagtttctctgcccctgaattggaatcaaggcaaagctgcgttgatcggactggcaacggagccggaaagtttctctgcccctgaattggaatcaaggcaaagctcaaccgaatcgacgatcaccttgccactcaagtttctctgcccctgaattggaatcaaggcaaagctagaaggtaatgaccaagtaatgtgttcctagtttctctgcccctgaattggaatcaaggcaaagctagagagcgcggtagatgctgcacccgctaagtttctctgcccctgaattggaatcaaggcttcgaagtttggatgtcgcagtaggccgccaagcgacgctgtatgaattatattacctcgccgtctcccgacggcctcacccctacggggctgtgctatgcgcaggctactccgtgcttcccagcactcggcgttgcgagcgaaggtgaacaccctgcgaggccaaaatcccaaaccttcttcctcaggctttgacgcgctcgatgtgcgcgcccagcccattgagcttttcatcaatcgcctcgtaaccgcgatcgatgtggtagacgcggttgatctcggtcactccatcggctggcaatgcagcgaggacaagggcggctgacgctctgaggtcactggccatgacaggtgcaccactgaggcgctcaacgccgtggatggtggcgcgatgatcgatgagttcgatattggcacccatgcgcttgagttcggcgacatgcatgaagcgctgagggaagacggtctcggtgacgacgctggtgccgttcatggtggcgagcatggcacagaactgggcctgcatgtcggtcgggaagcc

SEQ ID NO: 1616 - DNA, 23407 bp, synthetic construct
  misc_feature 1..23407: note = Synthetic
  source 1..23407: mol_type = other DNA
gcgcagaggccgaattcacggtccgtgcattcatcctgccgcgtcgtgaggaatttcccactgacgagcttgccaaagctgcaaaactgtcttcggaaagacagggcatttacatttaccggcaagaacgtctcattcacgatgcggactggctgggtatgttccagaaggaaccgcacagcaccctgctgcgagtagagttctctttcgaccatcgccttgatgaggcattccatctcgacatcaagaagtcacagatcattctcaatgacgatctgtggaactggctcaagaaccagttcctgccagcaccaaggcgggatgcaaacagacgataccgggaaggccagaaaaaagatgtcacgaaaaagagcgagagcgctcatgacgccagcaaccgcaacattggcaacaaggaagccgaagttggcggggccgaggtcaacgtaaccgatccgaataccggcgaagttaccgttgtaaatacgagaggcaaattcacactcaagcttcctgtcggagcggcaaccaaaccgggcgaggtcttcatccagccagtcgatgaggtcagtgacggtctgctgttcgagcctgccataatcgatcaacacaaggcggtccggatcaataccgaccatccctattacagaaaggtctatgtccccaacctgaacaccagcgtcaccgtccagggtatggactccctcttgtgggcactttgcgtggccgagctgagtgcgaccaccgacaagactgccgagaatttcagtgacatgcgttatgaggtctcccggatattgcgcaaacttgtcgaaagcctgccggagccagatacggaatctgaagcggatgtcgcctgatcctgaaacactggcaacggtcatcagcaatgagacgggtcttgaattcacgggctcgaccggcaccgatgacgaaggtcacagatggattgcactgacgccagccgatcatgacccgacacatacatttgccatcaggatacggcttgagtggcgaagactcagcataggatttgagtctgggaaatttgccggaccgcttctggaagctatgtccgatgcagagaaagacgccagggccgtctttcgctctgtcatgcaggattgtgagcaacacggagctgtcatcactatccagccgaatggcaaagaccattcgtatggcgataacgatatgtggaacgaagcctggaacaggctcacgttcgggattcgaaagggcaacatagaactcggagcggaagacgggatacctgacggccagcttgtacgcgagtggacttcgcgcttcgtcgcggcggttgttgcactgctgcctcttgaggaacacgagccatcagatgttgagggttttccggaagccgccattcagaaggttacagtcaatcgctacgaacgcgacaggcgcaacaggtctgctgcactcgcaattcacgggtgcagttgcaccgtctgtggtatgaattttgaagattcatacgggcttgctgctgctggtttcatagagattcaccacgtcgtgcccgtcagcgaggtagctgagaactacgtgatcgacccgcggtatgatcttgcaccattgtgctccaactgtcattccgtggcccaccggcgctcaccgccctttacaatcgaagagctgcgcgggtttctcgcgaagcgcgatactcagacaagttagatcagacaagttagatatgcgagagtttgcccacggtgggtgagtttcttcttgcttaccgcagaaggtctgcatgctcctgtctgacgtcagcgcctgtagaacagattgttaggaggcatagaggaggattttggctcatcgtaatccatgagagcgaagatgggacagaaatccgatccacaaggcacagcctcagagagcctatcaacgacatccgccactgctcggcaggccttgacagcaacccaaattgaagaaacaaacgtgaacagacttctcaatcggggtagcccggactaaagggccgggtcagttccgaaaaagaataattgttcgtctttcgcatgggcttgcacgtgtcttcgcacgtgatctgtatcagtacgggctacgacgaaacgatgaagtcgagccgcccgaagttgctctcgtcctgtcgcttcgcgacagcacggccaccgaaaacctctaaaacgagatgcgggcctcgctcggatcttacgttgagagcgccgtgctcgatcgagagatcgatatcgaagcttgataggggtggtttgccatcaggttcaacacaacaacgactgatacgatatgggtgaaacacttcccgaacggcagaaatggttagagcacgctttgcaagggctggcgttctggattggtcatcgccattcactcttcaacgcatatcctctgaccgagggcgcgctcgttgcggaggcctgtaacttgatgcaggcaaacctgccgtccggtctgatcctgttacccgagtgtatgtatcgaaatcttgtgccccttggcacacagattgatggtgtcacaggccagtcgcgggccgatctggtgatttgcgatgacgacgcaaagcccgttggcagagacggtaatgtcgctccgcatgtcagatttgtgatcgaggtcaagcgggcctctgcgaccgacagggaaatcaacaccgacttagtcaggttgcatagctatcagagagcatcgaataacaacgctcgcacttttctgttcgttgtttcagaaagcagggcgcatccccgatttgtcaaagacgggaaatccatcctcggggtacatgatataccgaattgcggcggccattttcgcgttcgcaggactgtgaaagcagcagccagcttttccggcaaggaaacagcgcattacgtctgtctcatcgaggtttttcggcacagtcatgacagggccagaccgatctagcgaccagttctgtttcacccgctaagtccagcccaccattgagggagcatccggccgggccggatcgggctgtcgtgaactgcgtcccggctgcgccgggtctcggccgttcggcttttcatcccttgcatatgagagcggctgcgccgctccgatagagcggcctgttggccgcggttttgttttcttgtttgttgtttctggggcctgcggccccctgtccgtcaaggtcaagccctttgctgcgcttcgggcgttcggcgcggtatccccgaccttcctgcacttcgttccgtgcaggccgggtgattcccctccgcgacgaacggcctgtgacggcgcatcccccgctcattgccgcgtggctagtccgtttgcagcagcagcgcgctgcgcaaacgcgaataatcattcggaggaacacaatgagtgcagatgtttatagccgcatcaccgatcagattgtggaagctttggagcaaggcgtcaggccatggatgaagccctgggacgcggaacatgccgcaggcaggattacccggcccctgcggcacaacggcattccctatgccggaatcaacgtcgtgatgctgtggtcgtcagccgtggcgcagggctttgccgcgccgatctggatgacctttcggcaggccaaagagcttggcgggcatgtccgcaatggcgaaaagggctcgcttgtcgtctatgccaacaccattacttgcaccgaaaccgatgcggaaaccggcgaggacgaggagcgggaaatccccttcatgaagggttattccgtgttcaacgttgaacagatagatgggctcccggcacggttccatgccgtggccgagccgcagcttgacccggtgcagcgcatggggcatgtggagcagttctttgccgcgaccgacgcggatatccggcatggcggcaatcaggcctactatgccgtcggcactgattatgtacagatgccgcccttcgtcagctttaaggacgctgaaagctactacgccacgcttgcacatgaatgcacccactggacgcgccacccatcacgactggaccgtgacttcgggcgcaagcgctggggcgatgaaggctacgcgatggaggaactggtcgcggagctgggttccgcctttctcgctgccgatctcgggattaccccggaggttcgcgaggatcatgcggcctatatcagttcgtggttgaaggttctcaagaacgacaagcgagcgattttcactgccgcaagccatgcccagaaggccgctgacttcctgcatggcttgcagtcggcgcaagacgatgaagacagggccgccgcctaaggcggccccattttatccgaatccgacagcaggctgaaatttcgcgcgcacctcccgatgcgcgcgaccccttcgccggtaggattgacgggctctttcgagcctgtccatcgtcatgagagaatggccgctcgccatgccggatacggcttaacgccgcccggcaagccaccaccaggcaacccagaccggaaggctaagcccggtcgcgtaaagggcaatggcaatcgggccgagaagccccgccaccagcgttgccgcaaccgtgatgccgccgagcccaaggcctgtaatccacgcggcccgcgtgtaaccaaggcgccaaagctgccggcacccgagcgccagcggcaggccgcaaagggcgaccggcaccagcgatcccaccgacacaagcaccatcgccagtcccaagtcgggctccggcgaggcctccgtccgcgacgcgaagcgcaaggcggcggtcacagccaccccggcgggcagccacaaaagtgccagcggccaaaaccctcgctgcctgataaatcctcgctttgccatgccttatccaccttgctcgaaaccctcatcgcaggcaaggccgggtgactgtccatccctccggcggaagcaccagcagcgccggtcttgtgtaggttcgcacttttgaagccggctattcgcacggcatgaggcgatccttcgacgcaattttcgcatccggaccgcacgatattccgtcacggaacgatggctatccggcaacgattttggccggtcgaatgtcgccgatcacgttcaattcgccactgatttggaagctaggagatcgaaaagccggtaagagcgaaccgagatttgatggtggaacggccggtatttttgcgcaagatcgccactggaaccggcgatttcgaaagctgtttgcagtcaagaacgcggcaagaatcttgcaagaaccggtgtctttcacccgcaagaaacggtcattctccacttgtttgaacgcctccacctttcatcagtcggacgtatttgacgcatgcatttcggtcttttcgaatggcttaattcgatcattttcaatggctgtgagcgttgcaataagcgaccgtgacgatgatttcagggtccggcccggtcgcattcgaattgccgacatggtcgccggcaagcgcttttcggcccggccatttggcgtcacggccacgctcccatcgacacaggcgccgtccgagaaaccacccgaagccatccgttttcgccttcgccaagagcgggttttgcgggccttgcggtcgggattacgggtcatttaggggtctttatcacaggggtcgccggcctctttggaacccagcggagcggttctttcaaagcaaaaaagaagcaacagggaagaattgagcggaagtgtaatcatcacaccccatgcacccctggtgctgacaacaggccggcccgccggagctattccattggttttccgctcaattcttctccagtaaggcgtttacaccgaaggggccgagcgcttacgggaacgacgcgggatcccggattctcaagccggttcagaggcttagacggcgtaatcatgtatacggctgagtgatgcgcttttcgaccccacatcagggatgcaagaagacctgcccttcaagggctcactcccgttcgtggtcgcgatctttttgccgcagcctgggcttgaggccgggcatgccggaggactgcttgagggcctgcagagcctggccgagttgtcggccgatgcgggtggcattctggcgaatggctgcatgaccgggggagggtgccacgccggttcgggagacagtcttcatgttacctgtcacatgcgttggccggacagcgtttcgttccgggacagaaaccgactcccgacttgactctcgctgcgcctgtcggagatcgaagcccagcgccttggcttcggcctgccaggttctgtagagatcattgagcttgctgtcctgcttggcgcggcgagtgcgcagggtcgccaactccatgcccttggccgtgtcgtagccgtgggtccgggctgcctcctcgatcacctggcggcgcttggagaaggcgcgctcgatgcggcgaggaacggcggcgatgcggaaaccgtgtgcctgacgctccaggcgatggccgaggcgttccagtccggctgcgagttcgcggcgatagacggcgccagcctgcttctgggccttgtagagatcgcggctgacgatggcgccccaagtgccgtcccggcgcggggcgaggttgaagacgaagctgtgagtgtggagctgcggatcgagctcacggctggtgtgatggtcgaactgggccatcaacagaccggcggtgcgctcacgcaaggcgccgcccttgccgcgccgagcccaggcggcggtctgttccagatgtccggtggcggtgagcactgcccgtcgatgggcctcttcgatggcggcccgctcgggtccatccgagagagcccagagcacggagaccgatttaggggcgctgaaggtcatgtcccagccggcggcatggctgtgggctcggccgccgccggccgccaggcgctcgccggtcttgggatcgaggccctcaagggcagcctcgaactcggagcgcgttaccggtccttcgaggctcagccgctcagcaccccggccggcccagcggccaggtgcttcgctctcggcggtatagtagccgtcctgctgcaaatggccgtaataggccagcgccgccctggcgctgccgcgggctgagatcgaggcgaccatggtcagtgccgggtccggcggatgcgctcggccagaccgctggtgagaagcccccgcggttcgggcggtgtcttgctgtcggggccgtggttgccggatacgggatccatgcgggtccagtcggccgggatgatcggttcccggaaggccggcagggtgatatagggcagctccagttcatagacggcatcctccaggccgatgaagagcacgcgcaccccggccctggccgggccgaggcgggaggcgatctcggcggcggtgacggcgggccgggtctcgcgggccgtgctgtaggtgacgctgtcgcggccggcggcgcgggtggtgcttttgagcgagcgttcgatctcctggttgccgatcattcggctgatgtcctcggcagcctcgccggcgttgatgcgggtgatgatcttggtgccgatcatgccgagccaggaacgggcctggtcggggccgtaggtgctgcggatctgggccatgtcctgggcgccgatgacgaccgagacgcccttggagcggccgagctccaggaaggtggggaagtggcggatggccggcagttgcgggaactcgtcgaggaacagccacagacgccgtgtgtggctttcggcaagcgtcgggctgccgacggcggaggcgagcaggctcagcatgctgccgatccagatgcgcgagagctccgggtagccggggtcctgctgcaggatcagcggctgacggggcgccgggtcgtgcagccagtcgcggatcgagaaacgggccaccgtgctgtcgggccaggcctcggcgaggatcgagacgatgttcatgtgggtctgaaaggtggtgaggatgctgtgggtggtcttgctgtcgggctgatcgagcaggcgcagggcaccgggattgtgggccctggcgtgctcggtgagccggccggcatcggatgtgacttcggcggcgagatcggcccagccccagtccgtgcctttggtggcctggaggtacaccaggcaggcgacgaagatttcccgggcggcctgcgaccacatgggatcggcgcttgagggaatgaagcgggcggcaagctcgcgggcgtcctgcttgacccggcagtcggcggccacgtcccagaccagcgatcgacggtcatggggggcgaccaacagcgggttaccgggcaggcccgccatcatgtcgcccttggtatcgagcaccaggacgccgtcgccgcgggaaatcgcccccaggatcagatgcagcatgctctgggtcttgccgccgccgacactgcccaggatgagcgcatgccgggtctcgcggtcgcgccccagggcgtggggcggcagaaacacaagaccgcgcccatgaaccttgcattcgcgcttgcaggcggcggcgaaggccttgcgcccggccgagccggtgagcaggcgagggccgcgcagaacccgtgccggcggtttttccagacgtaccacaatggcgaagccgaacagtgctgcaaggccgacaaggctgccggccgccactgccagcgaacgcgcctcgaaggcggtaagggcccgataggccgccagttgatagtggcagttattccagtgggccgctgcgggtcgatcaccgaagaggcccaggaggcgcgacttgaaacaggcctgcacctccgtggcacgaaacggaacgcggctgccgttctccaaggtggcatggggcggccagaggtcgaagcccagatgccaggcgcctgcggtcgttgcgaagccgcacaaggcgagggtgaaaagacaaagcttcagggtccgggtcatggggtcctcccgttgttatcgcctgtaagggctttcaacagcgcatcgaacatggcgagcaggtcgcgcgcggccttgtcggtcgattgcaatgtagcgcctgtctcccgggcctgctgctccagggcgacgagccgccgttcgatctgcctgagccggtcggcgagcgccctgttgtcgccgccttcgaggcctgtgcgaatcaactcgcgggcaatgccggtgacgctggcctgtagcttgtgggcgcgaacctgaagctgttcgatctcggcctgcctgaggcggatggatacaggtttcgtcggctcagtcattgtctcttccccgatcggccgtgttgcgtctttgccgcgcggccagccattggaagagagcgcggcgctggtagcggaccgaatgacggcccagcttcaggaagggcgggccgtcgccgcgcgagcgccaggtgttgagggtgcagacgggaaagccgatgatgcggccggccgcctcggtggtgatggcctcgtcgagccagccgggattgtctttcaggatgtcgctcagcgacggtagattgatgacagggtcttgcataaaaaaatctccgctgtggttgggcggagatcacataggcaagcaacgggcggcgtaataggcaaatgatttcgtcaaaaaggcacaaccgccggacggttccatctcattccagccgatcgcttgtcactccggctttttcgtccctcgacagagggcggcgggtgccgggggaatcttttcgcgaaaaccgctcggtttgatttacgccggccgaaggcgggcgaatcgtcttagactcgggaaaatcgctgggccttcatcgcactaaactgaccgaacttgacggccgatgatgaacttgctgatggcgagagaatctcattcaatgcccacagtcaggcttacagcaatttgtctggcagacaaaagtttgagatcacaacattagaatgaaaaagggagagaggcattgcctctctcccgtatttgtctggcaatcctgttacaggattgccttactgtagctgctctccaaacgagcatggtaatcatgctcaaattttgagttgacgtcaatattcttggggaaagtgaaacacggatttctgtgctgttttgaggacttcgtatgaaaatcggatggggcattgatgttggggtgagcagcctcggcttcgcggtgatcgagttagatacggagaatcagccccaagcgctgcttgacggagtcgcccttgtctatcctaccccaacaggagcggcagagcgaacgcgctacaaatccatgcgaacgcagaatcagcggcgcagcaagagaatcagggcagttcgttcaaaactcgcatgccttttcaaacttgcctctaattttgacactgaactgccagaccttaaagatggtcaaaatgaggacggagaacaaagagacaataactcccgtgtccgcctacgggcgcatggcctatccgagccgctgaccgctggcgatttggcccgcgccattttacacatcgccaagaatcgtggccggcgcctgactcgaggccttaaggacaccacgcaacccgatgccgggcagcaaaagaaggacgccaaagaacgtcaatccatagcctacactgccaacgaaaccagccaggatcttgaaaagctgggcattgaactcgaacttgacggcggcgcacacccttcgcaattgctgatgcacagagccggtaaaacaggaacaacacggctgaaaaaagaccgcgacggaatgctggtctttactcgcgatatggtccgcaaggaaatgtgcgccttgctgaaagcccagaaacctcatcacaagacggttctgaagaatacggtctgcgaggaacttgaggaaatcatcttctgggaggagacaccgaaagagccggtcatcggcaagtgtcgctatggtattcgaaacgccgaaggcgacattgagccccgattgccgcgtggcagcgatctgttccagcgtaagcggatttacgaggaggtcaacaacctgcgcctgatctcaccgcgcaccgcgggagatacgccactgaatttggcgcagcgggaccgccttgcctccctgcttctcgatggctttgacctgaacgcctccagggtccgtggcgagctgggccttggagccgatgccctggccgacaaaaccagcttggacatttcggatcgaggccgaaagacaccgggcaaattgttaggtcacccgctggccgcggccatgcgtaaggcggatgctcttgcgcaatggaaaagcttcgacgagcaatgccgtgaagaagtagctcggcttgtccgtgccgaggatgatgaagacgtgctgcgtgcagagctgggaaagcttggccttagccaagaggccgcccggaaactttccgacgctcgcgtgcccgcgacctattctgccgccggcgagacagcaacacgaaagcttctggcaaagctgcaagcagatgtcatttccaattacgaggcggaacagagcgccgaactggactctttggacccaccgtctcctcgtcttgaccggttaccatactatggtgaaatcctgaagggatggagcatcggaggcaatggcgacccaaacggatctggcgaagcccgttttggccgcattcccaatccggtcgttcatgtgggactcaaccagttacgcaagaccgccaacgcctatctgagcctttatggcaaacccacccgtatttgcgtcgaactcagccgcgacatgaacaaaagcgccgaggcccgtgaacaggatgaaaagaatgctgataagaaccgtaagagaaacgaaaaatatatagaaacgttacaagcccacacgcgcaaattggcccgccgcgacttggtccgcatgaagctgcatgagatgcaaagcggagagtgtctgtatacgggacagcccatcagtaaggggcaactcttcgacggctcggtggaggttgatcatattcttccccgtgccgttacccgcgacgatggtattgcaaatctcgctttggcgtttaaggaagcaaaccagttcaaagccaagcggtctccttttgaagcctttagcagcggttataaagatcaggaatatccgcatatccttcggcgcgcccagaaacgcgggaaaagagtctactggcgcttcgcggaaaacgctatggaccgctacaaggaccaggacgccttccgtgccagattccttaacgacaaccgctatgtcgccaaaatggcggcgcggtatctgagttgtatatgcgccgatattaacggcgtcatatgcctgaatggatggatcactgcggatctccgtcgccaatggggattggcatccgttatccgcgatatgatgatcgcagacaaccgccttgacgccgccgatgtcaaacggcccgaggaaggtgaaaccctcgatgagctcaaggctcgtcgtaagcgtatcgataagatacgctgggaccatcgtcaccacttactggatgcaatcgtcgctgcttgtacaacccggagtgatgtactgcggctccaaaccttggcacggcatgcgggtaacaagaaccccatcgagattctggccgagattcgcgacgcggattccgatttcaaaaacgccgggatatgctggcaaaaagggtttcgggaaaacgtcgaaaccttcctgaaagatcggacacataccggcgcaacggacaagccacctgtcaccgcggtcgtgaccaaggccgaccatgaccccggcggccgtctccacgaagaaacgaattatggtgtcatatgccgtgtgcccggcaagcatgatcaatatgttacgcgcgatcacgtcgcgatcatggatttgaccgcggataagatcaaacaactcggcgtgccggatacagcgctcaaggctgtcgaagaggtgatgagaacaggcgagcccatttggtggggcggtaatgaccccttgtctgccctgcgcgacaatctcgccagagacctgggcaagctgaaggcgaagctcctggaattgatggaaggaacaccgcccgagcaattggagaaagcgactacggaaaaaggcaaagacaacgcacggaccagatgggcgataaagcaatacgttgatgataccggccgtcgtcgtttcacgcggattcaaatcacctccctacgcattctgaaaggccctgtgcgacatgacaagaaaccgcagcgcgcttgtccggagggagggaatgaccggctggtatatttcgtaaacaacaaaggtgatcgtgatctggaggtcgtttcgactctcgacgccaacacacggggattcaaggaacgatggcaacgcgaaggcggacgggcattgtttacattgcgaaaggatgacttggtggaaatggccgtcaatccggacaatcctgtgtcgccccgttgcatatttcgaacggtttcgttctcatatacggggagtcctgatcttgaattcctacccgttgaggagtcgcgtgcccctaaagaggtgccacaagtacgggcccgaatcagtagcgttagggctttctgcgaccgcgcaccggtaatggtcctatgcgatccaacaggccgcgtacgctggcgtagccccagcatcaactgacaatgtggcgtgtcgttgacatttccggcgcggaccgggttctttctctatcgaggggaagcctgaaggtttctgccgaaggtagggagttggatctggtgccgctatccgatattcagtgtgttctggtccatggccatggcgcaatgctgaccctgtcattaggcgccgcacttgccgacgctggaatccctttggtgttatgtggccgcaaccatgcgcctgtggccctgtccttgcccgtttcgggaaattttgaacaggcggcgcgactgagcgggcaggccgccttgtctctacctaaacgcaagcaactctggcggcaattgataatggccaaaatcacatcccaggcacgggcactcgagctttcagggcatgccgatcacgtggggcttatgaagctcgtgaagtcggtaaggtccggcgacccgaataacgtcgaggcccgtgccgcgcgtttctattggcaacggctgctgggcgatgatttcagacgcgaccccgccggcaacgggttaaacgcgcacctcaattacggctatgcggttgttcgcgccgcaatggctcgctccgtggttggtgccggtctggcaccgggattgggactacatcatcggagccgattgaatgcctttcaattggctgatgatctgatggagcctttccggcctctcgtggattatatggtttggaggaaccgggaatactgggtcggcgagatgacagcgatggcgaagcgggaattggcgcaagttgtcaatggcgtcatggcgactacagtcgggtcgagcacagtctcgcgggtcatgttcatgctgaccctttcactggcggaagtttgcaccggtgaggcgaagaacttggcttggccgctcgactggagcttgttggcgcaggcaacactcgactttgataactagacgtgaacgtagactgattcggcaccaattgcgcggtcggacgggagcgtggatagagaatgtatccggatacagggccatgtggcttgttatatgttttgatttgcctgtgggcgatccgaaggagcggcgcgatgccactcgctttcgtcaacgcctgttggatgaagggttcgtgatgaaacagtggtcggtttatactcgctattatgttacgcgagcccaagccgaggctgctgccgataggatcggcactttggtaccacccatgggcaaggtctccatgatatttattacggacaagcaatatgggatggtgcgcaattttgagggtcgaattcgtgccaaaacggaagaaaaaccgaatcagttggtactgctttagtgttccgtgtgcgaattcatggactgaaaatcctggccaacccattgatatgcaatggattggccaggatctactgtagcacatgctggtttggagagcagctacagcatcgttgtgccgtagatatgtacgagtaccactgtagcacatgctggtttggagagcagctacagcgcggcgaggacgaaggtttcctgtcgcacactgtagcacatgctggtttggagagcagctacagctggcgcagcacgtgctgacgccgtcctgcaactgtagcacatgctggtttggagagcagctacagcagttcgccggtacaccagcaatccggatccactgtagcacatgctggtttggagagcagctacagcacattatctgccgtccggtttgctgcgtcaactgtagcacatgctggtttggagagcagctacagccgtatgtcggcaaaatggaccggcgcgggaactgtagcacatgctggtttggagagcagctacagctctcgagtgcccgtcctgcaggactgcgttactgtagcacatgctggtttggagagcagctacagcagccggcatggtcgtttttcggatatctcgactgtagcacatgctggtttggagagcagctacagctgagggctattggacccgcggcgatggcgaactgtagcacatgctggtttggagagcagctacagcgggggcgcactgctggggacacaatcaaaaactgtagcacatgctggtttggagagcagctacagcgcttcccgcgctgccgcttgattctgggcgactgtagcacatgctggtttggagagcagctacagcggaaagcgcgatccggcgtgacctgagaatactgtagcacatgctggtttggagagcagctacagcgggtcccgaggggggcgcaaggcctggatgactgtagcacatgctggtttggagagcagctacagccagggcgacggcgaggagaaggtttatcaactgtagcacatgctggtttggagagcagctacagcgtcggtttttcggtactttctgtgcggattactgtagcacatgctggtttggagagcagctacagcgtttcggaactcactgtctgtgagtgcttgactgtagcacatgctggtttggagagcagctacagccgactcctgcaacagggaatccagagttgtactgtagcacatgctggtttggagagcagctacagccccccgtagcacatgctggtttggagagcagctacagccgtctggactgaacggtcaagtcgagttccactgtagcacatgctggtttggagagcagctacagcaagagcgagaagtccagtaggacaacgagaactgtagcacatgctggtttggagagcagctacagcattccccacgtgtgcgttgagaatccggttaactgtagcacatgctggtttggagagcagctacagcagaaagaaaccaatctcctcgattatgtaaactgtagcacatgctggtttggagagcagctacagcaagagcgaggagtccagtgtcggccgggatactgtagcacatgctggtttggagagcagctacagcacagcgttcgctatcgcgatattctgagatactgtagcacatgctggtttggagagcagctacagctccagtgggataaagagagccttcaatggactgtagcacatgctggtttggagagcagctacagcggatagatggacgagcgcattgggttttcgactgtagcacatgctggtttggagagcagctacagcagcgtcagccagactatccccacgatcggcactgtagcacatgctggtttggagagcagctacagcggatcggcagtgcgtacaacgctgcgatcaactgtagcacatgctggtttggagagcagctacagcgggtcaggtggactacaagaccaccggtctactgtagcacatgctggtttggagagcagctacagctcccactacgccgacgccttcggcggaatgactgtagcacatgctggtttggagagcagctacagccctgtgtaagcgggatatacgcgtagtctgactgtagcacatgctggtttggagagcagctacagcggatccccgagctgaccgccgcagaggaggactgtagcacatgctggtttggagagcagctacagctgaccagatcaagcccaacagtagccaagaactgtagcacatgctggtttggagagcagctacagcatgttttggctgccgtctatgctgctcgtgactgtagcacatgctggtttggagagcagctacagcgttccacttcctcttctgacaccatcatggactgtagcacatgctggtttggagagcagctacagccagtgcggaaatcagacgcagcacgagcctactgtagcacatgctggtttggagagcagctacagcgccttgtgtacccacacgctttcagccttgactgtagcacatgctggtttggagagcagctacagcagctttaccccggtccttcgcaggtattatactgtagcacatgctggtttggagagcagctacagcagcatattacgaagcctgtcggcttcggctactgtagcacatgctggtttggagagcagctacagccgtgtggatagacggcgcctacctgttgaactgtagcacatgctggtttggagagcagctacagcagccttaccattaagtagatcgccaatatgactgtagcacatgctggtttggagagcagctacagctcgtgcacgatgaagggggcgaggcattccgatcgggaggactgtagcacatgctggtttggagagcagctacagccacagcatgaaacaaccgaagccgacaaaaactgtagcacatgctggtttggagagcagctacagcatttccactcggtcacgctgacctatggtcactgtagcacatgctggtttggagagcagctacagccaatcttgagcgaaagaaatattctacagactgtagcacatgctggtttggagagcagctacatccggcgacgcgcgggtgttcggtaacgcaactgtagcacatgctggtttggagagcagctacagcaggcgcatgccgccaacgcgcgctatcgcgactgtagcacatgctggtttggagagcagctacagctagattcacctaagaaatcaagtggagatcggatcaacataattgttgtccggtccggtaacctatgtactcttgcggaacgcttcgcgtgctttttctagcagcaccaaagtctcttcattgagcgcggtcgaagcttgttcgatagcagccttccatttaggaccagaactctccgcgatgctcattgcttcaccaagttcaaatgaccggtgtttggaaagcgcctcaatgaggattccggcttgaaatatatccttgtccgctttcgcaaatgcggttttgtgcctgcgagtggagacaatcatcttgtgtactgcgtatcgcgcagggtctggtacacggacagcaacaccacctctatagaggacgaccgaccacaccgggtctttgatcagaaaatcgagataacgcagcggtgttgcgccagcgccgccaagcgcgggcatctccgcagtcttaccttggtgctcatcgctacctctgttcggggtgagaaattcgacgcgatactgatcctggttgataaatgccgttaccgaagcagggtcgagagcaggaactggtttgaaaccctcatcgacctcttgcagcacatccaaaataggcggcatggtgtcgcccaccgcatccgaaatggctttgaattgagcgaagtcggcatcttgagtcataattgatgtggaaggcagtttcagccccaacaagccggcataagcttgaaacgccacggtaccgacaagaacgcccctcaaacgaaaaaaacctgctttccagagcgcttctaccacagcgccggtagtaccgtcagggcgcggtagaatctggccaagggcacgaaccatctccctccgctcagaaaagtccgctttcagctctttgaactttttgacacggctggtgatttctggctctgaaacaggacccacataacgccggttacgtcccccatgctggtatttctgaaagtaccaatattcccgtgcctttgatgtaacctttacgaattggccttgctcatcgaaatcccgatcaaagctagcatcaaggcatcgctctatgagttcagcgaatgttgtttgtaaggcaaggctgattgattgcatgagtatacccggttcttcaaaccgggtacaacatagtcgttatacctggtttttgcaatagggtataatgaatctactgtttggaagatatatccttcaacgtcacttatagcggtacgaggatcaggttcgtatccgtggctcctatacgaaaattgaaaggcaattttttgtgtcagtgttttggaagtgtttgggagtgtttaagtttggcgcgcgcctctaaatcgttgttattgttgataatatgaaatcgtatggagcacatcaccaacatagaacaccgacgactcacgttttaggttactgtagcacatgctggtttggagagcagctacagcagccaggtatcgggtccaacgggattcgcaccgtcgttgcccactttgcctgcttccactcgtcaagcgggcggcccatacaatatggtcttcatcctcctctggatggtttccagcgacggcagatccttttcgtcgaattcctgtgccgcgatcttgtgcgcatcgaaggccagcacactgcgcggcgtttcggggttggccgcgtgaagttcgcgcacgagcgcttcgatacgcgcccatgcggccttgcgcggtcggccgcgctgcatcttgccggtcgtatcctcggtacgggaatggacgagacggagtgcgggccgtgcctgctgatgcagcggcgtcaggtccgcctgttgaagaaacgccggcaggtcatagcgcttgtagctcatccaggtgtgcagcttgaccagcgacaggtggatgtcgccgaggatggcatgagccctggccggaaagacgtcatagggcgtatgcgccagggcgtgatgaaagtcgtcgaccacctcctggctgcgtggaaaggcggtgaagggtgaccagtcctcaagccttccgggcagcgcctcgcgttcgaccaggatctcgccgacggtcgcggccttgacggcgaaaaactcctgtggctggcattcgggcgccagacgtggcagcaggcgccagacacggggtgtttcgatctgcatgagcggcaggttccgcacctcgctgcgcacctcggctgcgacattggtttcctcgcattcgaactcgccggtgaaaagcgcatgcttgaacaggtccatgatctcgtcgggctcgacgccggcccggtcccgggcaatcagcaaggcggcccgcttcagcgagatgaagttccggtccaggggcgaaatgtaggttggcatgacgtgcactcctcttcattcgggttggtattcggtggacggtttgttcggatgtggtgcggttgttcgggctttggacatactctcccggtgtcgcgcgaggcagcggcagtcctcctcaggcgacttcagcaaaaaggttccagtatcgggtgcctccatgaagtaggggatgccgggcggtgagacagaggctcaggtcatgtgttttgggggccggccacgtcctccagcgacttcaccttcaccggctctcggtcaggcaggcggaccaccacgtcgagctctccgcccatggcctcgacgtagccgcgcagtgtcgaaagatacatgtcggtctgcttctcgattttcgaaacggcaggctggctgatcttcagctttttggcgatctgtgcctgcgacagcttcgacagccgccgcaattgtttcagcgactcgacttcgttcagcagctcttcatagcggcggtcgatctccgcgcgccgctcgggcggcagagagtccaggacctctttcagtgtaacgaccatgacctaatgtcccattcgtttcagatgttccgcataacgcttgtcggctgtgccgatcaatcgcctgtagaaccgtttctcgttcgttcccgccttgtcgcccgcgaccagcaggatcgcattccgctccgggtcaaaggcgaaagcgacacgccagaccccattgtccgctttgaacctcagctccttcatgttggcatgggccgatccgttcaacgtatccacatatgggcgaccgagttgcgggccataggtctccagcaatcgcgcattcgacagcaactcgttctgaaccgcctccgagagggcgtcgaactcgccgctgaacggttctgcgaagccaacgatccagaccatcagaatataaccctgaagttattaatattcaatgcttggcctccgcttccggctttgcctgccggtcgggctggatcagcagcttgccgacgatgtcgctggcctgcttcaggggatcgtcggccagatgggcataacgggcggtggtctgcacgctgcggtggccgagcagtccgccgatgactgccagcggaatgccggcgccgacggcgaagctggcgaaggagtggcgcaggtcgtgcaggcgcacgtcgtcgagaccggccgccttgcgcacccggcgccagggcttttgcaggttgacgagatgggtgcccacttcgcggccgacaattacatacggattgtccttgatgcggggcaaggccttcagcacctcaagggcggaatcgttgaggggcacgatcttggcgccgtgcttgtcggtcttgtggcgctccagaacgatgcgggacttggcgaagtcgatgttggcccattcgagggtggtgatctcgttcagccggcagccggtaaagatcaggagacggaccgccgccgcctcgtagatatcgatcatgccgtcttcctcggcggtgtcgagggtctccagaagccgcgtcagttcctccgcgctcagatagcgctcccgcttcttctccggatagggcttgatcaccgcggccgggttgctgccgcgcgggatcatctcccagcgctcggcgcagttgagcatggcccgcaacaggccgagcgcccggttggcgttatagggagtggagcggagatcggcatgcatcctggcgatgtcggcggggcggagatcaagcagcttgcgcttgccgagcttcggcctgatgaacttcttgagcagccagttatgcgcttcgatggtgcgcggcttacagcgtccggcgcagtgttccttcatgtagacatcggccaattgcccgacggtctcgctcctcaagagccggcgccgctcctcggccgggtcctctccggtggcgacctggcccatcagcctgaccgcctgcttgcgggcctggtcgagggtgaccttgccgagcttgccgaccgacaggcgccggctgcggccgctttggttgcggtactggacgatgaaggtcttggcacccgagggcttggccctgacgccgaaaccgggcaggctgtcgtcccagaggacgacctcgcggtcggtgggattgagggcggtgatgaggggttttgtgagcttgggcatggatcgtccgggtaagcaggaggtaagcaggcggcatcagtgccggatgaacgacaacatagtgagtcgaatgatcgagatcaagtaaccatatgaaaaaacaggagaaaagaagctgtggcgtattagagagggtttgcggcggttcagtgcggtttgatcgaagaaggtcaaaaaccaactcataacctgaaggtcgcaggttcaaatcctgcccccgcaaccacttccgttataactcaatagaatgcgaaatataacaatcacataggccgccgcgaggcggcctatgtgattgttcatacagcggttcttttgcttgaaagacagtcaacaccaaaacttcttgcctccgaagcggaaccatgcacagccgcggtgtggtgtttgtcccgcccaacgatcatacggaagcgcctgtcctcaaggcgatggatcaaggcaacatgttcaatacgcacaaacggtctcccggtacgcgccgcaaacactgcctggcggcggggccggcgcaacgccagcctcacggccaagctgcgggccaagctgcgggattgcaaattcccgaccgggccgcaacgccaataaggaggtccgggagccctcgtgctcccggaccgcgatacgacggatcatgcatctgctgactggacacacaggctgtgccgatgatttccgccacagggcacccaacggggcaagaccctgcggcaagcggagctgcttgcgatccacgtaacgcaaatcctattgtggcacggttcgcaaatgcacagggctatcgttttcatcgggccgaaccgggtgtggatcaagccgccggcacgcctgtattgaacgggattgcggtatgcgcggccggcgccgggacgaaaccggcgccgttcaacgcgaggctcccggcgccagccggaccagggcagagccggcccgggagccctcatgctcccggaccgcgatacgacggaccgt

SEQ ID NO: 1617 - DNA, 14971 bp, synthetic construct
  misc_feature 1..14971: note = Synthetic
  source 1..14971: mol_type = other DNA
ttcatattcattcctaattcctaattcctaattattcaaaaacatgactctcatcaaaacatcatataacagacgttcctttctgaaagtttctgcactttcaggaggaggatttgtcataggtttcagtatgcttacgggcttcaagcctctggataagcaagtagaagaaagcgcattaagagaaatattcaatttgaatagctacatcaaaatcactgataagggtgaaattaccattctctcacccaatcctgaatttgggcaaaatgtaagaacttctatgcctatgatagtggcagaggaacttgatgtagaatggcaaaaagtaatcgtagaacaagctccttacaatacccaactttacggtcgtcagtttacaggaggcagtcagtctattaggcaaagttggaaagccttgcgtactgcgggagctactgcccgacaaatgctccgacaagccgcctcccaagcgtggaacgtgcctttagaggaaatcaccacagaagcaggcgttttatatcataaagcaagcggaaaatcagctacttatggtcaaatggcttctgcggctgctaaaattcctgtaccaaaagaagtaaagctcaaagaagtaaaatcttttaaactgctcaatacacctcaaaaaaatgtagaaggggaaaaaattgtaacgggaaaacctttatttacaatggattatcgtgtggaaggaatgttgatagccatgatagttcacccccctgcctttggcttaaaactcaaatcttttgatgccgcttcggtgaataaaatggcaggtatcaaagacgtatttagcatcaaggtttacaatgacgattatgcaagagaaatgtttgacactcgtactttcaatgaattggtcatcatagtaggcaactctacttgggaagtgatgaatgctaagaaaaaattagtggcagagtgggagcctatctcgacaagcacagagaaagtaagcttttttggacaaaaacgtgatgaaactatcccagcaggtcttgaaaatacaaaccttcattatcaaaaaatgaaagaaatgaatgaaaaacctgcggaagttctcagaaaagacggcaatcctgaggaggcttttgctaaggcagcccaaatcatagaacgtacctatacctgtccttttttggcacacaactgcatggagccaatgacttgttttgctcatgttacagaggacaaagttttcttagccgctcctattcaagcccccgagtttgttgaaagaactatctctgctcgcttaggcattcccatagaaaaaatagacatagaactcttgcgcatggggggcggttttggtaggcgtgcttacgggcattacatggtcgaagcggctctgatttcccaaaaagtaaaagcccctatcaaactgatttacaccagagaagacgacatgacttatggtatttatcgccccacttatatagtaacctatcgcgccgcgctggacgctaacaagaacctgataggttttcatgtaaaaggcggaggattccctgagagtgccgttcatgccaaccgctttcccgcaggggcaatagacaactatttggcagaaagctgggcattaccaacaaatattacgattggggcttttcgcgctcctcgttctaactttatagcaggagcagaacaggcatttttagatgaattggcagaagtcgtgggcaaagaccccattgcctttcgcctggaactgcttaagaaagcaaaagaaaaccctgtgggtaaaaacaatgattatgatgcgagtaggtacatgggcgtgttagagttggtgagagaaaaatcagattgggacagtagcgaatccaaaaaacgtaatcgtggggttgctgcttatttctgtcataactcctatgctgctcatgtagttgagttgtctatcaaagaagtgcaagtgatagtggacaaagtagtgagtgcaatggattgtgggatagtagtcaatcccgaaggagcggtcaatatggtagagggggcagtaatagatggcattggtaacgcactgtacggtaatttgacctttaaagacggagcagcagagcaaaagaattttgataaatatcgcatcattcgccacaaggaagctccaaaatccattgaagtacactttgtaaaaaacgaaatagaccccacaggattaggagagcctcctttcccgccagtaatgggtgctttggctaatgcgctttataaagctacaggtaagcggttttacagccagccatttcagcctgaattggggaaagtgggtgggtaattcaaagtaaaattcgtatcagatatacttttaaactttgttttgtgtgaaactacaattcaccctctgtgtatgtaagttatccgcagaggggatttttttgaaatagattttgaaaacttgtatttttggtagaaacttagacaactgaaatggagatagaagtagtctcagcaaaaaatcttcctgcactcatcgggcttgtgttagagttatggacagaatgctcctatgaggaagaattagaaaactatcaaagtatcattgattcctcagatgaaatttgctttctcgccaaagtgcaagaacaacacattgcatttatacatttaactactcgcaatgactatgtggcagggacagcaagctctcccgttgcctatatcgaaggagtttatgtaaaacccaatttccaaaaaagaggtgttgccaaagcactaatcaccgtagcagaaaactgggctaagcaaaaaggattgaagcagatagcctctgatacagaaatcaccaacctctcaagcatcgattttcacaagaaagttggatttagcgaagtagaacgaatcgtttgctttgttaaagacttatcgtgaggggtcagtttgcttctgtattaagactttctttacccgtattggtgttttagaacttctttactgccatttctgctacggtcaagccaatggaaagcgaggaggtagcggcaggcgaaggagcatttcctacatgaatgattcctttgttttctataataagaaaatcatctatcaaacctccatttctatcgcaggcttgcgccctcactcccgctccgccttgctctaagtcattttcttgaatttctggtatcaatcgttgtaaggctttggtaaaggcagtttttgaaaaagaacgataaaactctcccaatcctgttttccaatacttgaatgctactttttgaaaaccccgccaactaatagaagctatagtttcttgaaaatcaaaatctgtttttttgtacccttcttttttgaaagaaaatacggcattcggtcctgcttccacacctccctttatcatgcgtgtaaagtggacacccaaaaacggaaaattggggtcagggacaggatatatcagatgcttgactaaatactgcttctcaggtttgatatgataatactctcctctgaaaggaataattcggtaatctacctttttctgtgtaagttgggtgattttatcagagtaaagccctgcacagttaatcaatagagtgcttgcataagtcctattttgtgtaattatctcataattattttgttgttcttgtattttttctacttttttgcctaaaaaaatctgtccccctttttctcttatcagttgagcatatttttgagctacctcaacgtagtcaatgatacccgtataaggcacatagattcctgcaattccctgacagtgaggctctatctctttgatttcttctttgctgattttcttgattttgtctaaaccgtttgctatgcctctttgatagacattttctaatgtggctaactctgactgctcagtagctacaatgattttcccacaaagttcgtatccgatattttcttgctggcaaaaatctaagagcatttgatacccacgaatacaatttaatgcttttaaactattaggtttatagtaaatacctgaatggattaccccactattatgccctgtttgatgctgggcgacggcttgttctttttctatcacgcaaagcttggtctgaggacgcaactttaagatttgcagggcagtcgccaacccaacaattccccctccaatgatgctaacgtcgtatttcattttttatggtttgtaattttgaaaatgtaaaattagcaaagggaaacaaaaaagaaaagtggtgaatcaacgaatagtaattttctactttttccttacaaaaacaatttccttgcccaaagccatttctaatatgatgcctaacttatctatttgcccttgagcgttggtatagaaagtaactttttgcttatcaaaattagcacttttggtttgaaaggtatcatagtgatagtgtaataggtcaaaatcaaaaattttaaaactgcctttcaaagcattattttggaaaataacggtaaactcaccataggcagggtgttcgtagatgcctgcaaaagaagtaagactatgcgaaggctgagtattggctattttgatagtatcaggggcagaagcatttttcaactctaagtttttagcttcgctttgttctatttttagccttgtagaccagtccgttacaggcaggttaagcagtttgtcgctgatataattagaaatcacattgacaaaccaatagttcgccacgcctgtattggtaagcatgatgatacctatgttttttctggggaaaagagttatttgagagcggaatccttctatgctcccgttgtgcatcactctcaaatggtctttatattcattgaccgcccaccccatgccgtagttgccgtagctatactcctcatatttcaattccatcggagcaacaactacttggggggtatgcgtctgggctaattctttctctggaactatttgattccctgaaaacttacccttgcctaattgcataatgacccaattagacaaatctaaaacattggacttaatgcctcctgtaggtcccatggcatctacattgctcgtaaaaggcattttttccattttcccattgacgtagttataagaccaagaaaaattaggtctttgcaacaaatcatctacggaaaaaatcgtatttttcatgcccaaaggatttaaaaggcgagttttgatgaaatcttcccaaggctgtccgctgactttttctatgagtacacccaaagccatgaacatgtggttattatactgatacagagaacgaaagggcttgttaggttctaagtatctcatgcgagtaaacaattcttgccgggtaaattttgctccataccaaaccaaatcgtgccttggtacacctgagcggtggcaagccatgtcccttggggtaatatgctgagtagcatactcatcaaaaagttgaaactcaggaatatacgtcttagcaggtctgtcccaatctaactttccctctcctactaaaatcgctaaacctgccgtagtaaacgcctttgtattggaggcaatggggaaaatcgtttctgcggtaacaggtaaattttgttctaaatccctcattccgtaacctttggcatggataacctttccgtcttggactacagctatggcacaccctggaatgttccaagtgtttctcatttgctctacgaaggcatctaagtccttcaaaggggcattgcttggctcttttttctgagcaaaagcgataagagaaataaaacttagcacattgattagcaatgtactaagtagcaatttaattttgtgttccatggtataaagataagaaaaatacaatttgaactacactttttgcaacttaaatttgatttttttggcaggtgcgttgcttgttttggcgggggctttcttggagaacttccttttgtaccacatcaaaatccctgtaaaagtcatgcctaagagggaaacagctatcaagtctatccacacccacatactgccctctccgaaaaatgccttgcctgtatgaatgtccaaagctaatttttccaatgtcagtgcttccataaaactttccttatctacttggctggcaaaggcttggagcttggcagttcctatttgtgtagaaatctttttggcttcccaagtccttccttggtcttggctgaggtgaaatccttttttgccttctgaggcgattaaagtagtgacgtcaaaggtaatcccatgaaaatcaccttttttgacgagtttggcattgccattttccgcaaggagcaagcctttttttgtagctacccaaagttgattttctacccaaagcaagtcccttacttccttgccttctgtgcctttgacgatagaaagttggtcgttgctttcttctaccacacccagttttgttccgtaaagcgtttttccctgtactatctgtatgtctttgacatcatctaagtaataggaaaggtttttctccttagatgagtaggcgggcaaccagcctgctttcactacgatttcctttgtgcctaagcccttttcgtgggcaatgaggatagcagtaatcgccactaagacaatggggagcgtaaaaaataagcccagccacaagtgccaattaaaaagttgtttgctccaattgatgttttttttctttgtcatgggtgtaaaataggtttaaaattgccaacggattcctgcactgataatgcgtcctggagtattttctgtcattctttccaactgaatccctgtgtttttggtcttttcttttttcaaagaatcaaatatatcagtgattctaatagtaaaaaagcctttttccaaaaattgtttttccaaagcaatatcggtaaaccaaatcgtttcttctgactcttgggaagttcttttcggacctatgaagttagaagcaatttggaactttactttttttagcatgttgaaatcttgtaatgccttgatagtccatgccgtttggtctttcagagcctctccatcaaaggcttcattgcttctgatttctgaccaaaacttagaaaaattgaagttggcactgtaccatttcgtagcttggaaacctactaacaactctgctcccgaggatactgcacggctcaggttgataaccgtttctttgataagcccatctgcatcagtggcaatgtttttctgaatcaagttgttaatatctctgtggaaaagattgaccccaaagtttacgccttttatttcgttgaaatagcctacctcatacgcccaagcggtttctggcactaagtcgggattgcccactttgatttcggtgaggcttttgatttccacaaaggggttcatgtcgttataggctggtcttcgcactcttctgcccactgaagacttgaagtaacttttgggcgtaaggttgtacgtcaaactcgcattgggcaatgctaagtggtagtccgccttattttcctcagtcgtattggcaatagattgggagttgatagcggtgtattcgtgtctatagcctatagttattctcagtttttcaaagtttaaattccctgaaaaatagcccgcatgagtatattcttctaagttgaactgattggtattggtagatacgatagtccatgtattgttgctattattcaatctctgcatctgcctatcagcctttctttcggtgataaagccttgataacctgttttaaaagagaagttcttattgacttggttggtgaaagccacagtgggaaagtaatttttaaaatcaatgatttcgttttctttttgctgggcaggaagtacgttttctatgcgaaccccttgggcattggcattgtagtctttgagggtttttgccttgctttcttcagtaaagttggtattgaaggcaaatactaaggagctattttcccaatttttttccaaagaaactgagggattgtggaattttaggtttttgagttccgtttccacccgacttttcccacttttaaatgtagtgttagcgttaaaagttctattgagttcctctttggttttgtcctctacttgcgtaccataaaaatattctcctaccactttccaattgttcttggtctggtaacttgctcttaggctggcacttgtgttgtcaaaagacttgatttcacttttgtcgatgcctacggtttctttcacagaaccgtcagtattgtactttatctggcttccattgtcaaacttatctgcatttctttttagcttctcgaaactgcctgaaatagaaaagttcccttgggtgtgttgcacgcttgcatggctattgtagcccttcaagttatccgcaaaaaaagagacctgcccacttgtgcctatgcttgccccttttttcaacacaatattcactattccgttgatgccattggaaacatggtctgccgaagggttcgaaataatttctatgtattctatctgagtggcaggaatcatgtccaagacggtttccctgttgttgcctatcatgcctgcttgttttccattgatgagtacagtggtatagccattgcccaagcctcggtacctgatgtcgcgattgtggttaggactgccgcccatagctacgctgggcatatttttgagaatatctcctgctgttcccccgttttgcgaaggcaaatcgctgatggcgtactttatcttttgaggctcgacttgggttacaccgatttttgagaaaacgaccacttcgttgagtgtcatatctttaagcgtaagcgtagtgtctttgctggcttgtgtactatctgctttttgagcaaaacacaacgcaggaaaaagtaaaaaaagaaaataaaggagaaatttatttgtgttcattttatttagacttattataaataataaagcaaaagtaaaagagctttttgaaaaaacaagattatttagattaattctaaataaattttttagctattttttgctaatatttgcttttatgccttttgataattattatagaaaaaagataatgctgattttacctatgaaacagagatttttgagtaattcatcagtggaaatccgtctaatctgtaaaatccgtgttccaaaattattctctaaaagttgtttgagttaatatttaattccattaggaatggtatattggtagaaattcttaaataattaggctaaaataactccgtaggagtggcatatttcacccctgcggcgttaattcaaacagtttcttaaatctcataagcataaaatgcgacaggacatgagcaataccttagaccgatttttaggaggacatacagcagaagagatgattgcttgggcaaaaaggcttcactatttttatctttttggtaacttcttctctggacacgcagagttttatgagtctttgacggtaaggctggactacaaagacaaaaaagacctcctcgataaaatttcacgattagtcatgctcagacctacgccctctgagctaaaagcctttgaaagccctatccatgactatcctgagtatttgcaaccctctcactgtcagattttaaattgccctttggagcagacgaattgtcatatttgggttagtcatttgttttttgagattactctctacggcaacggacagccttactcctacgatgtaagcgaagccaacgtagttgccgcagagaaagtagagcggtatttggaggagcagcaacttcatctttgtgcaaatcatgaaattgcaactcattttaattgcatttccgcaaaaaactatcctgctttattttgagggcttgctaaaataaaaaactatactatcttagaagcctgtggaagtgcctaagtaaactctttcttactttccctttgtagggatataaataaaaaagccccgacaagaagtgggggcagaacaataaagtcttcagaataatctttattgtgaaaagctaaaaacaaataatatgtttttaaaaagatttgttaaattgattcaaagttaataaattgtgaataaaaaccaacctattcatcactttttttcaaaaccaaattttatctatgggaaacgttttaggcttagacattggcactaactctatcggttgggctattgtaaacacggaaaaaaaacttattcattccaacattcacatttttccgcaaggggttaccgaaaaaacaggagagcctcgcaatattcaaagacgcgctgccagaggtgcgagaagaaataaccaccgctacaagcaaagaagggaaaaactacaaaatctactttcaaaaactaagatgttgcctaaatacgtagagaagttcccttatcatgtgtacgagttaagagcaaaagcattagacaagcaaataagtttggaggaattaggcagggtctttttacacctgaatcaacgcaggggcttccagagcaataggaaagaacaagccaatgcagataaggacaaggaaaaagaattgggcaaggtaaaagaaggcatcaaggaactcgaaagcctgttgcaagcgcaccatagtcgaactattggagaattgtattggaagctgttgcaagacagaaaacatgactttacagcagcacaagccattcgtaatcgatttcctactgaaaaacgctatacaagcagggagttactcaaagatgaatttgagcagatttgggaaaaacaaaagcagttttaccctcaaatcctgacagaaaagctaaaaaatgagataggaaaagaaactattttctaccaaaggaagctaaagactcaaaaagggaaaacggaaaaatgcccttttgaacctaaatcttcctgtatccccaaagccgccatagagttccaagagtttaggatttggcagaaattaagcaccataaaagttaccattcctgataaaaatcgcatagctgacctactcaccttagaagaaaaacaaaaaatagcctatgagttagacagactgaccaacaaggaaatgcgtcttactttcaagcaaatcaaggctcttttcaaaaaagaatggggaacggaggcaaatctaaactacaaagaggaggacgacatcaaaggaaataccactgctatcaaattgaggagggtcttgggcgaaaaatatgatgaaatttaccaagcatacaacgaagcctttgagtacgaggagaaaaggaaaactaattttttcaaaatatggcacgcactgctctatgcagacaacgacaaatggctaaaaaaatatgcagtggaaaagttaggcttctcagaagttcaggcagaaaaatatgccgcccaaaacttagaagacggaaacggcagccttagctacaaagccataagacctattttggcgtatttgaaaactggagaagactataccaatgcttgtctattagcaggttatgaccatgccctgctccctgacaagcatagaaagctactcccaaaaatccctaaacttcaaaacaacgaactccgcaatcctactgtgcaaagagccttgacagaaactatcaaattggtcaatcgcttattgcaagaatatgaaatagagagcatttgtatagaaacagcaagagagttaaagaaaaccaagaaaaaaagagatgaaagagaaaaagaactcaaggcaaaaactgaccgcagaagagagttggcaaagtttttagctgaaaactctatgatgctttttgggaaacaaagagaatttgacttgaatagcaagccagacatggaagatgtacgcaagtacgaactttggctcgagcttgccgtagctgacaaagacctcaacgaaataggtattaaaaaaggttttgcagattttgctcgtaaaataggtaaagatgatatggacaagtatagattatggatagaggcacagcgcatttctgtttatacaggtaaagttatccctttccaacgcctattttccaaagattatgaaatagaacacatcttgccgtacagtcgcagttttgatgactcctttgccaataaatctattgctgaggcttggttcaacgccgagaaaggaaaccttacgccttatgagtattttcaaaagaaaaccaaagaagaatggctggctttcaaacacagaatcaagatgctgcctaaacccaagcaggaacgcctcctttgggaaaaagaaatagagggattcagaaatagccaactcacagatacggcttacatcgccagagaaatggctaaaaggctacaatctgtatgcaaagacgtgcagactacgcaaggtgccattacgagtatgctcagaaggtattgggggttaaatgccctgctcaatccagaaggagaaaatgagaaggacaggggcgaccaccgacaccatgccttagatgccatcgtgattgcctgtacaaatagagcaaaagtacaacttatcaactgggcaaacgccaaagacatagactggaaaaaagaacgcagaaaaatagacctgccttggagcagtttccgatacgatgtccaacagcaattacacggtatgctggtttcttaccgtcaagacaatggcatactgataaagcgcaaagccatcaccaaaacaaaaaatggaaagaaaaaaacaagcgtacaaataggcatcagaggtgagcttcacgaagcaacctattacggcaaacacatcttgcccaaaggggcaccgcccgccaaagacaagaaaaccaaaactgcgtattttgtcaggaaaaaactaagcagtttgaacgaaaaccaagtcgagcagatagtagatagggtcatcagagaaaccgtacagaaagccatagcagaaaaaggcttcaaacaggcacttgccgagcctatttatatgcccgataccaacaataaaggctggcaaatgcctatcaaaaaggtacgcattgccataaacaaagatgacgaaggcatgattcctctgtataaaaaagaaggagatgaggactacaaacgcaacctgtacgttccttcgggaagtaactacatcatgggaatctaccaagacccaaacacaggagagaaagaagtctatatcacctctttctacgaagccgtacaaagaaaaatcaaaaaactacccgtcttagactccatgagaggcagtaaaaaattggtcttgacggcaaggcagggcgatatgttcgtagtctatgaaaaccaccccgacgagatagaaaagcacatcaattgggacaggatagacttagaggcacgtaggtttctttttgataagttgtacattgttagaaaaatgactaaaacaaatggaaaaatttttctttcacaacatcatttagctaaagtaaatgtagattcagacccacttccacttaagatttatccattagggaaaaattttaatggaattcctgtagaaatcgacattttaggaaacatcagacgcaaaaaaagcgtataacttcctaattcacaagacctgttagtttttaaacccacagtggaactgctaacaggtctaaatatataccccctcctaccccttccgttttccttttttacttctaaaacctttatgattaagcgcaccctatactttggcaatcccgcttacctaagcaggaagcacgagcagttgctcatcaagatagaaggcaatgctcctcttgagcctattcccatagaagacatcggcatcgtcatcatagaccaccagcaagttacggttacccaagggctgattcaggctctgctcaacaacaacgtagcccttattacctgcgatgagaagcacctgcctacgggcttgctcctcccgctcaacgtacactctcagcaaaccctcaagttcaacaggcaaatctctgcttccgaaccgaccaaaaaacgactttggcagcaaaccgtcaaggcaaaaatccgcaatcaggcgagcctcttgcaggctttgggctatgaggtacgcacgctcaaagactgcatagaagaagtgcagtcaggcgacagcaccaaccgagaggcaaaagcagcagcttattattggggaaaaatcttttctgagtttacggatgactttactcgacaccccgaaggcgagccgcctaaccacctgctcaactacggctatgccattctcagagccatagtagcccgcagcttagtaggctctgggctactccctacctttgggattcatcaccacaaccagtacaatgcctactgccttgccgatgacatcatggaaccataccgtccttacatagacaggctggttcaccaaatcctcgctgagcaaaactccctctcctttggggacgcagtgcatactgagggcaggggtggggcagaaaaccggggtagggctttaacccttaccccctctatgaaaaaaatctttttgcaaattcctgtcatggacgtaagcatagacggagatacgcgacccctaatggtcgcttgtcagcgcactacagcctccctttctcggtgctttgagggagaagccaaaaatattctttaccctgttctttaaagctggaattttgaaaatctggcatgaggaatggaaaaatactaacctcgtaaaaccattttaaacaaaatcaaaccatttcaaactaagtgtattcaataaaataaaaaactatgttcgaaagactaagccaatacagaatcatgtggataattgtattctttgacctgcccgtacagaccaagaagcaaagacgggcttatactgactttcgcaaaagtctgctgaaagacggttttgatatgttccaattctctatctacatcaggcactgcctgagcaaggaaaatgctcgggtacacatagatagggtcaagcaagcactcccgcagttcggacatgtagtcatcatgagcattaccgacaagcagtttggggacatagaggtattctacgaagcgaagcccaaagcccctcccaaaggcggtatgcaactgcaaatgttttaaattttaacaaaaaaactgagcctcaatgagcgaatcggggtggaaaacccccagttttttctcgctcaaagaggctctaacttgctaa

SEQ ID NO: 1618 - DNA, 23552 bp, synthetic construct
  misc_feature 1..23552: note = Synthetic
  source 1..23552: mol_type = other DNA
agagaagataaagaacatatattttcttacgaaggcggcataaaaacttttgtacagtatctaacagccaacaaaaccgtcgttaataaagaccctatatatttttccaaagaaaaagaaaatgttgtagtagaagtcgcgatgcagtataacgattcttacaacgaacagattttctcttttgtaaacaacattaacaccatagagggcggaacgcatttgtcaggtttccgttcggcgcttacccgttcgattaacgactacataaagaaaaatgaaatttctaaaaccaaagatttaaagctttccggtgaagacgtgcgcgaaggtttaactgctgttatatctacgaaagttcctaacccgcagtttgaagggcagacaaaaacaaaactcgggaacggcgaagtggaaggcataacacagtctgttgtcggcgaagcgcttacgactttcttggaagaaaatcccggcatagcaaaacaaattttagacaaagcgattaacgctgccgaagccagagaagcggcaagaaaagcccgtgaaatgacaagacgcaaaggcgctcttgattccgcggcgcttcccggaaaactcgcggattgttccgaaagagacccggaaaaaaccgaactgtttatagtcgaaggagactccgcaggcggttccgcaaaacagggcagagacagaactttccaagcaattttacctttaagaggaaaaattttaaacgttgaaagagcaagacttacaaaaatgcttgccaacaacgaaataagaacgcttattaccgcgatcggcgcgggtataggcaaagacgatcaggactttaacatagaaaaagcgcgttaccataaaataataattatgaccgacgccgacgttgacggcgcgcatatcagaacgctgcttttgacgtttttctatcgccatatgccgcaattgatagaaaaaggttatatctacattgcccaacccccgctttataaagttaagaaaaataaaaaagaaatgtatcttgaaagcgaagacgaattagacaaatttttgtttgcccaggcgcttgacggtttacagctgatacttataaaagacgggcaggaaattaaagaagttgacgataaaaacttaaaacgtatagtcacaagcatcagtgagctggacacgcttatcaaaaaaattataaaaaaaggcgtagcgtggaaagaatatcttaaactgagaaaagaaaaagccacaagagaagacggcaaactgccgctttacagaattgtgcaggacggcgtggcaaaatatatttattccgataaagagtggaaagaatttaaaaatacgttgattgaaaaacaaaaagaagccgccgcgaaagctgcggttgaaaacggcgaacttgcaaatgttttagatacttttaaccctgaagacataattcccgaatataaagatttatgggaactcccgcgaattgacaaactttccgaccagcttcaagacgaaggcttgcatttggagcattacggcgaaacgcacacaaaacccgtttacaaactttggaattcggaaaagaaagccgcgggcgatattcacgaacttaattcaacaatggaacttatagacacaatcagagaccttggtcacaaaggcgcgacgattcaaagatataaaggtttgggagaaatgaatcccgagcagctttgggaaacaacgatggacacaacaaacagaaaacttttgcaggtaaaacttgaagacgcagtagaaacagacagaatttttacgacattaatgggcgaccaggtagaaccgagaagagcgtttatacagacgcacgcgttggatgttaagaatcttgatatttaatgttgtggcggcttaaaattttgggctgcgactttgaaaaatgtaaactcatttaccgctcggcttttcgtaaacttcgtttacatttttcttcgccttgccacaaaattttaagccttaaaggcagttacaaataattatcacgaaaaaaagggaaccctgagagaataatgagtaagaaaatttatcttgccaattggtttgaaaaaaataaaaataaaattgtaatgcccaatatccaacgtaattttgtttggagggaaaaacaggttgaaaaattgtttgattcaatcaataaaggatattttataggaatgttctggatttggaaaccaagtaaagcaagcgaattggaaaaagtaggatattggcagcttctgaaatattataattccaaagaaacaataaaagcgacagatttaaatattcaagacaaaataggtgttttagacggacaacaaagattaagcgctatatctatcgggctatatggttcttacaatgaaagaaaactttactttaatacagaatgtaaacgcaatgaaaatccattcaagtttttagatgagcatcaagcaggcaaaggtttttttaaagtgggcgatattcttatcggaaacaaacaacttgatccaaaatttcgagaattcaaaaataagtttcaaaaagcactctttatcagtcatgaagttaatggtgatattggcgaaataacagatatttttgagagagttaacaagggaggaacctcgttatcaaacagccaagtcttactctcaagattgacggctaaaccagaatggggaaaggatggaaggaaaaaattagaaaatttaaggcgaaaaattgaaaaagaatttgaaatttcaatagattatgaatttataatgaagacaagcttgtttttatcgggcgaaactattaaattcaaagcaaatcaaggcataactgataaaattgataaatcattagatgtaatatataaaaattggaacagaatagaaaaagctattttgcgtatggcaggcaaaatcaatcagcttgggtttagcgataaaaatataacatctgatagtgcccttattcctcttgtatatatattttataaaaacaagaaaagatcagatgatgaaattaaagaatatttatttagatcgtttttaaaaagaatttatggaaaatctacagatacaacattattaaaagtaagaaatattatagataaaaataagtcaaattctttaggaagtattttaaaaaatgacttgtttgtcctttcagctcatgatatatctgaaattctagattttaagaaaagtaaatatagcaagctggcattaatgatactgtatgatgattataattattctgaaaaagattttgaccaggatcatatgcatccgcatagcatctttgaaaacaaagacggattaattgaaaaattacagaaagaaagaataacaaaaataagagcggaacaatgctttatagaatggagaacgaaaaaagaccgtctgcctaatttggagatgttgcatgcaagaaaaaacaaggaaaaaaataaaagctctcttgaagcttattggaataaacataaaaaagcattaaacagagaggatcattttttgaagcaaaatacatcgttgctattaagagattttgacaatttttataaaacacgagagcgcaaaatgagagagaagttaaaaaaatattttaaagtaaggtagttgtttctaaaatgcaaacattaaaggttgcagaaattaggaaaaggagaatcaaaatgtctaaattatcaaaaatttttatttgtttgtcctttgcttttattttttcgggagttgcatttgcccaaaattttaaaaatttgcctgaaccggacaaaaccggcggaaagccattaatggaagctcttaatttaagaaaaacagacagaaatataagcgcaaaacctcttcccgcgcaagaactttcaaatcttttgtgggcaacttggggcataaaccgcgctgacggcagacgcactgcgcctaccgcgagaaacagccaaagaattgaagtttatgctgttttacaagacggcgtttggttatacgatgcaaaaaacaacagattgcagcaaattttaagttcggatgaaagaagcaaattttcgcctgcgggcgttacattgctttatgccgcggatgctggcgacgcgtttgcccaaatgcacgttggcacgctttatcaaaacgcgggactatactgcgcttccgcaggttttgcgaacgtagtcaaagcaaacggcagagatacgcttaaaggaacgctcccgttgccgaaaggttatgaagttatgattgttcatcctatagggtatgcaaattaagccggcataaaaagattaaaataaaaatgaaatacaattttgacaaagtaattaacagaaaaaatacagattctttaaaatgcgattttgtcaaagaatacggattttgcgaaggtacgcttcctttgtgggtggcagatatggattttcccgctccgccggaagtaactgacgctcttgtaaaatccgcgcggcacgcgatctttggttatacagttgcgaaagacgattattatcaagccgttcaaaattggtttcttaaaagatttaattttaaaagcgaaaaagaatggattgtccaaacgcccggagttgtttttgcgatatcgatggctatcagagcttttacaaaacaatctgacgcagtgcttatacaaacgcccgtttatcatccttttcacgcggtcgttaaagtaaacaaaagaaagttagtaaaaaattctttagttttgcgcggcggaaaatatgaaatagatttcgcggactttgaaaagaaaattaaagaagaaaaagttaaactttttattttgtgcagtccgcataatcccgtgggcagagtgtggtctaaggaagagctgaaaaaaataggaaacatttgtcttaaatacggcgtaattgttgtttcagatgatattcactgtgattttgtttacaaaggtttcaagcatactgtatttgcgggcttgagcgaaaaatttttaaaaaatagcgtaacatgtaccgcgccgagcaaaacttttaatctttcagggcttcaggcgtctaatatttttatagcaaacgatcttttaagaaagaaatttgaagaagagattaaaaaaaccggctatgagcaagccaacactatggggcttgttgcctgcaaagcagcgtatttatacggcgaaaaatgggttgacgagctaaacgcgtacattgaaaaaaatatagattttgtggaaacgtttctaaaagaaaatatgccgcaaattaaacttataagaccgcagggaacgtatttgttatggctggattttcgttctttaaatttaaaaccgcagcaattaaaagacttagtatcaaaaaaagcaaaactgtggtttagctacggacaaacattcggcatagagggaaaaggttttttcagaatgaatgccgcttcgccgttatctgtaataaaagaagcgctaaaaagacttgaaaaagcggtaaattcttaatttgagaaaaaaatggcaacaagacaagattttattgattatatttgcgaacaaatagccggtaccggaaacatccggtacaaaaagatgtttggcgaatatatggtttatgttaacgataagcctgttttgcttgtttgcgataatacggtatttgttaaaatgctgtcttgcgtggaagatttaatggagaattcctcaaaagggtttccttacaaaggcgcgaaagaacattatattttagatatagatgatgcggtacttgcaaaagacgttacgcgtattttagaaaaaaatacgcctttgccaaagccaaaagctaaaaagaaaacaggaaaagttaaaagtagtaaaaagtgatattttttgaaaaaataataaataaaaaattattgttttttcaacaaattttagtatttgatactagctttttactaaaacctactagtgtagtaattgacaaagcgaaacagattttatacactaattactaataataaaactattggtagaataaaatgaaattacctgaaaaaccaaactttaattggattgaaatattaaaacaaataagccaagaaaatattgatttatttgcatatcttttaactgatacagattctgaattagataaagcagtaaaaaaagctattaataactgtgattactgggacagcgtaaaatattattcgctcccggaaaatataactccggaacaattttgggcgttgattaattttaggaaatcaaatatcagtaaaaaacagatatatataggcgatcaaaattgtaaaattcttgaaacatcagaaatacaaaaaaaattaagcattattgacaggcatttttctaaatataatttgacagcagaagaagcaaacgaatattctgtaaactcattaatggaagaaggtattgcttcaagtcaattggaaggcgcggctgttactcgggaaatagcaaaagagatgctgcgaacaaacagcttgccgaaaagcatagacgaacagatgattttaaataattacaaagcgatggaatatatagatacgaagtgtggagatacgttaagtccggaaaagataaaatatattcataaaattattaccgaaaaaacgcttgaaaatgaagaaaaagccggaatgtttagaaaagatactgataatgtacgcgttgttgactcaagagataatactttgttgtttgatcctcctaaagcggaaaatgttgagtaccttatagaacaattatgctcttatgctaataaaaatgacgaggatgattttattcatccggctataaaagccatagctatacatttttggcttgcatacatacatccttttgttgacggaaacggtcgtacggcaagggcattgttttattggtatatattaaaaagcggttataagagttttaaatatttggttatatcgcgtattttaaaagaaaaacctatacagtatgcaagagcatatctttatagcgaatacgacgataatgatttaacttattttgtcaattttaatttagatattatactcgatgcaataaaacgatttgacgaatatgccgaaaataaaaaagaagaaaataaaaaaacagcggatttaatagaacaagacatagaattaaatttcaggcaaagaagtataatgaaaacgtttattaaggacaggaacataagaaatatagagtattttaaaaacactttaaatgttgcttatgaaactaccaggaaagacctagactttcttgtaaaaaaaggctttttgacaaagaataaaagaatcaaacaatttgtttattctctaagtaataaattaaaggaaaaattgaaagacaataacaattaaattcattgtattttcaatgaattttaatatttgctactagcttgctactaaaatctactagcgaagtaattgaaagaattaaaaaataataaatccacgtaaaggaaatgaaaatggcagacaaagacaccaaaaagaacgaagaacaggaagcggcgcttcctgcaggtatttttccgcgcaacattgaagacgaaatgaaaacgtcttacatagattacgccatgagcgtaatcgtgggaagagcgcttccggatgtccgcgacggtttaaagcctattcacaggcgcatactttataccatgaaagaaatggggatgaagcacggcaccgcatataaaaaatccgcaagggtagtcggtgacgttatgggtaaataccatccgcacggcgacagcgcgatttacgaatctatggtgcgtatggcgcaggaatggtctttgcgttaccccttggttgacggtcagggaaacttcggcagcatagacggcgactctgccgcggcaatgcgttataccgaagcgcgtatggacgcgattgcggatgaaatgcttgccgatttagacaaaaatacagttgactttatgccaaactacgacggttcgttaaaagaacccgtaattcttcccgcaaaacttcctggacttttgattaacggttcgcaaggtatcgcggtaggtatggcgacaaacgttccaacgcataatttaagcgaagtctgcgatgctgtttccgctttgatagacgatccggaacttcccgtttcggaaatcggcaaatacataaaaggtccggactttcctaccggcgcaataatacttggcaaaggcggcataaaagactatttcgaaagaggcagaggttccataaaaatgagagccaaagtcgaaatcgaagaagccaaaaacggcagggaaacaattatagtcaacgaaattccttatcaggtaaacaaagcaaacctgataatgtccatagccgaacttgtaaaagataaaaaaatcgacggcatttccgaccttcgcgacgaatcagcacgcgacgacataagaataatcatagaaattaaaagggacgcaaacgcccaggttgttttaaaccagttatacaaacacaccgctttgcagtcgtcttttggcgttataatgcttgcgcttgtcaacaaccgcccgaaagtgatgaacataaaagaagtgcttgagcatcacatcgagcacagaaaaatcgttattgtacgccgcacaaagtttgagcttcaaaaagccgaagcaagagcgcacattttggaaggtttgaaaatcgcggttgataatatagacgcggtagtaaaaattatcagaggcgctaaagataaagatgacgcgcgcgaacaactgatggcgaaattcaaactttcaaaagtccagtccgaagctattttggaaatgcgtctgcatcagctgaccggacttgaaagggaagaattagacaaagaatatcttgaaatcataaaaacaatcgaaaggctgcgttcaattttggcagatccgaaaaaagttgctgcattaattaaagccgaaattgaagaaatcaaagaagaatacggcgataagagaagaacgcaaattcaggccgccgaagcggatttcaatatagaagatttaattcaggaagaagaagtcgcggtaacaatgtcgcacgcgggctatattaaacgtattccgctggacacttacaaagcgcagcacagaggcggccgcggaattaccgctatgaccacaaaagaagaagattttgttgaaaatcttttcataacaagttcgcacgcctatctgttgttcttcacaagccgcggacgtttgtattggaacagggtttacgaaatacccgaagccggcagagcgtcaaaaggcaaagcaatagtaaatctgttgcagcttgccccggaagaaaaaattacagcggcaatacctataagaacgcttaatcttaaagaaataaaagatgaatacttgcttatgtgtacaagaaacggcacaatcaaaaaaattgcgcttgaagaattttccaacccgagaaaaggcggcatagttgccataaaacttgacgacggcgacattttagccgaagttaaagcaataggcaaatgtccggaagtgttgatagcagccaaagacggacaagccatacactttaaagaaagcgaagtccgcgccataggcagaacgggtatgggcgttaacggcatagacataggaaaagacgatgaagttataggtatggaagtgctttgcaaagacgacacagtgcttgcggtaagcgaaaacggatacggaaaacgtacaaaagtaagcgaatatcgcttaacgcatcgcggcggcaaaggcgtaataaatatgcaaacgactgacagaaacggcaaagttgtaggcataaaacgcgctaaccccggcgaagaaataatgataatgacacaaaacggcataacaataagaatgaaagtagataacatctcggtaataagccgaaatacccagggggtccgcctggtcaagctggacgcggacgacaaggtcgcagccatcgccagcgtggtaaaagaagacgacgaaggcgaaacacaagaaacaacggaagaaaagaaataaaaacaaaagcccctgagacctaataagtcaaaggggctttttgattattttgaagaaattattacatttataggaagaaaaaagatgaaatacagacttggtattgatttaggaacatcttcaataggaattgcagcttttagtcttaaagaaaataatgagatagatgatttaatctatatggatagctatatttttggagaacctgtaaatccaaaagctatggttacgttaaacactgacagacgttcagcccgccttattcgccgccaaatagaacggaaagccaaaaggctcaaaaagttaacctatattgtaaaaagcattggcgtgtcaaaagaaaatctagatgctataaaagacagcgatgtcatagcgcttcgggcaaaagcaatttctgaaaaattaactttgccggaacttataaaagtattcagccatattgtgaaaaacagaggatacaaaggtgatttaaaacgcgctgaaggcgatgttggctcaaaaatcaaagaaacaaaatcaatgttaggcgataaaacattagggcaattgctgtatgaaaaaagagaggcggcagaaaacaataccccttggcgaaagttaaatcaagatggaacgttcattacaagagatattattgaggatgaatttgaaaaaatttggcaaaaacagataaatcatcacgaagaattaaagggcaattaccaaattacatacaaagaaatgtttactaaccacgcaggcaaagatgaagtcttgctaaaagacgctttttttagcgcgatgttttatcaaagacctatcaagtggaaaccggagactgtcgggttttgcagtttagaagaagacgaataccgctctgctgttgctcaacctgtttttcaaaaataccgtcttgcagcaaacattgcaaatttaagggttaaaacattgggttcaaaagaagagtgttcgttaacagaagatgaaattaaaaaaatttatgattttgtttgtgaaaattttaaactatacaatgatagagcaaaaatatcgtataaactgatttacgaaaagcttggctttagagataacgaaaaatttaccattgaccgcgccaaaggcgatgcggcaaaagacgcaggacttaaaggcataacaactttacaagctttttataattgcgacaaagaagattttaaatttataaacgcttttaactctctttctgaaaaagtgcaagaacttgcaatggaatttttagcaaatataacaaaatatgctgatattcaagaaaatgaagacggttatatagatttaaaatttcctgaacttacaaaaaatgtaaaaaataaaacagaagaagataatcaaaaagcaattatgtttataaaaatgctgcgtaaagaagagatcttttacaacaataaatttgatttggaacaagggcgtgcaagttatagcattaaagcattaaatagaattattccggaacttctaaaaagtgaaaacgagcaaaatatcattaataaactttatccgccaaaatctgaaagccaagaaaatcctgttttgagagattatgaaaaagttgccacaaataatccggtaatagataaagtgttacgtgaatttaaacggacaatggattttatcgttaagaaatttgacggcaatcctgctgaaatgacaatagaacttacccgcgaattaaaaaattctttagcaaaaagaagctatattgaaaaacaaaatcaaatagcgcaagacgatagaacaaaagctataaatgaattaaaaagccacaatatttatttgtcaggtgaaaatattgagaaatatcttttgagacaagagcaagacaatcactgcccttactgcggtcaaactttatctataggcgacatagtaaataatacccaaatagatcatataattccacaggcaataggcggaccaaatatcttttcaaataaaattttagcccatacaaagtgtaaccatgataaaggcaataaaatcccttacgaatataaatttcaaaaagatatagaagattatattgcttttttgcaagagaagaaaaagtctaaaaaagccggcaaagatgaaaagatagattttcgtaaagatagctctttaataaatttagttaaatctctttggcaaaaatacacaaaagaaagtaaaggttattatgacaaacgtaaaagaaaatggactgcaactcagaaaggcaagcgcctgcttgataaaatcaactttattttaacaaagcccgatgaaataaaagatattataggtgagttttcaaatctgcatttaaattctactgcctggataaataaaattattatggattggagtaaagatatttgtccaaaagttactccatcttttggagcgcttaccgcgtatttgagaagcaaatggaattttagtgaaattttacctcttgttcgtatttccgaaggtaaaaaactctttgatgaaaatgacaaagagatagacagcaaaaaatggcaggaattatggataaaacatgatttaagtctttcaaatactaaaacattgatggaaaactttgaggattatataaacgatttagaagaaagcgataaacctataaatgatactgataaacaagaacaattcaaaaaaatttgccaagatttgcgtcaagaaaataaattcaataaacgttgcgaccacaggcatcatgcggttgacgcggcaattatagggctttcaactctttcgttaattcaacaggcttcacaacataatgcaaaatatggcggattgtatgaagttaaaaacgacaaaggcgaagtagaaattcctcattttgagattaaaaaagaagatgccttgctttataaaatcataaaagaaaaagctttaaaatatcttacaaactttgtcgtttggcataaaccggaccatttcccaagcggagcgttctttaaagactttgcatacgatgcggtaaaaattctaaaaggtgacgagaatgaaagatttgtgaaaaagtattttttgtccgatattttaggcaaggaaactaatttggacaaattaataaaaaaacttaatgtttttgtagaagggaatacactaaaacaagaaattattaaacagctacaagaaagaacaagaaaaggattatcattaaaagatgcctttcttggggagaatgaaaatgatggtatattttatagggggcataaggtaaaaaagcttcgcggaatatatcaggaatcatattacaaagaagaaagggataaaaaaattactttagtaaacaaaaaaggacaaaaaattggtaataagtattatatgaatgatggttttgcttgtatggattttgatgcagaaaatagaaaaagaattaatataattcctatagcaacatactacagagattattttaataagccaatacctaataatataattcgtatttttattggcgatatattatttgataagaaaaataataatttttataaagtgcaaagttttaagtttagggatgggcttcattgtatattacattcggaagtcaatgacgatgggcgcgatgttaatagtttaaaagatatgttgttaataaaaacccgttctgatattgcaaaaataaaaaatggcaaataatcatattataagtatagaaaagcctgcgaaactttctattgatacgggcaggttagaaataaactttatagaaaaaggcgaaaagcattattttgcgccttttgatattgctgttttaattttggcgcacacttcaattttgctttcttctgctgtttcaaaagaactttcaaacgcaggtgtagctatagtttatgttggagataattacatgcctatcggtataactttaccaataggtataaatttagacggcgcaaagcgacctcacttgcaagccaaatatataaattctaacttaacaaaaccttggtggcggcaggtaataaaatcaaaaattttaggtcaagcatcagtattagaggcttttgcaaaagacgaatctcaaagacttactactattgcaaataaggtaattgatggggatgatgacaataaagaagggcagtctgcgagattttattgggatgttttttttggagtactgaataaaacagttcgtaaaagagaaaaacaaggcgcaacagatgtaataaattcctctcttaattatgcttatgcgattattcgttctatggtagcgcgttctcttgtaagcgcaggactatgcttaaatcttgggattggacacagcagaagagataatccttttaatttggttgaagattttatagagccgtttaggtttgtggcagataaagtgatttttgaaattttttcagataatgattacgaatctttaaatactgtcttaaaaagagaattgttatcacgtattttacaagaagttgtaagagtagagaataaaaattatagattatttgaagctgtagattttatggttgatagtttttgtaacactcttgaagatccgcgcagaaaattactactacctaatatgccgacttcaagaggtgtaaagatggaaatgcctgaattgtttcatactaaatatgaaatttaacgggtggcgctctatgtgggtaatggcatcgtttgatttgcctactcaatctgtttcgcaaaaaagacgatatagtaaattccgtaagttattgttggaaaacggatttactatgatgcaattttcagtatatgttcgcaatatgcctacacaacataaggctgaagcattaatcaaaaggatgggagcttgtactcctgaagaggggcagtgtgcttttatacaaataacagataaacaatatgggatgataaaaaattactatggtcataaagaggaaaaagaaaaaatccccaaaaaatacgaacaactcgtattgtttggggattaatctttttttaaaaattttgcgggcttttaagcccttgttacccaagatggcgcatttgttggagtaaggattgaacttgtgaagtttttgtaattatctttaaaaaaatctttatttataaaggcttttttaaagatagaaaccgtttccttactccacaacgcgcaatgggaactatgacacatgggtggatgattttggttttaaaccgtttccttactccacaacgcgcaatgggaaccgagaatcgccgtgtttccgagcgcgcgctaaaccgtttccttactccacaacgcgcaatgggaactgcttttgctacaggaatatgtttctcaataaaccgtttccttactccacaacgcgcaatgggaacatacccaacgctgttctgatcgcttctcttaaaccgtttccttactccacaacgcgcaatgggaactattttgtcaatttttgtattttttataaaaaaccgtttccttactccacaacgcgcaatgggaacaagtattctggtttccactgatttgttggcaaaccgtttccttactccacaacgcgcaatgggaactgcgctgcgtacggctcgcgcaaattttgtaaaccgtttccttactccacaacgcgcaatgggaactactttttaccttcatattctatatacccaaaaccgtttccttactccacaacgcgcaatgggaacggattatcacactgtgctatactaaaacaaaaaccgtttccttactccacaacgcgcaatgggaacgaatccgtcaacagcttcgtgccgttcactaaaccgtttccttactccacaacgcgcaatgggaactaacgagcctgctattcctgacttcatataaaaccgtttccttactccacaacgcgcaatgggaacttctggaatatgttgaagatttgttcttataaaccgtttccttactccacaacgcgcaatgggaacatcagttgtggtactgtatattctgtctgcaaaccgtttccttactccacaacgcgcaatgggaactcttgtccaccagttatatttgctccacttaaaccgtttccttactccacaacgcgcaatgggaaccaaggctcattgctaataagaagtaaatttttaatatcaaagaacaatcaatattgtttaattattatataacttatgtttgataaaattcaataagcttttattatacaagcctggggcaaaatttttattaaatccttttttacgtgattaaaggaattgtatgctacttgacgcggaatacagatgtattctataatgtgttatacaagatgttaagctaataaaattgatatagaggtgtaaaaatgacggaaattacaataaaaaacaaaagtccatttgaggaaattaaatttattgatgaaaacgatattgaaagatggtatgcaagagatttatcaaaactattaggttatgatgagtggcgcaattttgaaaatgttttgaacaaagctgttatttcatcaaaaacagttggtgccgacgaggcttatcattttgttgaaatcaacaaaatgataaatttagcaaagggtgcaaacagaaaagttaaagattttgctttatctcgttatgcatgttatttgattattcaaaatgcggatccggcaaaaccgcttgtttcgataggtcaaacttattttgccatacaaacgcgccgacaggaattatcggataggaatatggaaataaccgaaaatgaaaagcgtttgttgttaaggaacgaaatgaagtttcataataaaaaacttgcggcagcggcaaaagaagcaggtgttgagttgccattggattatgcaatatttcaagattatggctataaagggctttacggcggactcgggcgtaaagatattcacaaaagaaaagatttaaagaaaagccaggaaatattagattatatgggaagtacggaacttgccgctaatttatttagagctacacagactgaagaaaaattaaaaagagaagatattaaaggcaaaaatcaggcaaattgcactcatcacgaggttggcaaaaaagtaaggcaaactattaaagaacttggcgggacaatgcctgaagatttgccaaggactgaaaaaggtatcaaacaaatcgaaaccgaaaagagaaaaaagctgaaacaatcaaaatagattttgaaaaaatttggattacataattgtcgtcccactggtatgacaatttaaagattttaaattgtgtcgacattgtcgacacaattgacgaaaaacaagaaacgagggtgaaatgaataatagtttattagacaatcttgataaaatacatacaactgaattagggattgagcgaattaaaaataatttaggcttagatactgatgatgttgtgacatggtgcaagcgtaaaatcaagaaagcaagtaatataaacagaaaagggaagaattggtatgtgcaagtcgataattccgtgataaccgttaatgcgtatagttttacaataattacagcgcacaaagagaaaaatatataaacattggcaattacaaaaagcgaatatgctgacttgaggtcacaatttgtgaccaactgaattttgtataatgtagcaggaggctttatgaaagaaaaaatcagatgtccttggccgggagatattcccatatacatagactatcatgacaatgagtgggggcggcctgtacatgatgaccgccatctatttgaaatgttgattttagacggcgctcaggcagggctttcgtggataaccgtgcttaagaagagagaagcgtacaggaaagcttttgacgggtttgatcctaaaaaagtagcccgttacagcgatgcaaaaatagaaaagcttatggcaaatcccggaataataagaaaccgtctgaaaattaactcggctgttactaatgcaaagttatttttggaaattgtgaaaaaatacgggagttttgataagtttatctggggatatgtggattataagcctattataaatcatcggaaaaaacttaaagatatccccgcaaccactccgatttccgataaaataagcaaagatttgaaaaaaatgggttttaaatttgtcggttcaaccataatttacgcgtttatgcaggcagcaggtatggttaatgatcatcttacggactgttttgtgtataaggagattaaatgaaaagatttatggcagttttagcattttgtttttttacggcagcagtatgttttgcgcaaagcggtaattccgtaactggtttctggcagacaattgatgacaaaacaaaagagcctaaaagcatagtgtctgtttacgaaaaagacggcgcggtttttgcgaaaattatagccgtttatactgatggaaaactagatattgttaaagacgaggaagggaattttgtcgcgaataaagaaagagttgctcctaaaatggacaatcagccttttgccggattagttattataaaagatttgcgtttagacaaaagcggaaaatattccggaggaacgattgtagacccaaacaaaggcggtgacccgtataaagctgaaatctggcttgaaaacggagagttaaaagtccgcggcaagcttggaccttttagcagaacccaaacatggaagagttttccccaatccgattttccggaaggttttaaaataacggaataaattacgatttcttgattgccggtaatgtttgtcattctgaatcccgcagggtgaagaatccatacctttaactactggatacattcggcaataaagctgcctcagtatgacagacaaagacgaaaaaacattatagaaataagcaaagaaaacccccgcctgcaatttattttgcaggcggggtttttattaaaggtatagattgcggatcaagtccgcaatgacgaaaaaactatcctctcccttgtcagggagaggattaaggtgagggtacaacgactataatagttaaaatggatcccgatggatcatgtcctcgaaattcgtaatcggggaaatttcgaggatgacaaaagagcggaagtacaacctgcttttgtcggttacaaataatgttctactacttgtttaagttcaatcaaatctatgggttttgccagaaaatagtcggctcccatgctgattgtttcatctttcgcgtcgctgcctgatattattataaccgctgttttaggtttgtccgatttaatgttttttaaaacttcaaaaccgcttattccggtccctaagtttaaatctagaaaaacgcagtcataagaattgtcttttaacaattcaagagcggtttcgccgtcttttgccacgtcgttttctactccgaaacgcgtgagaaagcgtcgcataaaaatatcatcttctacaatcaaaactttttttgctttagtcataaattcctgcctcaaaatagagaatgtctatataatgtacatttttaggatggtttaggcaaattaatatatatctttgttccctgcaagtattcggattcaatccaaatacttcctttatgcatttcttctatcattctttttacgacatacattcctattcccgagccggatttatatgaagatttagtagtaaaaaacggcgcgaaagttttcttgaaattttcaggttttattcctattccgttatccgcgactattatttcgcttgaatccggattatcattaagaataatggttattttaggattatacttaatactgggattatgttttgacacataatctttcatttcaagcgttgcttcatagccgttatcaacaagattatagaccgattccataataagcgattttatgccgaatatcgttttatttccgaccgaggaataatcaacaagcgattctgcttttatgtgatgtttgactttaagcaaatctattgaaagttcaacgacttctttaagttcaaattctttatactgcgtttcacttgcttcaactctcgcataatttaaaatgccttttattatggcgctagtgcgttttacattatcggaaagcgaatgcgaaaggtcataaaaatattttattgattcggaaaaagttttctggtcgcttacaagcggcgtcattttatttttaaattcttccaattcatagtacatttcgccggctattacggagaaatggttaagcctgttgttaatttgatgcgctacgccttcggcaagcccgccgattgaagcaagcttttccgcggaaaaaactttttcctgagcttttttaaattcttcgataaacatacagttttctattgccattgccgtttgggaggcaagaatattgaatatgttaatgtcgtctttggaatacggtttgtggttgtttttttcaccaagcagcaaaaagccgtttacttcttttagcgcgaaagtcggcactataagacctattctgaaatcaaaatggattttctttttaacggcttcgggaatttcttcataaacaaaaggcatttcttttgattttgtgaattcaacaaaaggcgagtccgagaaaaccggaggggcatttttgaaaatatgctgacggtcatcagctctgaaagatactattctatattctttcgcgtcgtcgtccagaagataaattgcagcgaattttattttaaccgaccgttttaccagatgaactactatttttaaaagctttttaaggtcgtggcgctgcatcatcccggcggcagcctgcagtaaaatattctggtacgaacgctgttccgcaagcatcagattttcggttttcttttgtatgccgttaaaaaccatggttcctattgacgcaaatataacggctataaaagtagctaatttccagttgccggttttgaccccgatcaaaaccggaatgccgaataaaatggtatataacagcaaatacagtcctgttctggctaaaacaagctctacgtcaagcagattatattttattatcgcaaaacttattaaagttatgaaaaaaacaatcagtatataaccgaaaggatacagttctatgccttcatatttggcgatataatctacaaccccgagcaagcatatggtaaaggccgtaaaaacataaactatctggcgtctttgcgcggcaggaagcgaataattaaaagccgatttaaaaagaataaaggagcacattgagaaaagaacgacaaacataagcaaaaatattatgtaaagcttgccggctataggataataaccccaaaaatgaagtttaacgccgttataaattaaagtggttgaccagttaatgattaagcatacaactgcgaaagcgacaaaataccatatgctgctttttattttttttgttccgacttgagcgtaaacgaacattaaagccagaaccggaatgaaagttactcccaaaaatccgactcttgcccaaaagaaagcaatatcgggattcgccgaaaagtacatcattgaaaagccgagcagccatagaataagcgaacagcaaaaaagcacaaaatactttatcgcgtcggatctgtcccaattggcgagcattttaattgttatgaaaataacaaaaaaagctgttataagaggcgggattgcgtatatattaaaaaaataattagaaagcgaaaacatcggtctaaagaatcctttttataggtatatttataaacaaaatcagtctcttctgtttttgcgtctttctcttgctaatgttattccttgaagatgagtggttttaagccacatgtaattcatttcgccgaatggtccgctggtttttcttgttccgccgtggctggcaagacattccgaaacttcaacgtgtttggcgtttattctcaaaagaccggaattggaaagatattttataaactgccttatatatacgtatgattttatccaggcggaaattcttaagccgaattcattctggtcaaccagatctatcattttggaaaagatttccttgtctttttcggctccgggttttgaagacttaacttttataacgggaataagcggaaaaaagctctcatttttaacgcaggaaaaagaataaggatccagttcatcatcgatttgtataagggtaggccgtacatacgcccctttcggattaagcgtattgtcataatttattcttgctccgccgcataaaagttttgcgcctttactcagcgcttctttaaaatactcttcaaaagtgtcggttttaactaccggagaaagtattacgttaggctgcgacggcagtccgtaaactattttcgatatcttttctttcattatatccacaaaagtatcataaatgtcttcgtgcactataaactttttcggtaccatgcaaatctgcgtggagcctaaaaaagcgtccatggccgaatctgcagcgtcgtcaacgtcgcagtctttccatactattaacgggtcgctgcccgaaagttcaagtatgggttttttgccggcattataacattgtctgcctatctcaagacccgcgtcgctttcgccgaaaaacaatacgtcgtttacttttggcgacgccagccattgctccataatccttttggaatttcctacgactatatttatagcgcctgcgggagcgccgtttttttcaagcatggggtttattatgtctttccaaagaaatatagtggaaaccggagcttttaaaggaggttttattattaaggtattgccgctaagcagcgcgtgaatcccgaggctggaattgcttgccgacgcgttttttggggaagatatgcaaactactccgtcgggtcgtcttgcgaaataaagcgtttcgtttctaaaacgggttacttcgcgccaaagttcgtcggcataaaattttgccgatttctcggaaaaaatcagttccattcctctgtattcccattcagcaaggctcatgggatgaccttctatttgcagcattttaataaacttatctttgtttttttcaagattatcatgaatatcatgcataatctttcttctttttgaaaccggaaaagatccaaactcttttgcggcgcgatgcgcggcgtctatagcttttaaatttaaagaatcatcgcctacgcagtagcgggcatagatatattcgtctgcattatcgggtatttcgtctttttttaattttgtaattatgcggtatgtgtttttgaattctgttataaatttatctgaatagggagtgtaatcataaacgccggtgtcaacttcttttccgtcaacaaaaaggttaaattgattaatcttcttattaatcacctagcctccttcgccgtttttatcagaataatttgtattgagagataataccaaaataatatatattttacaatgaatgtttgcgttgtcatgttgagcggagcaacgcagttgcgcagccgaaacatctgctttttaacggcaggtccttcggtttcgctcagggtgacaaaatggaattttatgctctcttaacaactttatatttggaattatttttgataaaatcttgttatgattaaaattatgttagttgatgatgaagtttttgccagagaaagcatagcaagatttatgcaaagagaaggtttttctgtttttcttgcgggcacggctaaagaagcgcttgaaatttgtaaaaacgaaaagccggacgttatttttttagatctgatgcttcctgatttgg

SEQ ID NO: 1619 - DNA, 23225 bp, synthetic construct
  source 1..23225: mol_type = other DNA
  misc_feature 1..23225: note = Synthetic
cgaacttgtcgccgtcgatctcctcgcccagccggtgggcgacgaactcgccgacgacattctcgaccggggcctgggccagatcgatctgatacagcgcctgggccgcggccagacgggcggccttgcggcgcgccttggcggagccgccgccggtcttgttcttgcgggacttcgatttgcccttggagtcgccgcccttgggggtgtgatcgggtgtcacggggctgcccgcgtcgtcgttgctcatgatctgctgtcgctaaaagagaggagatgtcggggtcagcgcggatagaggcggaatttgcgcttcaggtcaatcatgtcaaggcaggcccgcgcggcgcggccccccatattgaccgatccgacattggcgcgcccccaggcctgttcgcggttttccaccgtcaggatgccgtttccgatcgccagactgtagcgcagggcaagatcctgaaggccgcgggcgctttcggcacagatcgtttcgtaccgcgtcgtttcgccccggatcacgcagcccagcgccacatagccgtcgaagcgcttgcgggcggtgaagaaatccatcgagcggatggcgtacatgatcgccgccggaagttccagacagccgggcacgccgtaccggatgtgcgtggcgccggcgcggtccagttccgcgacggcgccacgcgccaactcatcggcgatgtcctcgtggaggcgggcatccacgaccatgatatggggcgtgtcggtcatccggcggcgttctgttccttaaagcgaatttgcgttcgctttggcttcatctgacctcatccgccggtcgggcttcggccgcatgggcgaccggggccgccgtcgcggtccatagcggattgcaatccgcttcagtcgtcgccgaagtcggctgcacccggattgatggcgcggtggccgaccacggtcaggccgtagccctcaagcccgatgatcggcttcttgcggttcgacagcaggatcatcctgcgcacgccgagatccagcagaatctgcgcgccgatgccgtagtcgcgcagttccggcgcgctgccggactgcccctccagccgggccttcaggacggtggacagtccgttggggttcggctcgcgcagcagcacgacgacgccgcgtccttccttggcgatcagctccatcgaggcatggaggtcgttttcgcggccggagttgcggtcgcccagcacgtcgtccagcaccgactgggcatgcatgcgcaccagcaccggctcgtcgccggagatgtcgccgcgcaccagcgcgatgtgctccgcgtactggatcttgttgatgtagacgtaggactggaaacggccgccgaagcggctgtccagcgtgccggccagcacctgttcgacgatggtctcggtgcggcggcggtaggcgatcaggtcggcgatggtgcccaccttcagcccgtggaactgggcgaactgcaccagatccggcaggcgggccatggtgccgtcgtcgttcatgatctcgcagatcaccgccgacgaggaatggccggacagccgggcgatgtcgaccgacgcctcggtatggccggcgcggaccagcacgccgccgtcacgcgccagcagcgggaagatgtggccgggggtggcgagatcctgcgggccggacgccgggtcgatggcgaccgcgatggtgcgggcgcggtcggcggcggagatgccggtggtgaccccctcgcgcgcctcgatcgagacggtgaaggcggtctggtggcgcgacgcgttctgctgcgccatcagcggcaggcgcagccgctcgatgttcggccggtccatggtgaggcagatcaggccgcggccatgcttggccatgaagttcaccgcttccggcgtggcgcaggaggcggggatcaccagatcgccctcattctcccggtcctcgtcgtcgacgaggatgaacatcctgccttgacgcgcctcttcgatgatttcttcggccgtcgacaggtattggtgaaactcggacgtcattcctgccccgcgagccgggcgacatagcgcgccagcatatcgatttcgagattgaccgcatcgccctccttcagcccgccgaaggtggtggcggtctgggtgtgggggatgatgttgacgccgaagcggctgccgtcgacctcgttgacggtcagcgacacgccgtcgatggcgaccgagcccttcggcgcgatgtatttggcgagggtggccggcgcctcgaaggtcaggcgcagcgactcgccttcaggacggatcgacaggagccggccgacgccgtcgacatggccggacacgatgtgcccgcccagctcgtcgccgaccttcagcgcgcgttccaggttgatgcgcgtgccggcttcccacccgccgagcgtcgtcttcgacagggtttcccgcgacgcctggatgacgtaggtccccggccccttttcgatgaccgtcagacagacgccgttatgggcgatggacgccccgatcgcgatcgtctccgtgtcgaaggcggtctcgatggtgaaccgggtgtcgccctgccgctccacggcccggacgcgcccgacatcggtgatgattccggtgaacatggcggcgaatttagcaggtttcgcggccaggggaagcgcgcgcgacaccgcagcggacgcaacggtctgttgcgtggcctgaaccgacggcatatccggtcctcaggaggcgatgcggcgatagctttcggccagatcggcgccggcacggcggacggcggtgcgttcgaagcgggccatcgccgacagcgcatcgactccgaagccggcaaccgccggcagcccgtctcccccgatcagcgacgcggcgcggaaccactccagccggtcgaccagaccggcgccgagcagggcgccggccatcgcggcgcctccttccaccaggacgcgggtgatgccgcgggaagacagggcggaaagggcggcggcgggatcgacccggccatccgcaccggcggcgaccgcgatcacctccacgccaagcgcggtgagggcttcggcacgcgcggcgtcggggctggggccggtgacgacccaggtcgggatgcggccagcgccggcggccagcttcgccgccggggacaggcgcaggctgctgtccaccaccacgcgcaccgggctgcggtcgccgaggccgggcaggcggcaggtcagttcggggtcgtcggccagcgcggtgccgatgcccaccaggatcgcgtcatggccggcgcgcagacggtggccccaggcgcgggcggtcgggccggtgatccattgcgactcgccggtccgggtggcgatgcggccgtccagcgtgctggcgaccttcagcgtgaccagcgggcggcccagcgtgatgcggttgaagaacccttcgttgagggccagcgcctcggcctcgcggacgccggtgacgacctcgatcccggcgtcgcgcaggcgggccagcccgccgccggcaacccgcgggtcgggatcctggcaggcgacgacgacgcgcgccaccttcgcctccaccagcgccagggcgcagggcggcgtcttgccgtagtggttgcagggttcgagcgtgacgtaggcggtcgccccctcggcccggcccggcaggtcacggacgcgggccagcgcctccgtctcggcatggggacggccgccgggttgggtccagccgcggccgatcacggcgccgtcgcggaccagcacgcagccgaccgccggattcggccaggtccgccccagcccccgcgcggcgagcgacagggcggcctgcatatggtgcaggtcggtgtcgggatcggggaggacgggcaccgaagccggcctcaggtcagctgccggggcccttgcccttggtgtccttggcggagaagcggccgacgttgcccatcatctgttccaggaagcccatctcgcggccggcggtgggcgtcgtgcgctccaccagatcgatgtcctggccgttcgacttgtccagcgtcctgatctcgcgcaggacgccggcatcgtcgaagcgggcgatgacgacgcggcgctccgtcacctccggctcgaagaaggcggtcttctcggtcttctggccgatgtagtaccagacattcggatcgaaggtgcccaccgaggtcggcgtgccgagaaccgcggcgacgtcgtcgcgccggctctggcccggctgcagctccgccacctgctgcgggtccgtcaggttgccgcgggtggcgacgacgggggagcagccggtcgcggcgaggccggcgaacaggacgcttcccagaaggacagtgcgaatgacgacgcgcggagcggaaaagttcgatctggtcatggtgctcgggctatgatggagccggcggggcagggaggcctttcaccaaagtgaatgtcctcatcgatcgggacaatcgcaccggctgcttcgccctgtcaacgagactccgagtcggggaagggctgccgttcgtgtcaggaagttttatcggccgtttgcttgaccgtgtcggcggcggcgcgcgcgcccggaatgccgaggcggtgggcgggctgttcaccggcatcgtcgcccaggcccgccagccgggcttctacgccgcactgggcgtgccggacacgctggacggccggttcgagatggtggcgctgcacctgttcctggtgatgcgccggctgaaggggcagggggccttggcggccaagctgtcgcagcgcctctacgagacgatggtcgacgacttcgagaagtcgatcatggagctgggggccggcgacagcggcatcgcccggcgggtgaagacgatggcgcgcggcatggccgggcgaatccgcgcctatgacgaggcgctggccgaatccggcgatagccggctcgaagtggcgctggacaacaacctctatgggacggtggatccggtgccggacggagcgcttcccgccatggccggctatgtgcgcgcctgcgtcgcggcgctcgacgcccagccgctggaggcgctgatgcgcggcgaactgcgcttcgctcccgcgccggcctgacggcacactatatatatcgcttttgaatatactgcgcctgtggggccgccggcaccgcagagggcttgcctttcgcggccggcggctgcatgtgaatcgagggggcgattgctcccgcccgttcgtttagaccgccgccttggtttcatcagagagtccttcgccatgagtcctgtcaacggcggcctgccggccccggaattctcgcgcatcgtcaatgccgacgcggtgcgccgcaccgacgtgaccgagaccatcgaggcgacggagaaggagcgccgcgcgctcgccgagcggctggaactggaggcgatcggcagcctgaccgccacggtgaagctgcacgcggtgcgcggcggccagatgatccgggtgtccggcaagctggaggccgacgtggtccagacctgcgtcgtcacgctggagccggtgccggcccatgtcagcgagagcttcgaggcgctgttcgccccgccctcgatggtcgaggaccaggggctggagatcgatttcgacccctccctgtcggacgaggacatccccgagccgatggagaacaatcgaatcgacatcggcgaactgaccgcgcagcacctgtcgctgggtctcgatccctatccgcatgccgagggtgtggaattcgagggctatgacgagggtgacgaaggcggggcgaccgaagacgaggcggcggaagaggcggaaaagccgaaccccttcgccgttctgcagcagttgaagcagccgaagtgactgcggacttgcgtcccccgctgttccttgtataagggccggcatttccaccccctccaatgagcggcgcggggttgcgaaatgggggttgttcgggcttgcccttcgggagcatttgccttattgaatgccgctcgcgctgggcggcccctgttcgggccgccctttccaatgaagagagtttacggtcatggctgttccgaagaagaagacctccaagtcgcggcgcaacatgcggcgttcgcaccatgctctgccgacctcggcctacaacgagtgcccgagctgcggcgagctgaagcgtccgcaccacgtctgcgggtcttgcggccagtacgaccagcgcgaagtggttcagagcggcaccgcggccgcttgatcccgatcgcgttgtctgaggtcccgatgatcaggggcgtatctcgcccctgccggggtcgtagccggggagcctgctcgcggtgagccagcgtctgaccatcgccctggatgccatgggtggcgatctcggtcccgacatggtcattgccggggcggagatcgcgcgggagcgccatcccgatgtgcgctttctgctgtatggcgaccgggagcggatcgaaccgctgctgagccaacgccccgcgttgaaggcggtggcggagatccgccataccgccgacttcgtggcgggggacgccaagcccgcagtcgccctgcgtgccgggcgccagtccagcatgaggcttgccatcgacgccgtggcgtcgggcgaggccgcctgcgtggtctcggccggcaacaccggcgccctgatggcgatggcgaagttcgtgctgaagacgctgccgggcatcgaccggccggcgatggcttccttcttcccgacgcaacggggcgagagcgtgatgctggacctcggcgccaatgccgaatgccagtcggaaaatctcgtccagttcgccgtgatgggggccgtcttcgcgcgtgccatcctggggctgccggagccgacgatcggtgtgctgaacatcggttcggaagacatgaagggcaacgaggtggtgcgtgccgcggcggccagcctgcgcgacatgccgctgcccggccgcttccatggcttcgtcgaaggcaccgacatcgggctggggacggtcgacgtcatcgtcaccgacggcttcaccggcaatgtcgcgctgaagacggcggaggggacggccaagctgttctccgagttcctgcgccgcacctttgcgacatccttcctggcacggatcggctatctgctggcaaggggcgccttcaagcgcttccgcgagcggatcgacccgcggcgctacaacggcgcgatgttcctgggcctgcgcggcgtctgcgtgaagagccatggcggcaccgacccggtcggattcgccaatgccgtcgcggtcgcgatcaatctggcgactcacggtttcaacgagcgcatcaaggaagagatggggcgcatagccgacgcgaaccctcttcccgacacgaaggcggcggcgggctgaaccatggtcatgcgttcccgagttcttggttgcggtatcttcctgccggccaacgtcgtcaccaaccaggatctggaacagcgggtcgacacgtcggacgagtggatcgtccagcgcaccggcatcaagtcgcgccacatcgcggctgagggggagaagacctccgacctcgccatcgcggcggcgacccgcgcgctggagcatgccggcattccggccgccagcatcgactgcatcgtgctggcgaccaccacgcccgacaacaccttcccggccacggccaccagggttcaggccgcgctcggcaccgtcggattcgccatggacatccaggcggtctgcgccggattcgtctatgccatggctgtcgccgacaatttcctgcgcagcggccaggcgcgccgggccctggtgatcggggcggaaaccttctcccgactgctggactggaacgaccgcaccacctgcgtgctgttcggcgacggtgccggcgccatcgtgctggaggcctatgaggccaagggcgattcgtccgatcgcggcgtgctgtccactcatctgcattccgacggcagccaatacgacctgctctatgtcgacggcggcgcgtcctcgaccggcaccatcggccatgtccgcatgcacgggcaggaaatcttccgccatgccatctccaagctgtcggcggtggtggatgaggctttgctcgccaacggcctggaatccaccgacatcgactggatggttccgcaccaggccaacaggcgcatcatcgacggactggcccgcaagatgaagctgtcgccggaaaaggtggtgctgacggtggaccgccacggcaacacgtcggcggcgtcgatcccgctggcgctgggcgaggcggtggccgacggccgggtcaagcgcggcgacctgatcctgatggaagccatcggcggcggcctgacctggggctcggcgctgatccgctggtaagcggcccctgctttttccatactctcttcgatgctgcaccgcacgcgcagcccgccttcggccgggctgtatgcggctgccaagcttttgaattgacggaccttctttccccggattaccgtcttcgcaatggttgcgggggaggtcgaaccatgtctcagaacaccgtcacgcgggcccagttgagcgaggccgtctaccaggaagtcggtctgtcgcgcaacgaatcggccgatctggtcgaaaccgtcctggacgagatttccgacgcgctcgcccggggggagatggtgaagatttcctcattcggcagcttccaggttcgccagaagggcgagcgggtcggccggaaccccaagaccggggaggaagtgcccatcctgccgcggcgggtgctggtcttccgtgccagtcatgtgctgaagaaccgcatcaacgatgtccaggagggtggggcgccgacgcccgcgcgggctctctcctgaggccggccgtcagttatgacgccgcttccagggagatgggctcccagcccaatgccgttccgtgcccgtctgcggatcgtcgcatccggtcgctgccgggtggcggcctgatcctgccatgaaatccgccaccgcctatcgcaccatcagcgaggtctcgaccgacctgaacgtgccccagcatgtgctgcgtttctgggaaaccaaattcccccagattcgcccgctgaagcgcggcggaggccggcgctattaccggccggaggatgtcgagcttctgcgccggatccaggcgctgctgtatgaggaccgctacaccatcaagggcgtgcagcgcctgctgaaggaagggcgcatgtccgatccgacgccgcccttgcccgaggatgccgatgagcccggcgattccggtgccggagcgggagagcaaggcgcattcgacgacggcgtcgaggacggcccggatgacggaccgcattacggtacgcagccccctttgtccgccgccctgcggcacgagatcaccatggtggtggacgaactgaaatcgctgcgttcggtgctgtcgcgcctctccgaaatcggggacaaaaaaagctgaaaaatcatcacgggagatgttgcatcggcaaaagtccgcggctatagtcccgttcccttccggagccaagccgcaagcactgcggtgaagttgacggagcgtagcgcagcctggtagcgcatcagactgggggtctgggggtcgcaggttcgaatcctgtcgctccgaccagttccggaaggatcggaaaagccttggaacccaaaggttccagggctttttctttgcccgcatcattgggtgacgatgcggcatctatcggcgccgtgtgaaacccttgggtggaagtcgaaccaattcccaaagggagcgcagccttgtgcgcgccggcagccgcaacggcccgccgttccgcggccttctggcctatctgtccgccaagctccgaccaaaaagaacgcggcgggccgaagcccgccgcacatcttgtgccgcaaagggaaaacccccgcgacgtgttaacggaaggaccccgatcccccagcggctaagcaaggtgattgtctttccgcggcaaacatctcatgagggattgtctccgtcaatcaggttgtaaaactctttgatatggacataccagcggtgcgtttggacaattccgctcttgaaatgcgagcccatgcttttcggctgcatcaattgcgggaggaagtctgtcgtgtccaagcgtctccgctatcgccttgccctggatctcggcacaaacagcatcgggttctgtctgctcgatctgaacggggatggcaggccctgcggagtgcgccgcatgggcgttcgcatctttcccgatggccgggatccgaaatcgcagcagtcgctggcggcggatcggcgtttggcgcggtctatgcgccggcgccgcgatcgttaccttcgtcggcgcaaggccctgatgaacgccttggtcgccgccgccctgatgccggagacccggcaggcgcgcaaggcgttggaagcgctggatccctatgagctgcgcgccgcggcggtcgccggtccgctgccggcacaccaactcggccgcgccctgttccatctgaatcagcgtcgcggcttcaagagcaaccgcaaggccgccggggatgagaatgaggcgggcaaggtcaagagcggcatctccgccctgaaggccgaattggcggccagcggtgccggcacgctcggccaatggctcgcggcccgtcatgcctcccgccagccggtgcgggcgaggctgaccggcaccggggccaaggcggcctacagcttctatccggaccgcgcgctggtccatgaggaattccaggcgatccgcgccgcccaggcgccgcatcatccctgcgtcaccgccgaacagtgggaccggatcgagagcgtcatcttccaccagcgtccgctgaagccggtgaagccgggcaaatgcaccctttatcctgcggaggagcgggcgccatgggcgctgccgatcgcacagcgcttccgcatcctgcatgaactgcacaatctccgcatcgtccggccggggcagggggaggaggggctgtcgccggttgacttcgaccgcttctatgaccggctgtgccgcaagggcgacctgaccttcaagacgctggccaaggagctgaagcttccccccgacgcccgcatcaacctggaggatgacaagcgtgaccggctgaagggcgacgccaccgccgacgcgctgtcggccgaaaagggcaagcgccggcggatcggcgccgcctggcatggcttcccggccgaccggcagcgcgggatcgtcggccgcctgatcgatgccgaggatgagggggaactggccggctggctggtggaggaactggggctgccgtgggaggtggcgatcctgacggccgagcggccgggcctgccggacggctattgccggctcagtgaaaaggcgctggagcaggtggtgccgctgatgcacgaggagcatctgccctatgacgaggcggtccgcgcgctcggcctgcatcattccgaccatcgcccggacgatctgctcgacgagctgccttattacggcgtcccgctggagcgcttcatcgccttcggcaccggcgaggcggatgacccgccggaactgcggatcggccgctttcccaaccctaccgtccatgtcgcgttgaacgagttgcggcgggtggtgaaccggatcatccggcgctggggcaagccggaggagatcgtggtggagctggcccgcgatctcaagcagagccgcgccgaccgtgacaaggaacagcgcgagcaggcgctgaaccagaagaagaaccggacgcgggtcgagcagcttcgcgaattgggcattgagccgaccggcgaggcgctgctgcggctgcggctgtgggaggaactgccgcgaatcggcagcgcccatgtctgcgtctataccggccagccgatcagcatgacgcagctgctgcaaggcgatgtggacgtcgatcacatcctgcccttcagccggacgctggccaacggcgccgacaacaagatcgtctgccaccgccgcgccaaccgcatcaagcgcaaccggacgccgtgggaggcgttcggcgtcgtccccgccgacggctatgattggtccgccatcgccgaacgcgccgagtcgcttccccagaacaagcgctggcgcttcctgcccaatgcgatggagcgattcgagaaggaccggggattcatcgaccggcaacttgtcgaaacccggcacctgtccagggttgcccgcgagtatctcggctgcatcgtgccgctggagaaggtgagggccgcccccggccggctgacggcgatgctgcgcggccgatgggggctgaacgccatcctgtccgacgccaatctgaaaaaccggtcggatcatcgccaccatgccgtcgatgccgccgtgctgggggtgatcgaccagcggctggtgcagagggtggccgacgccgccaagcgggcggaagagagggaactggaaaagctgttcgacggtctgcccgacccgttcgacggcttgcccggcccgtccttccgggaacaggtccaggacagggtgcaggggatcatcgtgtcccacaagcccgaacatggctggcaagggcggatgcacaacgacaccgcctatggcccggtcgagcggctgcccgacggaacccatcgggtggtgacgcgcaagccgctggggtcgctcgtcgaaaaggacttcgggaacatccgcgaccgtgccctcgccgcggcgctggaacgccatgtcgccgaacaggcggcgcaggggcgcggcctgggcgaggcgctgtcctgcttcacctggacgggcggagaggtgcgccgcgtccgcatgctggacaagctgggcagccccgtcgcggtccgggacgagggtgggcggaccttcaagttctacaagggcgacagcaacgcctggtacgagatcctgcgcgacgggcgcgggcgttggacgggacgggtcgtcagcacctatgaggcctaccggcttcacgccgaatggctggccgagaggaccgaccgtgggcgggacgatgccgctttcccggactgggcggcgggccggctgtgcgccggcatcggcacgccgctgttccgcctgttcaagggcgacatgctggccttcggaaccgcgccgaatcgggaaatcctgcgggtggtcaagttcacggacgggcaaatcaccttcgccggccatcgggaggctggaaacctcaaggcgcgggatgccgacaaggaggatccgttcaagtaccgctactgttcgcccgaggccttgcgcaaggcgcaggcgcggccggtgggggtggaccccgccggcttcgtccatgaccgcgggccgttggagtaggtcatggcgagcgccgccggaatcgtggtggaggtggccgaggacggacggcatctgtcgctcgaccgtggtttcatggtggtgtcggaaaaggggcgcgagcttggccgcgtccctctcgacgacatggcggtgctgatcgccaccgcccatgggttgacctattccaacaatctgctgctggccctgctggaacgggattgttcggtcatcctgtgcgggcggaatttcaccccggcagccatcctttggccgctggacggccatcacatccaggcccagcgcatgcgggcgcaggcggacatcaccgatgccttcaagcgccggctgtggcaggccatcgcccgtgcgaaggtccgcaatcagggggcgatcctccaggcgctcggccattccgccggcgcgttcgaggaactggcccgaaagatgcggaccggcgacccggagaacatcgaggcgcaggcggcgcggcgctactggcccctgctgttcgggccggattttcggcgcgatgccgaggaaccgggtatcaatgggctgttgaactatggctatgccgtgctgcgcggcggtacagcgcgggcgactgctgccgccggactgcatccgagccttgggctgaagcattccaaccgctccaaccccatgtgtctggtcgacgatctgctggagccgttccggcccatggtggatatcgccgtccaccgtatggtctcggatgggcttctggaggtcgatcgcgagacgaagcggatcctggccgggctgctggtgcaggacttgcggacggatgccggggtgacgccgctttccacctgcctgtttcggctggcgacatcgctcgcacaggttctttccggcgaacgccaggttctcgaccttccgctgtcgccgcttcccctcgaaataattcgtggtccgtcagccaaggagggcgcgcatgtcactcagcgcgtatcggctcatgtggatgatggtgatgtttgacctgccgaccgtcaccaaagccgatcagaaagcggcgactcggttccgtaattttctgttggatgagggcttcgagatgtcgcaattcagcgtctacatgcgcttctgcgccggcgctccgcaggtcgaggcgcgaatcggacggatcaggtccaacctgccgaagcggggaaaggtgcagatcctgaccttcaccgaccgtcagtatcagacgatggtgtgcttcgacacgcgcacgaaacaagaacctgccgcaaaatatgaacagttcaagctgttttgacgggcgttccgtggagggttttcagaaaagaaacccagataacctttttgtttcagtgagttacctgggatcctattgtagccgctgggggatcggggtccagccgcaacactacaatgcgctgggccgcaccgaagggcattgtagccgctgggggatcggggtccagccgcaacggtccaccagttccacacgttgtgttccggattgtagccgctgggggatcggggtccagccgcaacacatccatgcgatggtggtgccgctggacaattgtagccgctgggggatcggggtccagccgcaactggagacagacagatgaccgacaagatttcattgtagccgctgggggatcggggtccagccgcaacgacgacgctcgacacgctgaacgaacttgcattgtagccgctgggggatcggggtccagccgcaactggacgggcatggtgtcgatgcgttcggcattgtagccgctgggggatcggggtccagccgcaacctcacgcatggcaaatcatgaacaaaaccaattgtagccgctgggggatcggggtccagccgcaaccgccggccgagcggcccgcgtcatgggcgaattgtagccgctgggggatcggggtccagccgcaactcatggaagtcattgccgttgtggaccgggattgtagccgctgggggatcggggtccagccgcaactctggcttgatcgacttggaccggcgcttaattgtagccgctgggggatcggggtccagccgcaaccatgatgagaagcaggtacgcgccgtgcagattgtagccgctgggggatcggggtccagccgcaacgtccaccacgtccggtctcgtgatggccccattgtagccgctgggggatcggggtccagccgcaacaccgtggtgctcaaggtgcgggcgtcgggtattgtagccgctgggggatcggggtccatctcaacttcagcttctcgtgtgttgtccaggccagaggagcttcttcgccacatggcgtcgagcgacgccaacggcggaccgcgccacattgtagcggcggggcaggggggctgaaagaagcattggaaacagtgatttttgtgtttgcgtctccgaatgccttgggctatgttgcgcctccaccagcgatggacccgtagctcagctggatagagcgctgccctccgaaggcagaggtcatgagttcgaatctcgtcgggtccgccattgatttgcgttagagcgttgatttagcagttaaatccgctctaacgcgtttctccccacttctgatttctccatatttccgtggctgccggcagacgatagcgcatgtcgttcaatcgtcggttcacgatccacgatttgccgcccgacgtgatgtggcgatcgcagatacctcctcgcgattgtccaatcccaaaccggataattcaccagagctgaagctcgggcggccgcctcttctccgaccccggtgttccgctgctggcggagatgatccgctttcattgcctgctgttcgccgccggtcatgccgatgccgacggctgtgacgccctgcacggcgaccccgccttcaggaaaaccggggcggttcagccgaccagtggaggcggtatggagtgccattgggcagatgcattgcgcgcaattcgatcgcgcataacaaaaatcattgcgcacaatcaaattgcgtgcgatgttcttcccacgagatcagcggcggggttcctcccgccgacggccaaccaagccccgacatccaatgtcccgacatccaatgtaaggagaacgcaccatgaagaccctgtattcgacgaaggtttccgccaccggtggccgcgacggcaaggccgtcagcgaggacggactgctgtcggtcgcgctggccgcgccgaaggaattgggcgggcagggcggggccaccaatcccgagcagctgttcgccgccggctattcggcctgcttcatcggcgccatcaagttcgtcggaaaccgcgacaagatcgccgttccggccgatctgtcggtgaccgccacggtcggcatcggcgcccgcgacgacggcgagggtttcggcctgacggtggatttcgtcgtgtcgctgccgggcatggacaaggccgccgccgaggatctgctggcccgcgcccacaaggtctgcccctacagccatgccaccaagggcaacatcccggtcaccacgacgcttgcctgaggcgcgtgcaaggttctttgatagggtgattgcctgaggcggaccgccttcaggattgcgccgccgggctgttgcgcgcgattgtgccgaacgcatgatcgtccggcgcgccaccgcccggcggcgcgcgccgtttcgaaggttccgcatagccatgactgccgacaggaacgatccgcttctgctctccaaccaggcctgcttcgccctgtattcggcgaatctggcgatgacccgcatctatcgtccgctgctggaggcgctcggcctgacctacccgcaatatctggcgatgctgctgctgtgggaggaggacggacggtcgatgaaggcgctgggcgaaaggctggggctggacagcggcacgctgaccccgctgctgaagcggttggaagggcaggggctggtcagccgcgcccgcgacccgcaggatgaacggctggtccgcatccgcctgacacccgaaggcgccgcgttgcgcgacaaggccgaatgcctgccgacccacatcgccgctgccgccggctgctcggtggaggagttggcatccctgcgcgacgcgctgctgaagctgcgcgacgacctgaaccgcgccgccgatcggggctgaaccgaaccggaccgaaccggaccggaccggcgctgttgaaagggctggaaatcggcggccggacggcctttcctgtcctgccgcccccggaagcaaggtgcctgccgtgacgcccaatttcatcgacgaccgtctccgcatccgcgcggccgatgccgacgacgcgccggacctcgcccggctgatcgacattgccggcggcggggtctacggctttctgctggacgggctggtgccggggctgacggcggcggaaatgctgatgccgggccttgccgggcgcagcggttcgctgtcccatcggcagagcggggtcgccgaactggacgggcgggtcgtcggcatcgcccacggctatcccaccgactggatccggacggaggattacagcggtctgccgcccgaccgcgtcgcccatatggccgcattctccgaaacgctggacgggggcagctatttcctgtcggccctggcggtcgatccggcgcagcggcgccacggcatcgccggacggctgctgggctggttctatgaacgggcgcggaccggcgggttcgaccgcgtcaccctgcatgtctgggccgacaacgacccggcccgccgcctttatgccggcgaagggttcgaggagatcggccacgccgacatcccctggcacccccgcctgccgcaccagggcggcagcatcctgatgcggcgctatctctgatgccatcgagctgaagcttcatgctcgccctcaagcggcgggcgcggccgtccggccgcttgccttcgcaggcacgggcctgcggggccgcggtcgcggcccttaccgccggccgcaagtcaggacttgcgcccggcagtatgagcggcctcccgcaacggcgggctttcggccgacagttcgtcgatgcggcgcaccaccagatcgggggcggcgtaatgcaccatatgcccgcagtccggcacccaatgcagggtgctgttcggcagcacgtgatgcaggcggccgctctgctcctcctgtgaaacgatgcggtcctcatggccggcgaagatcgccaccgggacggtcacgtcggcatagcggtgctgcagccgctccgcgcctggcgccagggtgacgccgtcctcggcgttggcgcgcagctggctcggccgggtggtcagggcgacggggaaggtttcggtcagatggtccggcaccggccgcggcgagaacagggtcttcagcatcgccggcatcaccgccttggagaagggcggagtcacggtgtagcgcagcagatcgcccagcactggcgccgcgaccggcgccaccatcacggcgtccacccgcttggtcgggaagtaatagccggcgatcagcgccagccccttgaccgtgcgcggatggtccagcgccagggccagcgccaccagcgtcgcataggaatggccggcgaccaccgcgttctcgatccccagcacggcgaaggcctcggccagcaggtccgcctgttcctccggcgtccaggcgcggtcgcggggacggtcgctgtggcccatgccggggcggtcgaaggcgatgacccgatggttcttcgccagccggtcgaaaagcccgctcgccagcgaatcgccgagcgcggagacgttgccgtgcagcagcacgaccggcggtccctcgccggcttccgtgtaatgcaggcggaccccgtcgacggtcacgaagcggccttcgggtgggtagcgccgctccgccgcgcgggccgccagcgtgttggcgacggccagcccgcccaaggccagcgcggtgatgcccagggtcttgaggatggtggattggcggtcggtcatggcggttgtcctctcaagcggttgctgcgatgcagcatcgtcgagaggacaaccgggggaggggggaagggttcccgggggtatcgtcagccgacgatcacccgatcacttccccgccttcaactgctcccgcgtcagccagaacacctcgccgaagctgttggcggtctgcagccacaggaagtccagatggggatattccgcctccaggatctcgcggccggtgccgaactcgcagagcaggccgccctccggggtcaggtgcttgggagcttccttcaggatgcggcggacgatgtccagcccgtcatggccgccggccagcgccatttccggctcggcccggaattcgggcggcagggcgtccatcgcctcggcgtcgacatagggcgggttggtgatgatgacgtcgtatttccgcgtcttcagcggcgcgaacaggtcgccctggtgcagggtgatgcggtcctcgaacccgctgtcggcgacgttgcgctttgccacctcaagcgcgtcgggcgacaggtccaccgcgtccacctgggcttccgggaagatgcgggcggcgaggatggcgaggcagccggaaccggtgcacagatccagcacccgctccaccgaggtcggatcctccaccagcgtgaattcgtcgccgccgaacaggtcggagaacagcagctccccgatgtaggagcgcgggacgatcacccgctcgtccacatagaaggggatgccctggatataggccttgttcagcaggtagggcgccggcttgcgggtgtcgatgcgggcatggaggatgccggccaccgcctcgcgctccgccgcggtcaggcgggagtcgagatagggatcgagctggtcgaccggcaggtgcagcgtctccagcaccaggaacaccgcctcgtcgaaggccgtggtggtgccgtggccgtaatcgagatcggcctcgttgaagcggctgacgccgtagcgcaggaaatcgcggatggtcgacagctcggcggcggctgtggcggcggtgtgcttggcggtcacgggcggcaggctccggtcgggaacgggaagggggtcagaggaggtccagaaccgagtccggcggacggccgacgcgggcgcggtcgcccttcaccacgatcgggcgttcgatggcggacgggttggcggacagggcggcgatcagcgcctcgccgtcgaggtccttggcgatgccggcctccgccgccgccttggcgcgggtgatgtcgcgcggacccttgcccagcttggcgaggatggcggtcagctccgccggggagggcggggtcttcagatactcgatcaccgccggctcgacgccgcgggagcgcaggagttccagcgtctcgcgcgatttgctgcagcgcggattgtgatagatcgtcacgtcgctcatggcgggatttccaaaatggaaggtcgatccgactgatacacccaacccgcgtcccgcgccaatccggcatgcggaaagcgatgtggcggcgcaacatccgtcaggtgacaagggctgactttggtattattttgcgcgctcgtttttccgtggcccatcgcgccgtttccggcaggcgggctgccgatcagtcccgatgcccagatacggatgccggccgtgaccaagctctcgctctccaaggacaagatcaacatccttcttcttgaaggtgtccacgacaacgccatcgacgagctggcccgtggcggctacgcctcggtcgagcggctgcctggcgccctggacgaggacgagctgctggagcgaatcggttcggtccatatcctgggcatccggtcgcgcacccatctgaccgccaaggtgttcgaggcggcgagcaagctgatcaccgtcggctgcttctgcatcggcacgaaccaggtcgatctgaaggcggcgcggcgcaccggcatccccgtgttcaacgccccctattccaacacccggtcggtggcggagctggtgatcggcgagatcatcatgctgatgcgcggcatcttcgagaagtcgcagctggttcacggcggcggctggatgaagtcggcgaaggactcctacgagatccgcggcaagaccctgggcatcgtcggttacggccatatcggcacccaggtgtcgatcctggccgaggcgatgggcatgcaggtccggttctacgacgtcgtgcgcaagctggcgctcggcaacgcgcgggcctgcgattcgctggaggagctgctgtcggtgtccgacgtggtgaccctgcatgtgccggacaccgcgcagacccgcaacatgatcggcgcgcgtgaactggcgacgatgaagaagggcagccatctgatcaacgccgcccgcggccaggtggtggacatcgaggcgctggccgccgcgctgaacagccgccacatcctgggcgccgccatcgacgtcttcccggtcgagcccggctcggacaaggaagagttccagagcgcgctccgcggcatcaggaacgccatcctgaccccccatatcggcggctcgacgatggaggcgcaggccaacatcggcaccgaggtggcgcagaagcttctcgaatattcggacaacggctccaccgtcggcgcggtcaacttcccgcaggtggcgctgccggttcaggccggctgcacccgcttcctgcacgtccacgagaaccggccgggcatcctgcgcaaggtgaacgaggtgttctccgcccgcgacctgaacatcgccgcccagtatctccagaccgatccagaactgggctatgtagtggtcgacgtcaacggagacgtggaggagttggaggtcgtcaacgacctgcgcgccatcgaaggcacgttgaaggcgcgcttcctgttcccggcgcatccctgagcgggtaggggtgtcggcggaaggcttccgtcggcacccgccttgcccctccatgtctcttgtccgccggcggtttcctgataactctatcgggatgaccgttcgcttcctgttcctccttccggccgtgctgctcgccgccctgccgaccgcgtcgcccgccgcggcgcagtccaatggctgcagcgggtttccgacgacgaaactcgtgctcgacagcgtgctggcgccgatccagcgtgacgatgcgccgacgatcgcgcagctcacccggctgccgggccgcacgccggggccggccgggagcgccgggggccatgtgctggggctgacccaggcgcgctacggcgaacagtcgcagatctccgccctgttcaagcagatgggcgacggcacctattgcgcggcggccagcacggtgaccatcagcttcggcttccagcagcgcatcgtccatgtcgccagcgagattcccgccaactcctgcctgcatggcgaggtgctggcccacgagatgcgccatgtcgcggtggacgaggctctgttgcgcgagatgatgccgcagatccgcagcagtctggaacaggtggtcgacggcatggcgccggtgcgctcgcgcagccaggcccaggcgatggcggcgatccgccggccgctcgaatcggcgatgcggcggatcatgcgggaattcgggcgcgagcgtgaccgccggcaggcgcaggtcgatacggtcgaggagtatgagcgggtcagccgcatctgcaacggcgaggcccgcaactacctgccgaagtccggccagaagcagaccgtgcgccgggggtgaggcggggggccgatccgcccctcagcgcttgcgccgccgccggtcggcggcgtgtccgccggtgaactccggcggcttgcggcggacccagcggatgaaggcggcgatgtcgggatgaccgcgcagagcctcgatctcgtggtagtggtcgcgaagctgctgctcggtcagcaccgcgtggatcttggcgtggcagatgcggtgcatcgtcaccgtgtcgcgtccgccataggttcgcggaaccagatggtgttcgttcaggctggcgcccggcaccatcggccggccgcagagcgggcaggccggatggtcttcctgtggggcggcggggacggtgatcggcggtggaggcaggctgcgcatgaggtcc

SEQ ID NO: 1620 - DNA, 23189 bp, synthetic construct
  source 1..23189: mol_type = other DNA
  misc_feature 1..23189: note = Synthetic
cggtggcgtgaacgacgccgtcgccagcctgatctgctcgcagctgctgttcctggaatcggaaaacccgagcaaggacatcgcgctctacatcaactcgccgggcggctacgtctcggccggcctcgccatctacgacaccatgcagtacatccgtccgcaggtgtcgacggtgtgcatggggcaggcggcctcgatgggctcgctcctgctcgccgccggcgcgccgggcaagcgcttctcgctgccgaacagccggatcatgatccaccagccgtcgggcggcgcccagggtcaggcctcggacatcgagatccaggcccaggagatcctgaagctgcgctcgcgcctcaacgacatctacgtcaagcacaccggccagtcgctcgacaccatcgaggcggccatggagcgcgacaagttcatgtcgccggaagaggccaaggccttcgggctgatcgacgaggtggtcgaaaagcgccctggctcgatcggcgacggcagcgccgcctgacggggcgcgcgaactaatgattgattgcgccggttccctgttgttgaatgatggggaaccggtccgatggatcgggttcgaaggatgagcggatgcgttaaccttgtctcgggccttccccgggacaacctttgaaaggaccggcgtcgggggacgccgcaggcggttgacaggttatacggatcagtcccccgcgagatgacggagtaccgatgagcaagtccagcagcggcgattcgaagaacacgctctactgctccttttgcggcaagagccagcacgaggtccgcaagctgattgccggtccgacggtgttcatctgcgatgaatgcgtcgagctgtgcatggacatcattcgcgaggagaacaagacgaccctcgtgaagtcccgcgacggcgtgccgaccccgcgcgacatccatgcggtactggacgattacgtgatcggccagcatcacgcgaaacgggtcctttctgttgcggtgcacaaccattacaagcggttggcgcacggcacgaagcacaacgacgtcgaactggcgaagtccaacatcctgctggttggccccacgggctgcggcaagacgctgctcgcccagacgctcgcccggatcatcgacgttcccttcacgatggccgacgccacgaccctgaccgaggcgggctatgtcggtgaggacgtcgagaacatcatcctcaagctgcttcaggccgccgactacaacgtcgagcgggcgcagcgcggcatcgtctacatcgacgaggtcgacaagatcagccgcaagtccgacaacccgtcgatcacgcgcgacgtgtcgggcgagggcgtgcagcaggccctgctgaagatcatggagggcaccgtcgcctccgtgcctccgcagggtggccgcaagcacccgcagcaggagttcctgcaggtcgacaccagcaacatcctgttcatttgcggcggcgccttcgccgggctggacaagatcatcgcgcagcgcggcaagggcacctcgatcggcttcggcgccgacgtccgcggcccggacgagcgctcgaccggtgacatcctgcgcgaggtcgagcccgaggatctgctgaagttcggcctgatcccggagttcatcggccgtctgccggtggtcgcgaccctggccgacctcgacgaggcggctttggtcgagatcctcaccaagccgaagaacgccctggtcaagcagtaccagcgcctgtttgagatggaggacgtccgcctggagttctccgacgacgccctgcgcaacatcgcccacaaggcgatccagcggaagaccggcgcgcgcggcctgcgttcgatcatggagtcgatcctgctcgacccgatgttcgatctgccggggctgtcgggagtggaaagcatcctggtcaacaaggaagtggtcgaagggcgtgccaaaccgctttacgtccacgccgaacgccgcggggagcaacaggcgccgggcgcctgagttcgtcgcggttgatcagcattggctacggggaagggcgcttcgggcgcccttcgtcgttttcggcttttgcaaacttcaagcgtcccggcaggctgtggggcggctcggaccggcataccgcaccgccatacggaattggggttctggcccttgaaggggggctatggctgtgccacgttagaaaaagtgccggttttcgatccctgtgctcataccccgaggcggggttcttcccaggcccatcccgggctgacggcgtcccaatgaaagaggcccaatcaatgttcgaaatccctcgtggtgccctctatccggtcctgccgctccgcgatattgtggttttcccccacatgatcgtgcctcttttcgtcggccgcgagaaatccgtgcgcgccctggaagacgtgatgaaggacgacaagcagatccttctcgtcacccagaagaacgccgcgcaggacgacccgacgccggccgatatctacagcgtcggcaccgttgggaccgtgttgcagctgctgaagctgcccgacggaacggtgaaggtgctcgtggagggcggccagcgcgcgtccatcaccaagttcgccgagaacgaggatttcttccaggcccatgccgacctcgtcgaggagaaggtcggggaaagccaggagcttgaggcgcttggacgcgcggtcgtctcgcagttcgagcagtacatcaagctgaacaagaagatcccgccggaggtcctcgtctcgatcaaccagatcgaggaaccgggcaagctggcggacacggtggcttcccacctcgcgctgaagatcccggaaaagcagcagcttctggaatgcgccacggtgtcggagcggctggagcgggtctatgccttcatggaaggcgagatcggcgttctccaggtggaaaagcgcatccgcaaccgcgtcaagcggcagatggagaagacccagcgcgagtactacctcaacgaacagctcaaggcgatccagaaggaactcggcgagaccgaggacggccgcgacgaatcggccgagctggaagagaagatcaacaagacccgcttctccaaggaagcccgcgacaaggccctggccgagctgaagaagctgcgctcgatgagcccgatgtcggccgaggcgacggtcgtgcgcaattacctggactggatgctgtccattccgtggaagaagcgcaccaaggtgaagaaagatctgaagctcgcccagaagatcctcgacgccgaccattacggcctggagaaggtcaaggagcgcatcctcgagtatctcgcggtccagaaccgcatgaacaaggtgaaggggccgatcctctgcctcgtcgggccgcccggcgtcggcaagacctcgctcggcaagtcgatcgccaagtccaccggccgcaacttcgtgcgcatgtcgctgggcggcgtgcgggacgaggccgaggtccgtggtcaccggcgcacctacatcggctcgatgcccggcaaggtcatccagggcatgaagaaggcgaagtcgtccaacccgctgttcctgctggacgagatcgacaagctcggcgccgattggcgcggcgatccgtcgtcggccctgctggaggtcctcgatccggagcagaacggcaccttcaacgaccattacctcgaggtcgactacgacctgtcggacgtcatgttcgtctgcacggccaacacgatgcgcatgccgcagccgctgctggaccgtatggagatcatccgcgtcgccggctacaccgaggatgagaaggtcgagatctccaagcgccacctgatcgagaagcaggtggaggccaacggtctgaagaagggcgagttcgccatctccgacgacgcgctgcgcgacctgatccgctattacacgcgggaggccggcgtccgcagtctggagcgcgagatcgccaatctctgccgcaaggccgtgaaggagatcctgatgaagggctccgccggcgccaaggtctccgtcacccggcggaacctggacaaatacgccggtgtccgccgcttccacttcggcgaggcggagctggaggatctggttggcgtcaccaccggcctggcctggacggaagtcggcggcgaactgctgtccatcgaggcggtcagccttcccggcaaggggcgggtgacgaccaccggcaagctgggcgacgtcatgaaggagtcggtccaggcggcggaaagctacgtcaagtcgcgggccaccgccttcggcatcaagccgacgctcttcgagaagcgggacatccacgtccacgttcccgaaggcgccaccccgaaggacggcccgtcggctggcgtggcgatgatcacctcgatcgtgtcggtgctgaccggcatcgcggtccgcaaggacgtggcgatgaccggcgagatcaccctgcgcggccgggtgctgcccatcggcggcctgaaggagaagctgctggccgctctgcgcggtgggctgaagcatgtgctgatcccgaaggacaacgagaaggatctcgccgacattccggacaacgtgaagcgcggcctggagatcatcccggtcagcacggtcgacgatgtcttgaagcacgccctggttcgggagcttgagcccatcgaatggaaggagcccgaggcggtcgagccggcagtcgccaagccgcagcccgacggcggcggcgaggtgctgcggcactgatcgagcccggcgtttaaagcactcttaacgctccaccacgcttcgcatcgcccgcccgtctgcaattgacgggcgggcgatgtcgcgtttatcgtttcaatgcgcgaagtcactgggcggcttttcttccattttcttcgccggattgagaagggggagtaagtgaataagaatgatctggtggcgcatgtcgccgatgctgtgggtttgtccaaaactgaagcgaccaaggcggttgatgccgtttttgacggcattgccgactcgctgaaaaacggggaggaggttcgtctgatcggtttcggcacgttcgctgtgtccgaacgcgccgccagcgagggccgcaatccgcgcaccggcgagaaaatcgccattcccgcgtcgaagcaaccgaagttcaagccgggcaagacgctgaaggacggcctgaagtgatgacggcttgaacggttggggcaatccgggcatagtgcgcgccggtcggcacgagctggccggctttgcgttgtccggatgaaatgtttggacaacgatgcggcgcgggcgattagctcagcggtagagcatctcgtttacaccgagagggtcgggggttcgaaaccctcatcgcccaccagcctaatcaaatgcttagcgatcaagaacgaccccgagaggggtcgtttcgcgtttctaggtaacaagtaggtaacagcctcggcgctccggtgctggcgacacccaggatggctggtatggacgtggtggaccggcaggctgctctggatgggttgtggctggccggacgggcagcacttcgcttgcgagggtactgagggcggccttcaaggacgctcggttcggtggcaaagctcacgtcgtcaagagcgtccgccgtgactctatagggatagggaaccagcggtgtgttttgatgcttgttaggacgctgggatttttcagcgcagctgcagtcagttataagtgaacaaacgtcaatcggaacaattttgaatacagctttccacgttgtgacggctcctcattcatcttcttttcacatcaacacgcgcggtgtaaggtgttggtgcagattttccacgataaagacgagagatggcagtgcttttcacggaaaagttttttgatttcgttctcggcaccttgccaaaagccactctcgcattgattccggaacatcggaagaagcaggcgctagagcggcttcaagacctcaaccccttcgcagtcatcgccgacaaccacgacttggttcgggtcctgcgcgtcgcctggatcgaagccgctgagcacatcctgaatgccggccgtaaggcggccaagtcgccggagtggactgaagtccagcgtgccgacatcgaccgcttccacagattggcaatcaaccagttgcgcgccatccgcgatgccacctttgatcgccgatcggcacccggcacgagcgcgattgacgctcatcttccactagtggtgcggggagcggcggaggtggtttccgccgctatgggagagcatgacgatggagcgcgagcggtcacggctggctttgtcggcacccttggcgacttggttgccgggggcaatcccgcagaagtgccgcctatcttcgtccgcatcgccgccgaaggcttggcgcaaacgggtggtggtgaccgacgctccttcggcgatttggtcttcgcctccttcgccgagacgctcaaggatccgaaaaagtatccacaggcgaccacggcgttccatacggcaacgcagtccctgaccggaacgctcgtcgaacagaccctggcggcgctggaaagcgtcgacagcgggctttcggcaatgctctcccagctggacgcactgaaccggctaagcggagctgccgccatggcggtgtatcgcatcgaggagcgcgccggacagacggaaaccaaggtcgatgagatcctgaccatcatgcattccagaggcgccctgcagcctgcgaaacaatgcgcttcggaagcgtcagtccgggtgatcgtcgaggggctcggtggagagggccgcaaccgtgctgcgatcaccaacgtgccgatccgcgagccagcccatttcttgggccgcgacgacgccctggctgccctccaagcggcattcggacgcaatgcgggacgggtggccattacggcgctgcacggtctgcgcggcgtgggcaagacgacgcttgcggcggcctatgccgagcggcaccggaccgaccaccgcgccatatggtggattcgggccgggacggagccgggcttgcgcgctgatctagtcgcgctggggctgcgactcgcctgggtcgattccgagctggaggaggaacgggctgtggctatggtcttggaccgggtgcgggacgagggcgacggcctactgctgatctacgacaacgcccttaacgaccggcagttgtccccgtatctgccacgcggcggagccgcgcgggttctcatcacctccaatgctccggattggcggagggtggccgagccggtcgagattaccgtctggcctgttaccgttggcgcggattatctgatcgctcgcaccggccgaacaggggagcgaacggcggccgaggcattgtcggacgcgctgggcggcctgccgttggcccatgagcaggccgccgcctattgtgagcggctggagatcgccttggcggaatatcaccagcgcttcgccgcccggtcggtggccatgcttggtgatcctcgcgatgccccggcggagtaccacgaaggccggacagtggcggcgaccttcgctctggctatcgaggccgccgccatcctgaatccagcggccgagtcgctgatcggacatctcgctctgctggcaccggagccgatcccgttgttcctgctgcgggaagggttttcgagccttggatcgcccttggatgcgctgctcgacggcgatgggctcgacgaagcaatagcggcgcttcggtccctggcattggtgagacgcgagacaatcgcggacgagcgcacaccggccgtgacgacggaaacggtcctggtgcatcggcttgtaagggaagtcgcagcggcgcgaacaacggccgatgcccacgataagatgcgtggcgggctgatccgggctctacacacggtatacccgactaacttgtacagcgacccggaaacgtggcagcgggcgcggcgactggacggattggtcatgcctctgcttgacgccgaggcagggcttcctgagcacgtggagttggcagtgagcgacctcttgggacgtgttgcgtcccactggcaagtagcgcttggcgcctacgtggcgtcttgctcgctcttcacccgctccctgaagatcagagagaatgtgctcggccccgaccatctcctaaccgccctcggcctcaacaatctcgccgggctgtatcgtgacctgggccggctggacgaggcggttccgctcttagcccgcgtcctgaagatccgcgagaaagcgctcggccccgaccatcccgacaccgccaacggcctcaacaatcttgctacgctgtaccgtgacctggagcagttggacgaggccgttccgctcatggcccgcgccctgaagatccgcgagaaatttttcggctccgaccataacgagattgccctcggtctcaacaatcttgccgggctgtaccgtgaccagcgcaagttggacgaggcagctgcgctcttcgtccgcgccctgaagatccgagagaaagcgctcggccccgaccatcccgacaccgccaccagcctcaacaatctaggcacgctgtactatgaacagggccaactggacgatgcggcgccgctcctggcccgcgctctgacgatccgtgagaaggtgctcggccccgaccatcctaacactgctaccagccttatgagtctcgccggggtataccgagccaagggccagcgggatgaggcggtaccgcttctcgcccgcgctgtggtgatccgggatgcgaagctaggccctgaccattccagcactgccgccagcctcgatagtctaggctcgctgtacctagaacacggccggctggatgaggcggcaccgcttctcgcccgcgctgtagtgatccgcgagaaagcgctcggccccgaccatcccgacaccgccaccagcctcaacaatctaggcacgctgtactatgaacagggccaactggacgatgcggcgccgctcctggcccgcgctctgacgatccgtgagatggtgctcggccccgaccattccgacactgccaccagcctctacagtctcggcatactgtaccgatcccagcgccagcggggcgtggcagccccgctcctcgtccgcgccctggcgatctgggatgcgaaagaccctaaccatcccagcaccgccgtcgtacttgacggtctcggcacgctgtacctggaacagggccggttggatgaggcggcaccgcttctcacccgcgctgtagtgatccgagagacgaagctaggacccgaccatctagatactgccaccagcctcaacaatctaggaatgcttcacgctcgtcaggaccatttggacgaggcggctcaactcatcacccgcgccctggcaatctggattgcgaagttaggccctgaccattccaacaccgccgccggcctcaacaatctcgctgggttgttccggcagcaggggcgactggacgaggcggtgccgctcctggctcgcgccttggcgattcgggaaacgacgctcggtcccgatcatcctgatacggcgataagcctccacaatctcggcatgctgtatgaggagcaagggcgggtggacgaggcggcgccgctcctggcccgcgctaaagcgatctgggagaaatcagttgtgcctctcgccgattggcactgagcgacaacgtgccggctaagtacgatgaccatttgctggcctacctataggccgagcgattcgccggaccgcccagcgcaatcctcaatgggagcgtcgcgcaggacacgactgaggtggcgctatttctatcacccacgacccaatcttaagaaacgcggcgggccgaagcccgccgcacatcttgtgccgtcggaggtaaaccctccgcgacgtgttaacggaaggaccccgatcccccagcggctaagcaaggtgattgtcattccactctcagaatttcatggaactgactgcacgtcaagcctgtgtcgatcattcgagaatgtacgtttaaaacggaagtatcatggtaatttcttcgccaaggcgaacaacttttccatcttatcgtgccttggaggaaatccagcatgtccgagcgtcttcgctaccgcctctccctggatctcggcaccaacagcatcggcttctgcctgctcgacctgaacggtgacgggcggccctgcgcggtgcggcggatgggcgtgcggatcttccccgacgggcgcgatcctaaatcccaggagtccttggccgcagaccgccggctggcgcgctcgatgcgacggcggcgtgaccgctatctgcggcggcggtcggcgctgatgaccgcgctgatcgccggtggcctgatgccggcggaagaggatgcccgcaaggccctggaacacaccgatccctatacgctacgggcgcacgccgtggcggaacctctgccagcgccggaactcggccgtgccctgttccacttgaaccagcggcgcggcttcaagagcaatcgcaaggccgctggcgacgaagcggaggccggcaaggtcaagaccggcgtctccgccctgaaggctcagcttcaggagagtggagcggaaaccttgggggcgtggctcgcggcgcggcatgcgaagcgccagccggtgcgggcgcggctgtccggcagcggcgccaaggcattctacggcttctatcccgaccgcgccctggtccatgaggagtttcaggcgatccgtgccgcacaagctccgcaccatccggatctgtcgccagcgcagtgggaccgaatcgaggcgatcatcttctaccagcgccctctgcgcccggttcggcccggcaaatgcactctcttcccggcggaggagcgcgcaccctgggcgctgcccatcgcccagcagttccgcatcctgacggaactcgccaacctgcgcttcaaccggccgggcgaaatcccctggggcctgacgcgcgaccagagcgccagcctgttcgaacggctttgccgcaagggcgatctgacattcaaggcgctggccaaggatctgaagctgccgtccgacgtggcgatcaacctggaggacggcaagcgcgaccgcctgaagggcgacgccgtcgccgatgccctatcggccgagaagggtaagaggcggcgcatcggcgctgcgtggcacgatctgccgccggaccgccagcgcgacatcgtcggccgcctgctcgacaccgaggacgagggggaactggccgcttggctggtgtccgaactcggcctgagctgggaagtcgccacccttacggcggaacggccgggcctgcccgagggctattgccgcctcagcgagaaggcactggaggaggtcgtcccgctgatgcgcgaccgccatctgaactacagcgaggccgtcgaggcgctgggcctccaccattccgacttccggccggacaggctgctcgacgccttgccgtattacggcgagccgctggagcgcttcatcgccttcggcaccggcgaactggatgatcccccggagttgcgactcgggcgctttcccaacccgaccgtccacatcggcctgaacgagctgcgcaagctggtcaacaagatcatcgagcgctggggcaagccggaggagatcgtcgtcgaactggcccgcgacctgaagcagagccgcgacgaacgcgaccggacccagcgcgatcaggcgcagaaccagcgcaagaacgaggagcgagtccggcaactgcaggaacttggcgtcgaggtgaaggccgaatcgcttctgcgcatgcggctgtgggaggagttgccccagcatggcttggcccgcgtgtgcgtctacacgggggaggtcatcagcttgacgcgcctgctgcgaggcgacgtggacattgatcacatcctccccttcagcaagacgctcagcgacggcgccgacaacaagatcgtctgcgcgcgcgccgccaaccggttcaagcgcaaccgttcgccctgggaggcgttcggcgccgttccggtggacggctacgactgggacgccatcgcggagcgggcggcgctgctgccccggaataagcgctggcgcttcctgcccgacgcgatggagcgcttcgacggcgagaaaggtttcctggcccgccagctcgtcgaaacccggcatttgtcacgcatcgcccggcagtatctcggcagcatcgtgccactggaaaaggtccgggtggcgcccggccggctgacggcgatgctgcgggcgcgctgggggctgaacaagatcctgtcggactcgaacctcaagaaccggggcgaccaccggcatcacgccatcgacgccgcggtgctgggcgtcatcgaccagcggctggtccaattggtggccaaggcagcggagcgggcggaggtcaacgaactggagcgcctgttcgatggcctccccgatccgttcgacgggttgggcggcgcgtcgttcggcgatcaggtgcgcgacaaggtgcgcggcatcgtcgtctcccataaggcggagcatggctggcaggcccgcatgcacaacgacaccgcctacggtccggtcggcgtccagccggacggcacccatctggtggtaacgcgcaaaccgctggccggcctgaccgccaaggatcttccaaacatccgcgaccgcaagctggcggcggcgctggaggcccatgtcgcggagcaggccgcgcagggccgcagcttcgccgaggcgatgagccggtttgaatggacgaatgggaccgtgcgccgcgtgcggatgctcgacaagctgggcagtcccgtcccggtccgcgaccccgccggaacgatgttcaagctctacaagggcgacagcaacgcctggtacgagatcctgcgcgacgggcgcgggcgctggaccggccggatcgtcagcacccacgaggcgtaccagcttcaccgggcgtgggtggcggaaaccggtgcggcgcgggccgaggatggccgtcccttcctggactgggcggcccggcgggtggcgggcgatgcaggcacgccgctgttcaggctgttcaagggcgatctgctggcgctgggcatcgcccctgaccgccagatcatgcgggtcgtcaagttttcggaagggcggatcgtgctggcgccccatcacgaagctggaaacctgaaggagcgcgatgccgatccgggcgatcccttcaagtaccggaccttttccccggatgcgctgcgcaagggacaggcgcgccctgccggtgtcgatctgctcggctatgtccacgacaagggcccgatggagtgaacgatggcaagcgcggcggggatcgtcatcgaagtggcggaggacgggcggcacctgtcgctcgaccgggggttcatggtcgtctcgactcgcggcgacgaaatcggccgggtgcccctggatgacatcgccgttctgatcggcaccgcgcatgggctgacctattccaacaacctactgctggccttgctggagcgggaatgcgctgtcgtcctgtgcgggcgcaatttcagcccggcggcgatcctgtggccggtcgacgggcatcatgcccaggcccagcggatgcgtgcgcaggcggagatcaccgacgccttcaggagccggctctggcaggccatcgcacgggccaaggtgcgcaaccagggcgcggtgctggaggcgctgggccaaccggccggagctttcgtcgagcttgcgcgccgcctgcgatcaggtgatcccgagaacatcgaggcgcaggcggcgcgccgctactggccgttgctgttcggcccggatttccggcgcgacagcgacgagccgggcatcaacgggctgctgaactacggctacgccgtcctgcggggtggtatggcgcgggcggtggccgccgccggcctccatccgacgcttgggctgaagcactccaaccgctctaatcccatgtgccttgtcgatgatctgctggagccgttccggccgctagtcgacatcctggtccatcgcctcgccgccgatgggcgtctggaggtggatcggaacaccaagcgcgtgttggccggcattctggtgcaggatctgaggacggaagccggcgtcacccccttggggacctgcctgttccggttggcatcctcgctggcgcaattgctgttgggcgagcgtcaggtgctggacctgccgctgtcgccgctgccgctagatcttgtctccccgcacactcgcaaggagggcgcgcatggcactcagcgcgtatcgcctgatgtggatgatggtgatgtttgatttgcccacagtgacgaaatccgaccagaaagcggcagccaaatttcgaaacttcctgctcgatgaaggtttcgagatgtcgcaattcagcgtctatctgcgcttttgcgccggcgccccgcaggtcgaggcgcgaatcgggcgcatccgaacgaatgttcccaaaaggggaaaagtgcaaatcctgacctttaccgaccggcaatatcagacgatggtgtgcctggaagcgcggacaaagcatgaacctgctgcggtttatgaacagtttaagttattttagtgaatggagttgcggagttgagcgcacgaaaacccccggataacgcatgtatttcaacgcgttatccgggaacgtattgtagccgctgggggatcggggtccagccgcaactcggcttggatgctggcggtcaacgcatcaattgtagccgctgggggatcggggtccagccgcaacgaacctgtctgtgcaccgcggacggcggcgattgtagccgctgggggatcggggtccagccgcaacctggcgccatgcgaggctgaagcggtcatcattgtagccgctgggggatcggggtccagccgcaacagactgagaacgcggcctagaccagaagcaattgtagccgctgggggatcggggtccagccgcaactcgcggcgcccctccatcccgcgtaaatcaattgtagccgctgggggatcggggtccagccgcaaccgtcacgacgtattcgccgtcgtgcatcaattgtagccgctgggggatcggggtccagccgcaaccgcccccttcgacgggaagccgatcgacatattgtagccgctgggggatcggggtccagccgcaaccccttgaccttgcggccgttgagatcgacgattgtagccgctgggggatcggggtccagccgcaacccggcaggcgcacgaaccgcaggctgcggcattgtagccgctgggggatcggggtccagccgcaactgtggacaacagcgagctgcgtcagggacaattgtagccgctgggggatcggggtccagccgcaactgctcgccggcacggtgcgcgtggtgcggcattgtagccgctgggggatcggggtccagccgcaactgaccggcatctggcgcatctacctagccgattgtagccgctgggggatcggggtccagccgcaactcgtcctgggttgcgccatgccgggtcgccattgtagccgctgggggatcggggtccagccgcaacatttcgagatcaacgacgccgtgatggcggattgtagccgctgggggatcggggtccagccgcaacggcgcctgcccgcagtgtggtggcccgatgattgtagccgctgggggatcggggtccagccgcaaccagtggagcgctacgccgccgagcgcgccgattgtagccgctgggggatcggggtccagccgcaactgagcgagcctcgtgggtgagccatgtgcaattgtagccgctgggggatcggggtccagccgcaacacctggagcgcatgaatttccagccggccgattgtagccgctgggggatcggggtccagccgcaacgtcagcgccaccaattcaacgcgggtcacgattgtagccgctgggggatcggggtccagccgcaactggagccgggttccttcaaggtcgaggtgcattgtagccgctgggggatcggggtccagccgcaactcgctctgtatcgcgggcgcgtcccggaatattgtagccgctgggggatcggggtccagccgcaactggtgtccatgtagatcgtcagcggctcctattgtagccgctgggggaacggggtccagccgcaacttgcggacgagcatcccggacgccttggcgattgtagccgctgggggatcggggtccagccgcaacaggtcgtggacagaagccgcaatggacatgattgtagccgctgggggatcggggtccagccgcaacatgaggcaaagcgttcccgtggcgcgagtcattgtagccgctgggggatcggggtccagccgcaacaggtgtggaccgagaactattggaacatcaattgtagccgctgggggatcggggtccagacgcaactgctcgccatgaagctggtggagcacatgcattgtagccgctgggggatcggggtccagccgcaacaataatcggcgccggtccagcggtcggagcattgtagccgctgggggatcggggtccagccgcaactcgaatacgctcttggagggcgtgtctaatattgtagccgctgggggatcggggtccagccgcaacttgtgcgcctggggggcgcaggacgggttattgtagccgctgggggatcggggtccagccgcaacttctcggtttgatgaccggggtggctgcggattgtagccgctgggggatcggggtccagccgcaacggcaccgcatagctgcccgacgtggtgacgattgtagccgctgggggatcggggtccagccgcaacctccgtctccaggaggccggcagagcgggcattgtagccgctgggggatcggggtccagccgcaacctgtcggtcgccgctccgctgttggcctcgattgtagccgctgggggtgtcagtgacgggtgaatgctcctcgaaggcggcgcctgaaaattccccaggttgacgccacagcctgctgacggggctcctgccccgaagcgggcggccatcgatccccattctcccctccggggaacggagggagggcgtcggtggtcacactcggggagcttgtcatgattctcgatctgcatcggcagggcttatcggtgtccgccatcgcccgccggaccggccttgatcgcaaaactgtccgcaagtacatcgagcgtggcttggaggcgccggtttatggcccccgcaagcccaggccgaccgtcgtcgcgccctacgaggaatacctgcgcgagcgcgtcaccgcttttccggaactcaccgccagccgtctgctccgcgaagtccgcgcccgcggctacacgggcggctacaccgcgctgaaggatttcctgcgcaccgtccggcccgcgatcgccgctcccttcgagcgtcgcttcgagacgccggccgggcgccaggcccaggtggacttcgcctatttccgcaccgcgttcaccgacgagccgggcgtggagcgcgtggtctggttgttctccctcgtgcttggccacagccgtctgatgtggggcgagttcgtggtccatcaggacctgcagaccgtcctgcgctgccacatcgccgccttcgaggcgctcggcggcgtgccggccgaaatcctctacgaccgcatgaagacggtagtgcgtggcgaggattgcgagcagggcatcgcctacaacaagacgctcctcgacctggccgcccattacgggttcctgcccaaagcctgccggccctaccgcgccaagaccaagggcaaggtcgagcgccccttccgctatgtgcgcgaggacttctttctgggccgcggctttcgcgatctcgatgacctgaatgcccagttccgctcctggctcgacgaggtcgccaacgcccgccgccacgccaccaccggccgcatcgtcgccgagcatttcgccgaggagcgtccccacctcaagccgctgccggccggtccctatcgcgccgtcctcaagcttgatcgccgggtcacgcgcgagggcatggtgtcggtcggcggcaacctgtactccgtgcccgagtgcacgcgccggcgcgtcgttgaggtgcagaccctggccaacgaggtgcggatcttcgaggacggccggctgatcgccagccacccggtgctggaaggccgagggcaacggcggattgccgcgggccaccgcaccctgccgccaccggccaacagcgacacgccgcgcgagccgccggtgccgatcggcccggttggggataccgtcgcgcgccggccgctggcctattacgaggcggtggctcggcgcttggccctgcagggatcgcggccatgaccggcaccggagcgacgcccgccaccctcgaccgggttcgccggcatctcgtcggcctgaagatgccgcgggctctggaggtgctcgaccacatcgtgcgccagctcgaacgtggtgagctgtccgccctggacgccatcgacgccttgctggccgaggaactgaccatccgcgagggccgccggatcaaggccgccctgcagatggcccggctgaccagcatcaagacgctggacagcttcgacttctccttccagccctcgctggaccgtaaccgcattctcgcgctcgcccagctggacttcatcaaccggcacgaggtgctgcatttgctcggtccgccgggcaccggcaagagccacctcgcccttgccttgggtgtggaggcggtgaaggccgggcgcagcgtctacttcaccaccttggccgacctggtggcctcgctggccaaggccgaacgtgagggctcgttgcgcgagcgcatccggtttctgtgccggcctcagctgttgatcatcgacgagatcggctacctgcccgtgatcgccgggggcggcaacctggtctttcaactcgtgaatgcccggtatgagcgcggcgccatggtgctgacctccaaccgcggcttttccgaatggggcgacgtctttggcgatccggtggtcgcgaccgcgctgctggaccgcctgctgcaccatgccatcgtggttcagatcgaaggggccagctatcggctccgccagcacgccgatctcatgccggacaccacccgcgtccgcccgatcaccgcaccacagccgccgcgccggcggggccggccacccaagctcaggagcatggatcaggacgccggctgatcaccgcacctggggaattttacttcgcccgagttgaggacggtcactccgccattgacagggggatcggggtccagccgcaacctcgcgcctgggatgcggagagggcggcctattgtagccgctgggggatcggggtccagccgcaacggcagcaggacagggccggtgggggaggggattgtagccgctgggggatcggggtccagccgcaacttgtgtctcggctatcgccccggtcccgacattgtagccgctgggggatcggggtccagccgcaactcgatgcacggtcgtgatggtgcccaccctattgtagccgctgggggattggggtccagccgcaacggcacccgacgcggtggaggtggagtgctaattgtagccgctgggggatcggggtccagccgcaacacgtcaccgcccaggccatgcgcttggtgaattgtagccgctgggggatcggggtccagccgcaacgcacgatggtgtggcgcgacacggtccgtgattgtagccgctgggggatcggggtccagccgcaacggtcgaagtggtagagcaggcgtccgaggaattgtagccgctgggggatcggggtccagccgcaacttgtcgaggccgtgcgcatcgcattgaacaattgtagccgctgggggatcggggtccagccgcaaccccacccaaagaaacccgcgcgtcttgtccattgtagccgctgggggatcggggtccagccgcaactgcgctcagcgcggcgcgggggtggcacggattgtagccgctgggggatcggggtccagccgcaacttgtcgatcaccacatcctcgctggccccgattgtagccgctgggggatcggggtccagccgcaacgaagcggctcgcatgcccgtggtcgacccgattgtagccgctgggggatcggggtccagccgcaactccacaggaggacgccacccgtccccatgcattgtagccgctgggggatcggggtccagccgcaacctgtcggctcggggatcgccatggttggctattgtagccgctgggggatcggggtccagccgcaacgacgcgcgccgcatggagggctgagcgttgcgccgttggtgcctccactcgcggcgctttcaggcggccgtgccaacatgccgatgaacagtgcgggctagtgttatcacgacgtgttaataccggttacgttgtgttgccttcggttaacctatttcgtcttgacagaaatagcccctccgatttccatgccgaggaatgcctgtgcatggagattccccatggaagccgaagtcgtgaccaacgacgatctggatcggttcgcgtacgaggtcggcatccgtctggaggcggcccgcatgacactcggtttccggccagcggaaatgtgcgagctgatggggtgtgcgaggaatacctacacgcagtatatccgcggcgactcgcagatcgcgtcctacaggctgaggccgattgtcacgcggggcatccctagcgactacctgctgttcggcatcaaggcggcggtgccggcccatttgcttgagacgctggaagccaacgagatccaagcgcgcatcgaccgcgagacccctacaaacaagggacggcggggctaaggccagccctttcccacttctaccattgtagttgacagcatgcaccgtgccgccgtcctggcggcgcggcgcttgtgcatggctaaggccggcggccccgccgcgttagggcgcccctgttcaggctttttctgccacacagaaaaagcagcttgacgttttctgtgccacagaaatactactgacgtaacgtcaggaaactttcgcgggcacaccaatgagtgacacctctcgtatcctccgcttccccgaggtgcagaagcgcatcggcggctacacgcggatgcacgtcgaccgactcgagaagaacggcaaattcccgaagcggctgcgaatcggcgagcgggccgttggctggctcgaatcggacattgattcctggatcgccgataaggctcaacgccgtgggccgaaaagctcgaacagcggtgctgcgccgcatcagggggcggcgtgagtggccgtccttcccggcccgtgatcccggctgcgccggaggtctccgtcctcccgatcctggaggagggtgggccggacctgctgctgagcgccgcgcagggcgaagcggtgcaaagggtgcaacacgcttcacccttttgcgccagccacaccattcccctgtcacaggccgccgcccatgggcgctggcttgatctggtctgtgggtgagcgccatgaaccgcatcacacgcattctcagcgcgcttttcgaccgcgcgtgcaccctggcctccgccgcgatggcgatgattccatggcggcacattgcgcgaattttccgcgcgctgctcaacctcgtgctcgccctgatctctgccgcgatggcgatggacccatggcggttcattggctgggttgtgatcgcgatggcggtcacattcgcgttctctggcaaggacaaaattgcaaccggcgcgcagtgcctgggcagcccaaaaggcgggatcacgccccggctcaatgctgacggttcgctgcgcgtcgttctcgtcacctcggtcgagtgaggccgggcatgcagacgcagcacgacaacgaaaaggccgacaccaccgtgcgggtgctcgcggccatgtccaacctgatcactgagcgcggttgggtggccccgaccgtcgaagacgaagcgttcggccgcctgcgctggtggggctgcccttcggccccgttcacgcttcatggcgccttcgaggttgccatgcggcaggtgttcaccgacgcgctgccgatctcggccttcggccagcagaacgcgctggagtgcctgtcggtcgccgcgggtgagccggtggccggctgggaagcggttcccaagcgcgagcagtgggaagtgcttcgtctgctggatctggccggcgcggtggcccgcggcgcatccatgccgggtgtgccggtcgccagccacagcatcagccttgcctgggtgaagcagcgcctggacatcgaccacatcaacggcggtgtcacccttggcggtgccagcatcggcacctgcaagttctccaggcagcagattttcaaagacggcatgagccgggccatctcgaactacgaagttgatgtcgtggtcgagggcaagaacatcaacgttgcgacgcaggattatgcctcgctgcgacattggatggctgttcgcatcaccggagttcttagggacgcggccaaggctgcccagaaagcggcgaggtgatgccatggacaccacctccgatccaagaatcatagacgtcatgacccgcctgctggggcgggtgccgtcaccaaccgtcgtgggcgtcatggtggcgttcatggagagcatcgaggcggacggcgcgctcaacgccgacgacctgttccagctctctgtgctggctccttacgcgctgggcacggcgaccgttgaactgtcgtgcccgctccaaagggacgcggtgcccaagctgctcgccgaacgcctcagggctgtccccggtgcagtggcgcagttcggaaccctcgtggaagggggtggcctcgcatgacgacgcggcccgctcccccgctgaccgagcgcgcggcccagaagctcgcgctggattggacctgcgtctcgcgccgccggccctggcaggtcatggaggagctgcgccgcatgctggggcacccgccccggaaggacccgagcaagttcccgtgccggtgggaacacgtctacgtgacgatgtggcccttgctgatggaatcgccgacctatgccgagcgcatacggcgtgccgtcaacgcggccaagcgtcgggaaagcacaagccagccagcccgcgccgcgctgatgaaggtggcggggtaggccatggccgcgctcgcccccgagttcgagctttgccgggccgccgacgtcttcctgttggctgcgccgcgtgaagctgagcgtgcccgtgaccggctggcgctggccctgctggcgctggatgggcgcgcgatgaccaaggatgtccgggtgctgtgggaagccgcttcccggcggctgctcgccgaag

SEQ ID NO: 1621 - DNA, 23189 bp, synthetic construct
  source 1..23189: mol_type = other DNA
  misc_feature 1..23189: note = Synthetic
ccttcttcgtcgccttccggctgcccaaccacttccgcgcgttgttcgccgagggggccttcaactcggccttcgtgcctctcttctcggccaagctggtgcaggacgggcaggaggctgccaagcgtttcgccgaggaggtgatggcgctgctgctgatcgtgcaggtgctgttcctgctggcggtgctggcggtgatgccgcagttcatgacggtcttcgcccccggattcgccggcgaaccggagaagttccggctggccgtgctgttcaccagcatcaccttcccctacctgctgttcatctcgctggtgtcgctctatggcggcgtgctgaacagcatgagccgtttcggcgcggcggcggcagcccccatcgtcatgaatctgtgcctgatcgcggcgctggttctggcgaccccgctgatgccgagcgccgggcacgcgctgtcctggggcgtcttcgcctcgggcgtcgcgcagttcgcctatctggcctgggacgcccgcaaggccgggatggggctgcggctggtgcggccgcgctggtcggccgacgtgaagcgattcctgacggtgctggggccggcggcgctggggtcggggctgacgcagatcagcctgttcgccgacacgctgatcgcgtccgccctgccgaccggggcggtctcctacctctactacgccgaccggctgaaccagctgccgctgggcgtcatcggcatcgccgtcggcaccgtcctgctgccggaaatggccaagcgcatcaagggcggcgacgaggccggcgcggtcgacagccagaaccgcgcggtggagttctcgctggtgctgacgctgcccgccgccgtcgccttcctggtcgccgggctgccgatcgtcgccgtgctgttccagcatggcgccttcgggccgagcgacgcggcggcctcggccgcgaccttgcaggcctacgcgctcggcctgccggccttcgtggtgatccgcagcctcgtcagcggcttctacgcccgccacgacacggcgacgccggtgcgggtggcgctcgccgctgtcgcggtcaacgtcgcgctgaagctggcgctgatgggcccgttggctcaggtcgggctggcggtggcgacctcggtcggtgcctgggtcaacgccgggctgctcgcctggctgctgatccggcgcgggctgttcaaggccgacgcgcggctgctccgcaacctgccgcgcatggccgccgccgccgccgccatggcgggcgtgctgtggctggtgcaggagcggctgtcgccctggctgacggcgcacggcctgttcgagcggctggcggggctggcgctgctggccgtggccgggattctggcctacgcggtcgcggcgctggcgctcggtctggtgcggcgttccgacctgtcccgtctgcgccgccgccgcgccgcgtgaggagtcagccggcgttcttgagcggccgggccgggtcggcgctccattccgacatggagccgtcgtagagccgcacgccggccacgccggcgatctcgctgagcgcgaaccacgacaccgaggcaaggtggccggtgttgcagaaggtgatcggcgcgttccccaattccagtccagcctcgccggccagcgcccgcaccgtgctggccggcacgaagcgcccgtcggttccggaatagaaggcgccgttgtcgatgttgaccgcgccgggcaaggtgccggcggcacgcgcctgcgggctcttcgccttgccggcgaactgctcggccgatcgggcgtcgtgcagcggcgtggtgccggtggcgacggcggcctcgacctggggcagggtggcgcgcaggtcgccgcgcggggcggcggtgaaggtcgccgccggacgggtcgccggctcggcctccaccgggttgccggcggcggtccacgccttgaagccgccgtcgagcaccgacacggcgtcgtggcccagcgtccggaacgtccagtagacccgggtggcgttgcccatgtcggcggcgttcgcgccggccgcgaccagcaccacatggtcggcgttgccgatgcccaaggccccgatcatccgttccagcgccgcctcgtccggcagcatgccggggccggcgccaatggtggcgcgccagccggccgttgcgtagtcggaatggagcgatcccggaacgaagccgccggccggcggcgtgcggacgtcgagcacgacgaggccgggggtgccgagccggctcttcagccagccggaatcgacaagtggcgttgcggtcggtggcgctgcggtttggttggtcatggcgtgacgctgctccccgttcgggagtccctgctgatcggcgcggtcgttgcggcaacggaacgcgcgtggaaggacgggtgggcgccgccccggtgacggccagtgtgggggaagccgattcttgtcgcaaggccgcggttgggacggcgttgccccgccgccgccgccgggtgtagggtgacgggctgtcacacggccgcgccggcgcgcggtggaggaacggttcatggccaacatcgacgacctgctcggcgcccccgaccccaacgacggggatccgggctccttcgccatcggcgacgcgccggtggagatcaaggtcgtgatcggcaccgccatgctccgcgtccgcgacctgctgaagctgggccgcggcgccgtcgtggaactggaccggcagctcaaggatcccaccgacgtctatgtggaaggcgtgctggtggcccgcggcgaggtggcgatcatcgacgacaagatcggcgtgacgctgaccgacttcatcaagtccagccgcgagtggaagcgttgagccgttcctttcgcggagcgccgccggtccttgcgaccctttgtcctctgcgttcgacgtctgcgtcgcgcgacccgtcttgacgggtggcggtggcttctggtctcgtgaccgctggttttcgaaccggcggcccggagagcgaagcgatgcccgaagccctgtcgtcctgcatcccccgcctgatttccaaccccaacgccgaccgcgaacgcgcctatggcccgtcggaacgcgcgatcctgagccgcgccgccttcgatgaggcgatggccgagatcggcgcctggcccggctacgcgccgacgccgctgcgctcgctgcccggattggcgcgcgaggccgggatcgaccggctctggtacaaggacgaaagcggccgcttcgcgctcggcagcttcaaggcgctgggcggggcctacgccgtgctgcggctgatggcgcgcgaggtgacggcgcgggttcccggcgtgccggtgacggcgctcgatctggtggtcgggcgctacgccaaggtgacgcgcgccttgaccgtgaccacggcgaccgatggcaaccatggccggtcggtcgcctggggcgcccaggtgttcggctgcaactgcgtgatctacgttcccgccgcctgttcggccgggcgtcgcgaggccatcgccgcctatggcgcgaaggtcgtggtggtggacggcccctacgacgacgcggtgcggcgcgcggcggccgacgcggcggcgaacggctggttcgtggtgtccgacacctcctacaccggctatatggacatcccgcgcgacgtcatgcagggctacagcgtgatggtggaggaggcgctctcgcagcttcccgccagcgagcggccgacccatgtcttcgtccagggcggggttggcagtctgcccgccgccgtctgcgcccatctgtgggagagcctgggccgccagcgcccgcgcctcgtcgtggtcgagccccacaccgccgattgcctgtatcagagcgcgctggcggggcgcccggcccggtcggtgggcgggctcgacaccgtcatggccggtctggcctgcggcgaggtctcgctgctcgcctgggcgatcctggaacgcggggccgacgatttcctgaccatcccggacgaaggcgccgtccgcaccatgcgcaagctggccgacggcgagcatggcgggcgggcgatcgtcgccggggaatcgggggttgccggtctggccggcctgctctgcgccgccgcgcacgaggatgtccgccgcgcgctcgggctggcgcccgacgcgcgggtgctggtgttcgggacggagggggcgaccgatccgcaggtctacgagcggctcgtcggccgctcaccggaggcggtcgcggcggcgtgagcgggcgcggcccttccggccggtgtcagcgggtcagttcggtgacgatgttggcgccgtcggcggtcagccggtcggccttctcgcggtagtcgagggcgccggagaagccgccggccgccttgacccgctcgacccacaccggcgaggcgccgagcgacaccagccgctgcaccatcgtctgcgtcgagcgcatggtcatccggccgttctcggccatgcgcggggcgtgcaccatgaactccgcgctgggcgccgcgtagcgcgggtagccggcgaggtagaggccgacgcacatgctctcgcaggattcgccgccgcgcacccgcgtggcgatggagcgccccgactgccgctcggccagcaccgcgtcgatcatcctgtagccggccgaggtgaagccgcccgggctggacagttcgaccaccaacggacgtccggccggcaggccgcgcagggcttcggcgaagcgctgctcgaccccggcggtgatgattccgtcgacccgcagcacggtggcgccgccctgctcggagcggctgagggcggcgtccgggaactcgctggcgatgcgctcggcggcggactggggggcggggtgcgccaccgccatggcggccggcgtgtcggcggcgaagccgtgcgtggcggcgcccatcgtcagcagggcgcccaggccgagccaccgtgccgccgtccgtgctgccgtcttcaccgccatgaccgaacctccttgctgctgtgtccagcgtggcggtgaaagcttgcctgacggttaacggagggctccgggggtgtcgcgcaatgggggtagcgtccggccagcgtgataaagcgtgcgccgccgcgcaaagggcgttagaagaagagtgggattccaagggactgccgggcgccgtccggccgtccccgcgccagaacgtcgaagagcggaacgatgtcgtacatccagggtgaaacgggcgattgggaaatcgtgatcgggcttgaggtgcatgcccaggtgatttcgaacgcgaagctgttttccggctccgccaccgagttcggggcggcccccaacagccaggtcagcttcgtcgacgccgcgttccccggcatgctgccggtcatcaacgagtattgcgtcgagcaggcggtccgcaccgggctgggcctgaaagcgcagatcaacctgcactcggtgttcgaccgcaagaactacttctacgccgacctgccgcagggctaccagatcagccagttcctccagccgatcgtcggcaccggcgagatcgtgctggacctgcccgacggcaccagccgcaccgtcggcatcacccgcctgcatctggagcaggacgcgggcaagtccctgcacgaccagcacccggccaagacctacatcgacctcaaccggtcgggcgtcgccttgatggagatcgtgtcggaacccgacatgcgcacctcggaggaggccggcgcctacctgcgcaagctgcgttcgatcctgcgctacctcggcacctgcgacggcaacatggaggagggctccatgcgctgcgacgtgaacgtgtcggtgcgcaagccgggcgcgcccttcggcacgcgttgcgagatcaagaacgtcaactccatccgcttcgtccaggccgccatcgagtacgaggcgcgccgtcagatcgaggtgatcgaggaaggcggcacgatcaagcaggagacccgcctgtgggacacgaccaagttcgtgacccgctcgatgcggtcgaaggaggaggcgcacgactaccgctacttccccgatcccgacctgctgccgcttgaactggaggccgactgggtcgaggcgatcaggaacaccttgccggagttgcccgacgagaagaaggcgcgcttcatcgacgactacaagctgtcggtgtacgacgccggcgtgctggtgtcggaacgcgccaaggccgattacttcgaggcggtcgccaagggacgtgacccgaaactggcctccaattgggtcaccggcgagctgttcggctatctgaacaaggccggcaaggagatcgaggacaacccggtcagcgccgagaatctcggcggcctgatcgacctgatcgccgacaacaccatctccgggcgcatcgccaaggaggtgttcgaggcgatgttcgagactggtgaaaaggccgccgacatcgtcgagaagaaggggctgcggcaggtcaccgacaccggcgccatcgagggcgccatcgacacggtgatggccgccaacgccgacaaggtggccgagttccgcggcggcaaggacaagctgttcggcttcttcgtcggccaggtcatgaaggcgacccagggcaaggcgaatcccgcccttgtcaacgagatcctgaccaccaagctgaagggctgacgccaccggcgccacgcgccgtccggccaagcctgtgagaaagcctctcccgtcgcgggagaggcttttttcttggggcgggcattccgtccggccaaacggcgggattggattttccggactgctgtggccactatctctcggatggggaggggccatgacggacgagggggtgatcgtcgcgctggcggcgctgggcgtcggcatgctcctcggcgctgtttcgggagccgcgctgggctggcggcgggggcagcgccacggacaccgttccgccagcagcgcgctgctcgaacgcgaggccgccatccatcgcggcatcatcggcgagcggctggagatggcgctggaggcgaccggagcggcggtttgggacgccgatctggtggccggcacctgctggtggtcggacaccttccccgcgatgctcggctatgccgatgtcccgccgatgcccgccgatttctgggaacggcgtctgcatcccgacgaccgcgagcgggttctcgcccacatcgccgcccatctcggcggcgagaccagcagctacgcctacgaataccgcatgcggcacgaaagcggcggctggatctggatcgccgccaagggccgggcctttcgcgacggcgaggggcgcgcggtccgctacgccgggatcatgagcgacatcaccgaatcgcggcggcaaagcgagcgcctgcgcgccagcgaggagaggttgctgaagatcatggaggcggcgcccatcggcctgaacctgacgacccgcgatgggcgctggctgttctgcaatgcccagtccgttcatctgctgggtcgcgaccgtgccgaactgatgcggacgccgatcccggatctttacgccgacccgtccgaccgcgcggcgctgatcgcccgattcgaccgcgaggggccgttccgtgatgccgagatccgcttccgccgaccggacggtgccgtggtctgggtgctgtcctcctggaacatgatcgagctggacggcgagtcggcgctgctgacctggctgtacgacatcaccgaccgcaagacggcggaggcttcctcgattcgcgcgcgtgaggatgccgagcgggcgctgaccgacctgcgggccgcccaggagagtctgatccaggccgagacgatggcgtcgctgggccaactggtcgccggtgtggcgcatgagatcaacaccccgatcggcatcgccctgaccgccgccagccacatcggcgagcaggcgcagatgctgcgggaccgcttcacctgcgggacgctgcgccgatccgatttcaccgatttcctcgacgggctgggcgagagcgcccggctgatgatggcgaacatcgaccgcgccgcctcgctggtccagagcttcaagcaggtggcggtcgaccagtcttccggcgaccgccgggtcttcgacctgcgcggctacatcgcggagatcctgttctcgctgcgtccccggttgaagcggacccggctgaccctgacggtcgagtgcaccgaggatctgatgatggacagctttcccggcgcgctcggtcaggttctgaccaatctggtgatcaacgccatcgtccacgcctatggcgacggcggaacgggaacgatccgaatcgccgggcaggcggatggcccggaccgggtgcggatcgacttcatggacgacggcgccggaatcgagccggagcatctgtcgagggtgttcgatcccttcttcaccaccaagcgcgggcagggcggttcggggctcggcctgcacatcgtgttcaacacggtcaccgggccgctggggggcactgtgtcggtgcgctcctggccggggcaggggacccgcttcaccctgctcctgccgcgcgaggcaccggccgctcagccgcagccggtggtggtggcggcctctccctgaccttcgggcccgccgaagtggatcatcggccgccggtccggaacgccggacgggtcaggcggcgtgcagttcgtgcaattgcagatgcttgggccgacggccgcggcgcttgggcgcggccagggcggcggcgcttccgttctcgccccggagttccgcgttcaattcctgcacgcaacgcatcaggagttccttttcccgcatgtcctcgcggtcggtgacctccaggcaactcaacttgatttcgacgagatcgatcagcgtttcggcgcaccggcgtgacagggtcatggtgtcctccgcggcaggcgggtgaggcggttcacccgaagggttcgttgctcatggttccattctagcccgtggagattaaaaaatgactaaaattttatacagatttatctcactttcttggctgttctaatcttttgaatttatggtttgtaagcgttgacaaggggccggtcgggccgctagaaacccacccacgccagccgcaccgcaaggatgcggaccgggttggaggggtggccgagtggctgaaggcaacggtttgctaaaccgtcatacgggttaaaccgtatcgtgggttcgaatcccatcccctccgccacgaccaggaaagtttcctggtcacaccgttcggaaccaagccacggaatcccgtggtttgtttgacggagcgtagcgcagcctggtagcgcatcagactgggggtctgggggtcgcaggttcaaatcctgtcgctccgaccagttccggacggatatgagaagccttggaacccaacggttccaaggctttttcatttggcccgaccgcagcaccgtccggcccgctgacagccttcgtgtggaaatcctgtgtggaagtcgagccgattcccacacgcagactcgccatggtcgcgtcctcgacggcacgccgggcggccttgtcggcgacgcgcagatagcggcaggtggtctcgtagctcttgtgccgcgcgagctgctgcgtgacggcggcaggcgccacgagggcgacggcggagacgaagcttgccttcgtgtcgtggaaacggtgcttcagcgccgcgctgaccggccaagccctccaccgcctgcgccgaggcgagcggattgacatcgacaccgtcgccgaaatcctggaacgcgaggcgatcgccatccgccagttcctcgctggccagagcaccatgggagggcaggggtaggcccaaacgaaacgcggcgggccgaagcccgccgcacatcttgtgccaccaggggcgaacccccgtgacgtgttaacggaaggaccccgatcccccagcggctaagcaaaggtgattgtctttccacgcttaggctcgcactccattcagcgcccgtcaagagggttgaagaagcattcaagctagacacgcttcgggcgcagaaagacaatccagctctttccaaggcgaaggaacttcaatccctcgccgaccgcgcgggaggaatcccttgtccaagcgtctccgctatcgcctcgccctcgatctcggcaccaacagcatcggcttctgcctgctcgatctgaacggcgaggggcggccctgcgggatccggcgcatgggtgtccgcatcttccccgatgggcgcgatccgaaatcgaaggcgtcgctggctgctgaccgccggctggcgcgctcgatgcggcggcggcgcgaccgctacctgcggcggcgcaccgtgctgatgaacgctctggctgccgccggcctgatgccgcccgatccggccgaccgcaaggccctggagcacgacgacccctacaccctgcgagcccgcgcggtggcggagcctctgccgccccaccagctcggccgcgccctgttccacctgaaccagcgccggggtttcaagagcaaccgcaaggccgccggtgacgagaacgaggccggcaaggtcaagaccgggatctcggccctgaaggaggagctggccgccagcggcgccggcacgctcggccagtggctcgccgcccgccacgcccgccgcgagccggtgcgcgctcgcctgaccggcgccggggccaaggcgtcctacagcttctaccccgaccgctcgctggtgcatgaggagttccaggtgatccgcgccgtgcaggctccgcaccagcccggcgtgactcccgcccagtgggaccggatcgagtcgatcatcttccaccagcgcccgctgaagccggtgaagccgggcaaatgcaccctgtaccccaccgaggagcgcgccccctgggccctgcccatcgcccagcagttccgcatcctgacggagctggccaacctgcgcttcgagcgtcctggcgaaccccaatgggagctgaccgccgacgagagcgccgccctgttcgcgcgcctgtgccgcaagggcgacctgaccttcaaggcgatgcgcaaggacctgaagcttccccccgacacccgcatcaacctggaggacgagaagcgcgaccgcctgaagggcgacgcggtggccgacgccctgtcggccgacaagggcaagcgccggcggatcggcccgccctggcacgacctgccgccggcccgccagcgcgcgattgtcggccgcctgctcgacaccgaggatgaggaggaactcgccgtctggctggtcgagaatgtcggcctgggctgggaggtggcgattctcaccgccgagcgccccggcctgccggacggccattgcagcctcagcgaaaaggcgctggaggaggtcgtcccgctgatgcgcgaccagcacctgcgctatgacgaggcggtgagcgccctgggcctccaccattcggatttccggcccgactcgctgctcgacgagcttccctattacggcgagccgctggagcgcttcatcgccttcggcaccggcgagccgtccgacccgccggagctgcggctcggccgcttcccgaacccgaccgtccacatcggcctgaacgagctgcgcaagctggtcaaccgcatcatccagcgctggggcaagccggaggagatcgtcgtcgaactcgcccgcgacctgaagcgcagccgcgacgaacgcgagaagctccagcgcgaccaggcgcagaaccagcgccggaacgaggaacgcgccaaccgcctgcgcgaactcggggtcgaggtgaaggccgagtcgcgcctgcgcctgcgcctgtgggaggaactgccgcagcatggcttggcccgcgtgtgcgtctacaccggcgaggtcatcagcctgacacgcctgctgcaaggcgacgtggacatcgaccacatcctgcccttcagcaagacgctgagcgacggccccgacaacaagatcgtctgcgtgcgcggcgccaaccgcttcaagcgcaaccgcaccccttgggaagccttcggcgtcgtcccggtggacggctacgactgggcggccatcggcgagcgggccgagcaactgccccggaacaagcgttggcgcttccaacccgacgcgatggagcgcttcaacggcgagaagggcttcctcgaccgccagctcacggaaacccggcatctgtcccgcatcgcccggcagtatctcggcagcatcctgccgctggaaagggtgcgtgtggcgcccgtccggctgacggcgctgctgcgggcccgctggggactgaacaagatcctctccgactcgaacctcaagaaccgcagcgaccatcggcaccacgccgtcgacgccgcggtgctcggcgtcgtcgaccagcggctcgtgcagcaggtcgccaaggcggccgagcgggcggaggtcaacgagctggagcggctgttcgatggcctgcccgatcccttcgacgggctgggcgtcgattccttcggcgaccaggtgcgggacaaagcgcgcggcatcgtcgtctcgcacaaggcggagcacggctggcagggccgcatgcacaacgacaccgcctatggcccggtggccgtccaggcggacggcgcccatgtggtggtgacgcgcaagccgctcgccagcctgaccgccaaggatttgccgaacatccgcgatcccaagctggcggccgcgctggaggcccacgtcgaggcgcaggcggcgcaggggcgcggcttcgccgaggcgttgagcgccttcgaatggacgaacggaaccgtgcgccgcgtgcggatgctcgacaagctgggcagcccgattccggtccgcgacccggccggcgcggtgttcaagctctacaagggcgacagcaacgcgtggtacgagatcctccgcgacgggcggggccgctggaccgggcggatcgtcagcacccacgaggcgtaccagttgcatcgccaatgggtggccgagaccggctccgcgcgtaccgaggatggccgcccgttccaggaatgggcggcccggcgcgtggtcggcaactcggacacgccgctgtttcggctgttcaagggcgacctgctggcgctgggcgtcgcgcccgaccgccagatcctgcgggtggtaaagttctccgagggccagatcgtcctcgcctcccatcacgaagccgggaacctgaaggctcgggacgccgacaagggcgatcccttcaagtaccgctacagctctcccgaggccctgcgaaaagcccaggcaaggcccgccggcgtggacctgctcggctatgtccacgacaaggggccggtggagtgagccatggcaagcgcggccgggatcgtcatcgaggttgcggaagacgggcggcatctgtcgcttgatcgtgggttcatggtggtctcggcgcgtggcaatgaaatcggccgcgtgccgctggacgacatcgcggtgttgatcggcaccgcccatgggttgacctattccaacaacctgttgctggcgctgctggaaagggactgtgcggttgttctgtgcgggcgcaacttcagtcctgccgccattttgtggccgaccgacggccatcacgtccaggctcagcggatgcgggcgcaggccgaagtgaccgatgccttcaagaaccgattgtggcaggccatcgcgcgagccaaggtgcgaacgcagggggcggttcttgaatcactcggtcagccggcgggtgccttcgtggaacttgctcggaaactacggtcgggtgaccccgacaacatcgaggcgcaggcggcgcgtcggtattggccgttgctgttcggatcggatttccgacgcgacagcgatgagccgggcatcaacggtctgttgaattatgggtatgcggtcttgcgtggcggcaccgcgcgagccgtcgcggcggccgggttgcatcccacgctcgggctgaagcattccaaccgatacaacccgatgtgccttgtcgatgatttgatggagccattccggcccttggtcgatgtcgttgtccatcggcttgtggccggcgggcagcaagaggtggaccgtgaaaccaagcgcgtcctggcgggaattctggtgcaggacctgcggaccgaggttggcgtgacgcctttgtccacctgtctgtttcggcttgcctcgtcgcttgcgcaggtgatggtgggtgaacggaaggtcttggatttgccgttgttgccactgccgctcgatttggctgttccgcaatctcgcaaggagggcgcgcatggcactcagcgcgtatcgcttgatgtggatgatggtgatgtttgatctgccgacggtgacgaagtcggatcggaaggcagcgacgaaatttcggaacttcttgctggatgaaggttttgagatgtcgcagttcagcgtctacctgcgtttctgtgcgggaacgccgcaggttgaagcgcgaatcggacgcatccgttccaatgtcccgaagaggggaaaagtgcagatcttgaccttcaccgatcgccaataccagacaatggtctgtttggaggcgcgcacgaaacgggaacccggagcgcgttacgaacagtttaagctgttttgatggctggttagctccggatggcaatggaaaaatctccagatagcgcttttataacaaagcgttatctggagacctattgtagccgctgtgggatcggggtccagccgcaacaatcctcccggtcctgcggacagacggtcaattgtagccgctgtgggatcggggtccagccgcaacgtgctcatctcgaaccgctcctgccgcccgattgtagccgctgtgggatcggggtccagccgcaactcaaatctctagccggcgagagttttgaggattgtagccgctgggggatcggagtccagccgcaacggtgggcggccgggtgcggtcagcgacaattcggaaaagaaaaaagggccgggaaattcccggcccttcccgcaaagcgatgatcagtgtctatgcgaaggccttgtaggcgatcagcgtaaaggtgtcgcggacgcccggcaaggtctggacatgctcggtcacgaaacggccgatgtcgtcgtcctgtccgagatagcacttcatcagaagatcgtactggccggagatggaatgcacctccgacaccggttcaatctgctggaccgcctggtcggcgaccagataggcctttcccagctcgcacttgaccatgacgaagatggtctgcacggactcagccctcctggctctgctcggcggattccgcgaccgtctccgccgccgggcgaggccgggccgagcgcagcatgaaggcgggcatgtggtcaccgaaaccgatcaccgacacatcgtcgtcatcgtcgtcacggcggcggcggcggtcgcggtcacgatcgcggcgcggctcgccattgcggcgggcttccgcggcagccagcgattcacgcggctgacgctccggacgctcctcgcgaagcggacgttcctcacgggggggacgctcgtcacggacggcgcgctcttcccgagcggggcgctcctcgcggctcggccgctcatcgcgcgaccgggcttccgggcgaccttcggaacggctgcggctgccgccacggccgccacggcgggggcgagcgtcctcgtcgccgaactcggccgtctcgaggccgtcgatggcgatcatcggaatctcccgtttgatgaggcgcgtgatggcgccgaccagcttggtgtcgtcgggcgtcgccagcatgaaggcgcggccctgcttgccggcgcggccggtgcggccgatgcggtggacgtaatcgtcgggggtcaggggcacgtcgaagttgaagacgtggctgagaccctggacgtcgatgccgcgcgccgcgacatcggagcagaccagcaacgagatctcgcccttcttgaacaggtcgagcgtctcggttcgcttggactgcaccatgtcgccgtgcagtgcgccggcgttgaagccgtgacgctcaagcgacttctggagcacggcaatgtcgcgcttgcggttgcagaagatgaaggcgttcttgacgtcctcggtgcgcagcaggtggcgcagagccttgcgcttgtccatgtcctgcaccagggccatggcctgggtgaccgtttccgccggggaggcgggcggggcgaccgtcacctcctgcggagtggtcaggaaggcgtcggccagacgtcggatctccggcggcatggtcgccgagaagaacagggtctggcgggtcttcggcagcttgctgactattcgctcgatgtccggaatgaatcccatgtcgagcatgcggtcggcctcgtcgatgacgaagaccttgatgtcgttcagcatgatgttgccgcgctcgaacaggtcgatcagacgacccggagtcgcgatcagcacgtccacgccgcggtccagcttcttgacctgctcggagaaggtctccccgccgatcagcagcgccatgctgagcttgtggtacttgccgtacatctcgaagctgtccgccacctgggcggccagttcgcgcgtcggttccaggatcagcgaccgcggcatccgtgcccgcgcccgcccggaggcgagcagcgagatcatcggcagggtgaagcccgccgtcttgccggttccggtctgcgcgcagccgagcacgtcgcggccttgcaggacccagggaatcgcctgttcctgaatgggcgtcggctgggtgtaacccttgtcctcgatggcgcgcaggacgtcagggccaagcccaagttccgaaaatagcatccaacctgtttctgatctggagttcgcaaatcgagcgtgcaacgcccgatgcctagatagtgcggcagaataggtagtcaaaggcccatgtcaatagacccgatgttgaaacccccaaaataggcgggaatgccgccgccgttggcggaaaaaccgacttgcggtaggttgggtcgcccctgggagggctgtggttcctcgttggagagtgtccgtccatgcttatccgcgccgaagagtcggtcctggtcgtcgtcgacgtgcaggcccgtctgctgcccgccatccacgagtccggccgggtgctgcgcaacgccggcatcctgctgaaggcggccggggcgctgtccgtcccggtgctcctgaccgaacagtacgccaaggggctgggcgagacggtggaaccggtccgcgccgcgctgcccgccggcacgccgaccatcgaaaagatcaccttcgcctccaccggcgagccggccttcgtcgccgcgctggaggggctgcgccgccgctccgtcgttctgtgcgggaccgaggcgcatgtctgcgtgttgcagaccgcgcttgggttgctgcgactcggatacacggttcatctggtcgccgacgccgtgtcgtcgcgcacgccggccaaccacgccgccgccatcgaccgcctgcgcgccgccggggcctccatcgtcaccaccgagatggtggtgttcgaatggctggaacgtgcggggacgccggtcttcaagaccgtcagcgccctgatcaagtgacggcgggacgatgacggaggtggaaggaatgacctggccgaccctgatcctgcttcctggcatgccgctcgacgcggcgctgtgggaacaccaggtccgccatctcgccgaggtcgcggaggcccgcgtcgccaacctggcggcccatgattcgatcggcgccatggcggagcatgtccttgatggcgcgccttcccgattcgcgctcggcggcctgtcgatgggcggttacgtcgcgctggagatcctgcggcgcgctccggagcgggtggagcggctggcgctgctggacaccagcgcgcggcccgacacgccggagcagacggccaaccgccgcgacgccgtggcgctcgcccggcagggcaagtacggctcggtgatgcgggccgggctggcacggttggtccatcccgaccggctgtccgaccggccgctggtcgactcggtgctggcccagatggagcgggtcggagtcgagggctacgcgcgcgaacagaacgccatcatgaaccggccggacagccggcccggcctcggcgccatccgctgtccgaccctggtcctgtgcgggcgagaggacgcgctgaccccgcccgacctgcacgcggagatggccgccgccattcccggcgcccggctggcgctggtcgagcagtgcgggcatctgtcggcgatggagcagccgcaggcggtcaccgcgctgatgcgcgactggctgctgcgtccctgacggttcatctggaagcaaccgcctccaggccttttccatcgtgaccgggcttgccacggccatgacgcgccggaggacggcggacacgatggggagccggaagcctgtccttcacaatgcccccgaggccgtggcgtcagggccccggatgcctcggcgggacgcctcagcagtcggggttgccgccacaccgtgtgtcgttggcctgcctcgtcgggaacagcgagaaggtcatgtcgctgatcaggtactggaaatcccggtcgtcgggcccctgcggccggtcgagccagccggtggccgaggtcagcgccccgccgccacggcagaaggcgccctggacgacgatcgggccgcccggcggccgcgtcgggatgggggcgtcgccgcagatggcggaactgagcgtcgtgttggcgatgttgaaggccagcacgaccttgtagtcgggccgggctgtctcgttcggcgtggtcgtcagattggtcttcacgccgaagacgcggttctgcatcgagggcagcacctttgcggcgaagctctgcgggtccagtccgaaagggtcgccgatcaggaccacccgcagatcccgctccgacgcggcgtaggcgacctcgctgagcgtgtaggcgggcatcgggtcgttcgccaccacccgctcgttcatgcagccccccagcaacggcagggccgttccggcgaggagcagggccgggagcgcgtgccagcgagtcatctcatcctcactccgatcagaaaccgtcctgctctgatatggcgcgccagggcacgattgacaggagcaggacgggagcgccccgccgccgtcagacgtcgatgtcgtcggccttcacgaacttggcgttgtcctggatgaagcggaagcgcagctccggccgctttcccatcagatcctcgaccagcatccgggtgcggtcgctgtcggcacgctcctccggatcggcggcgttgggaacgacgacgcgcagcagggtgcgcttggccggatccatggtggtgtcgcgcaactgcgccggcatcatttcgcccaggcccttgaagcggctgatgtccggcttcttgcccttgaactggcgggacagcagttcgtccttgtgggcgtcgtcgcgggcgtagacctgcttgttgccgtggctcagccggtagagcggcggcagcgccaagtacaggtgcccgttctggatcagccccggcatctcccggtagaagaaggtcatcagcagcgaggcgatgtgggcgccgtccacgtcggcgtcggtcatgatgatgacccgttcgtagcgcagcttgtcgctcgagaaatccttgccgacgccgcagcccagagcctgggtcaggtcgttcagctcctggttggcccgcatcttgtcggtcgaggcgctggcgacgttcaggatcttgccgcgcagcggcaggatcgcctgggtctcgcgctggcgcgcctgcttggcggaaccgccggccgaatcgccctcgaccaggaagatctcggtgccctcgggcgagttgcgcgagcagtcggccagcttgccgggcaggcgcaggcggcgggtcgcggtcttgcggcccatctccttcgactgcttgcggcgcatccgctcctcggctttctcgatcagccggtcgagcagggcgttggcggacggcgggttgcccgacagccaatggtcgaaatggtccttcaccgccgtctcgacgaggcgctgggcctcggccgtaaccagcttctccttggtctgaccctggaaatgcggctcgcggatgaagaccgacagcaggacgcaggcgtcgcccatcacgtcgtcggcggtgacctgcccggcgcgcttgttgttggtcagctcgccataggccttcagaccgcgcgtcagcgccgcccgcaggcccgcctcgtgcgtgccgccgagcggggtgggtaccgtgttgcagtaggtgtgcgagaagccctcgtcgtcgtccggccacgccaccgcccattcgacgcgcccctggccgccgggaaagtccagcgagccggcgaagggggagggggtcagggtcctgcgatcgcgcagcgccgccgtcaggtagtcgagcaggccgccggggaaatgcagcgtctccgccgccggagtcgtcgcgtcgacggagagcagcgagggatcgcaactccagcggatctcgacaccgcggtagagataggccttcgagcgcgccagccggtacagccggtgcggttcgaaacgcgcggtctccccgaagatttcggggtcggggtggaagcggatggtggtgccgcgccggttgacgttgcccttgggcgtcagcggcccctgcggcaggccgcggctgtactcctgcacgtacagctgcttctcgcgggcgatctccaccgtcagccggtcggacagggcgttgaccaccgacaggccgacgccgtgcaggccgcccgaggtctcgtacaccttgttggagaattttccgcccgaatgcagcgtcgtcaggatgacttccagcgccgacttgccggggtatttcgggtggtcgtcgatcgggatgccgcgcccgttgtcgcgcaccaccacggtgccgtcggccgtcagctccaggtcgatgcggctggcatggccggcgacggcctcgtccatcgcgttgtccagaacctcggcgacgaggtggtgcagcgcccggtcgtcggtgccgccgatgtacatgccggggcgacggcgcacgggctcaagcccttccagaacctcgatgtcctgggcggagtagctgtcggccttgggccctttgttctcgaaaagatcgctcatggcggcatgataggaatttcgtcaggggtgcgcaagcgcatcctgtggcgcttatataccctcgatacaagatttggtgcgtcaattttttgcgactgcgaggggccgatgaccaagggtgcagggaccggggggacggggaccggaggcgcggggtatgatttcgacaacgggccggccttgcgggccatcgccatgccggccgacaccaatccgaacggcgacatcttcggcggctggctgttggcgcagatggatctggccggcggcacggtggcggtgcgccgctcgcgcggccgggtcgccaccgtcggaatcgaggcgatgaccttccacaagccggtctatgtcggcgacgaggtgagttgcttcgccaccgtcgagaaggtcggccgcacctcgatccgggtgcgcatcgaaacctgggtgcgccgggaacggtccggagccgaaccgatcaaggtcaccgagggtgtcttcacctacgtcgccatcggcgaggaccgcaagccgcgcgaggtgccgccggggtgagcgcgccaggcgcctatccgccggtcgtttcgcagccgggctgaaggccgggatcgccggcgaaacttccgtcgtccaccgtcttgtcggtggcgccgtagtccgggttgacggtggcctggagcgccgccagacggtgggcggtggcgacgcgggcctcgcgctccaccgcgcggtaatggtcgatcacctgctcgccgaaggcggtcagcacggtgccgccgccatgcttgccgccgaccgcggcgctgaccaccggctcgcggaagatgtggttgaggtcgtcgaccagcagccacgcccgccggtaggacatgccgagcgcccgcccggcggcggagatcgagccggtttcccggatccgttccagcagcatgatcttgccggggccgatcgatccgccgggctggaaatcgatccggattcgcatgcgggtcatggcgttccctgcctttccgggcggtcggccgtcgccagctcccagccgtccccctctgtgctccacgcgccggtgcggaagaagccgtcgatccgggcgatccacggatcgatgtccaggccggcgctggccagccagtcgcggttgaagtaggtgccggcgtagcgttcccccgaatcgcacagcagggtggcgacgctgccccgccgcccctcgcgcagcattccggcgatcagcgtgatgcagccgatcagattggtgccggtcgagccgccgcaggagcgccccagccggtcgcgcagcacccaggcggcggcgacgctggcggcgtccggcaccttgaccatgcggtcgatgacgcccgcctggaaggagggttccaccgtcggccgcccgatcccctcgatgcccgagccgcgcggcgcggtggcgtcggggttgccgtcgcggaagctttcgaagaaggcggattgttccggatcgggaacgcagacccgcgtcggcagccggcggtagcgcacgtagcgccccatcgtggccgaggtgccgccggtgccggcgccgcagacgatccagtcgggaaccgggtgcggctcctgcgccagctgctcgaagatggattgggcgatgttgttgttgccgcgccagtcggtggcgcgttcggcgtaggtgaactggtccatgaaatggccgtcgcaggaccgcgccagcctccgtgcctccgcgcagacctccgacgcgcgctccaccatgtggcaacggccgccgtagaactcgatctgcgcgatcttggccggcgaggtgccgcgcggcatcaccgcgacgaagggaaggtcgagaagctgggcgaaataggcttccgacacggcggtcgagcccgacgacgcctcgatcaccgtgctgccctcgcggacccagccgttgcacagcgcgtagaggaacagggatcgcgccagccggtgcttcaggctgccggtggggtgggtcgattcgtccttcaggtacagcgtcacgcccggcgcccccggaatcggcaggcgcagcaggtgggtgtcggccgaacggttgacgtccgcgtcgatgcgccgcagcgcctcgtcgagccagccgcgcggcgtcgaaacgggcgcgggcatgggcgcggtggaggagggggtggtcatggaagccatccaggaaatccggatccttccatagcgcggattgttgcggaatgcaccccgtcccgcgaccgccccctccggatcccctttatc
